United States Patent Application Publication US 2011/0166335 A1 - sequence listing, part 2

SEQ ID NO: 389 - DNA, 10872 bp, Xenorhabdus sp.
  CDS (5089)..(5622)
tgttgtggctattgctgtatttgcctgagatggtaagcgttgtttcagaatatcggtcagttgttgacaccattgcgtagcaatatcttgatattccacatcagcatcaacgcgatccagtaatcgttgagcacttaattcactcaggcggcggtcaaaatctttacctgactggcaaaagtgttcataggaggtatctcctaagccaaatacagcgtaagccgtctctttcatcaaagcggcttttttggaatgcagatatttatgtagtgctacagcttcttcggcaggttcaccttcaccctgcgttgaagaaataataatcaatacgcgctcttttgcgatctgtttgaatttataatcaccagcattaactaaattcacactcaaattctgcgccagtaaagcgtctctgagctgttctgccagacgccttgcattacccgtctgagaagccgaaatcagtgttacggtttcctgttcagtttcaggtatgcctgacactgatgctaccgtgttggtttgcggttgagaattcaacatgccccaaaaatagcctgataaccaagccagttggtgcccagaaaaatcactaacctctgattgcaggcgtgacaattgttcctgagatacaggtagtaatgcagttgaaggtggttttgcagtcattatccagtgccctttgctatagccaatacccatgattaacagtcacaaacatggagtaatcataaggttatcccagaacaggcttcggacttaaagaaaggttagcaatatctaataactaaattacctaactttatttacagatttaatatatcgataaagttgttaaacgctggattttatttctacagaaaaatcacgttaggcgcgaaagttcaggtagaatagccggccttttgaattcaggaaaaagtattatgagcactaccatctttaaagattttcaatttgaagcggcgcatcgcctgccacatgttcctgaaggacataaatgtggtcgcttgcatgggcattcatttatggttcgtctggaaatcaccggtgagattgatcctcatagcggatggctcatggactttgccgatgtgaaagctatcttcaagccaatttgggaacggctggaccaccattatctcaatgagatccccggtctggaaaacccaaccagcgaagtactggctcaatggatttggagagagttacaacctgctttgccacaactcagcgccgttatggttaaagaaacctgtagtgccggttgtatctatcgtggagagtaagacattcagcaccaaattttggtgctgaatgcacaataaaagcgccaaacgcacatcaggcgatatttaagtatttgtgtgtctgcatcgagaaacgccagttacgggcaatgcaggtttcaatacacaagcgggttgcttcttctttctgactgataggctgtaaggcaataaccggtctgttattttcatcaagcatagtcaatagatcatctaatgattcaatatcgcgttcacgcccgacagggtgcttaatttcatttgcgcgattcatcgcttcaggcaagactttgtatccgccccgcattttcactttcggtgaaacggttacccaagttttgtcagtacagtggatcgcgtgtgtaccactcgtttctatctggcactgatagcctgcattttccagtgcttccgtcaggggacgtaaatcatacaaacacggctctccacccgtaattacgatatgacgggcggtatatccctgacgagtgaacaaattaatgatttgctctggtgtggcagcgccccaggtatcgctatcctgcgattttaccagtatgttctccatcgactgctgcttatcagcttctttttcccaagtatgcttggtatcacaccagctgcaccctatcggacatccctgcaatcgtatgaaaacagcaggaacaccggtaaacacaccttctccctgcaaagtctgaaacatctcatttattgggtaaatcataaaaaaactctggttttaataaactgcccgttattattacagatatctatcccgcggacatccatctttatggtatcgtacgaggttgcttttgctggtatctgacaccagacagggcattgtatacctgaaatagcatatgcctgaaatagcattgtatgcctgaaaatactctctggcatgaaagatagatgggattaacgaatgcaagacaatgaaaatcagcttaaacagggtctgagtgtgaggcatatccgcttcatggctttaggctctgcaataggcacagggctgttttatggctcagcagctgcaatacaacaagcaggaccggcggtattgctggcatatctaattggcggtgctgccgtatttatggtgatgagagcactcggcgaaatggctgtccaccatcctgtttccggttctttttcgcagtatgccagccattatctgggcccattagccggcttcctgacaggttggctctatgttcttgaaatgctgtttgtttgcctcgctgatatcactgcattcggcttgtatatgaaattttggttccccgatgttgaccaatggatttgggttctgagtatcgtctgttttattggtgcgctgaatctatgccatgtgaagattttcggtgaaatggagttctggctttctatcgttaaggtcactgccattattgccatgatcattggcggtcttgcaattatgatctttggttttggtcagacaacagagcatgccacagggatcgctaatttatgggaacatggcggctttatgccgaatggcatcagcggagtggttgcttcaatggcgattgtgatgtttgctttcggtggaatagaagtcattggtatcactgccagtgaagcgaaagatccggcaaaaacaatacctaaagcgattaatgctgttcccttccgtattttaatcttctatgtcctgactttatgtatcctgatgtgtatctatccgtgggatcaaattggtcagaatggaagcccatttgtacagattttttctgatcttaaaatcagtgcagctgcgcatgttctgaatgttgttgttattactgctgccatttcagccatcaatagcgatatttttggtgccggacgaatgatgtatggcatggctcaggaaggacaagcacctgaggcgtttaaaaaactgacccgaaatggggttccatggatgactgttctggtcatgattgtggttctgctgctcggtgtcatgctcaattggctgcttcccggcaatatttttattcttattgcatctgtcgccacatttgccactgtctgggtgtggttgatgattctgctttctcatgtggctatgcgtcgtaaaatgagtgcagaagagatcagaaccttgaaatttccggtaccaatgtggcccattgctcccataattacgattgcttttatgggtgcaattatcctgctactcggatattttgagcaaacgagggatgctatatacattggcgctggctgggtgattatcctaaccattgcctattttttcagcataaagaaaaaacttgccacatctcatcgtgctagccaataaaattggtctctaaaaacgccggagcaatttccggcgttttgctcttttttacctttcaccactcttattaattgaaaatcttcgtaacttataacgaaaatcggacaagaagcggattatgatcagaagcaatggttgttaaaacggttgcactctggactgttaattcacgataaaaaacaaagtctaagggtttaccaaatacaattgttctatgatcatcgttaaaatagacttcttttagccccatacgctgcgcaaaatgctccagcactctgaatctccgacgactccacgcattaaaatcaccggcaaatatcactggcccatcatgtaacttaatatagataccaatgttatccaactgacgactataaacgtcaacgccaagactgaagttaatggcgtgtacattcactaccattagctgttgttcatcggctaaagggtacatagtaataagagatgatttagaaagccttaatatcggctctttttcccttaacggacaacaatagataggtgaagaagaggctaatgtcatcacacccgatggatgttgaggaatagcaaatgcaggtacttgatctgcaaccaagccactggctgtgataaatttcagtaagtcaggagttgtttgtgcttcttgcagtaaaataagatcgcttttttcaattaaggaagataaaacactttgccatcgtgggcgttgctgtttatggatattccaaatagcaacagaaaacacattattatcagcaaaaaatggctctccacatggcaagagtgcttcttcaagtaatcgcgtggaagtaggaaaaaccctctctacaggctgccctgcgatatatcttactgcataatttttatgagccagattttttctctcacgggctcttcttacatacctatttcttatcaaattgcaccccaacctaccttaatgcatcagccttcattaatatgacacctctataattgattgcaatccttagtactaaaaacaaagtatgaattgtaagagtaaatgtcagaatagattttatacagaaaatcttttccatttattaaaaaagtaacgcatttggtagcaagttattggtgaggcgatattgcagtactcaagtatatatagcagaatcatattaatatgacataatagctggattcatatgacaaaggataaagtgagatgggctacagtctggattttcgaaagcgagtactggcatataaagacaagcattcgttgaccttcgaacaaacgtgtacccattttgaggtttctatgcggaccttatttcggtggagtcacaaaatagaaccctgtgtgacccgtaataagccgcccacgaaaatcagtgatgaagcgcttctcactgatgtccaaaattacccccgatgactatcaatgggaaagggcaaaacgcttgggtgtcgcgcagtctgctatccattacgccttgaaacggctgaaaatgacagtcaaaaaaaacgctaagacaccccaacgctgacgctcaggcgcgtcaggcgtttgtcgaccgcatcggccactacgaacaggcgatgaaaccgattgtttatctggatgaaagcggtttttcgcagtcgatgcctcgcacacacggttattcggcgaaagggttacgctgcttcggcacacacgattggcaggccaaagaccgcattaatgtcattggcgcgatcctcaaaaagaccttcgtgaccttaagtttattttcgggaaacattaatgcggatgtctttcatgcctggatgacacaagatttgctccccagcggagccgtgattgtgatggataatgcccccttccataaacggcatgacacactaaaagcgatagcagaccacggttgcctgttggaatggttacctccttacagtccggatttgaaccctatcgaaccgaaatgggctgaagtcaaagcgataagaagacgagaaaggtgttcaattgatgaactgtttatgacgcatgtgaaatatgtctaattattttgattcagctatagaagggctgattgagaatcgaatcaagatactgataaaaatgcctgaactgataaaaatgcctgaactcaacaaccaccgactaaagtcggtgggttagtgattaacggactgaaagtccggatacgcatcgactgaacgatgcgtcaattatccagcctgaagtgatcattcgggttcggttcaaaatgatgcgccagataggcctttatcatctcttccgttaactgacctaccgtcgcacaaaaatagcctctgccccaaaaatgctgaccccagtaacgctttttcaagtgagcaaactcttcaaacaacttacttgctgtccttccctttattcgcctcatgatttctgagggcgctaagctcggaggacaactcaccagtatatgtacatggtctttgctcacgaccccttctactatcctgatttcgaacgcttcacaggtctgacgaactaactctctcacccgtaaaccaacttcacctgttagcactttgtgcctgtattttgttacccacacaaaatgatactcaatctgaaataccgtgtggctgccatatctgtaatccatattgcacctctcgtgtaacacagtatcgcagctaaagctgaccgactaaagtcggtggttttaaccttttatatggaaaaataaattagccactgtaaacagcggctaatcagtcagtaatgcgggtaatagtaagatattcagaaaggtaacaactggtaaaaattaagcaaccaaataacaattaccgcaaaaattgcagcgataatatcatccagcatgataccaacaccgcctttaacatagcggtcaaaccagcggattggccaaggtttccacatatcaaaaatacggaataccacaaaagcgactaaaacccattgccagttgaggacagggatcgccattaaggtaatccacattccgataaactcatcccaaaccacacagcccgggtcatctactttcatggcatcggctgctttctgacaaatcacacaaccgattattgtgcccaacagaatagccagccagatcccccattgcggtaactgtaccaacagtaaccagaatggaatagccgccactgagcccattgtgcccggcattatcggcgataatccgctaccgaatccggtagccagcaaatgccacggattgctcatcttcaggtggcgttttgcgtcatccatgcgttccctccgtctggtcatcctctgcatgttctgatggatagtgagcttcctgcggctttttgtccgttctgaaatggtcaaaccctttcagatccagctcaacttcttcgttattgttaaagtagcggatgccttctgattctggccggatttgcccgatacaacaaaaactcgcgcctgtatgtgccaatgccatatttaatgcaccacgattcagttccggtacagtaaaacacaattcataatcttcgcccccactcaaagcccagtttaaggcctgttctggcgttgcatatttctgcactgcttcagaataaggcagagcatcaagattaatacgtgcgccacactggctggcggtcaggatatgattcaaatcagaaatcagcccatcagacagatcaatcgctgatgaggccaaatcgcgcagtgcctgcccttgcaagactcgtggttgcggacgaagatggcgtttaaccaaccaattatggatcgatacttcttcgattttcagacgatcctgcaacaaagccagtcctgccgcactatcacccaaagttccggtgacataaatccagtcaccgtttttagcaccagtacggcgcaatgctctaccagcaggaaccagaccatgtacagtcagagtcaggctcatcgggcctttggttgtgtcaccaccaattaactgcattccgtaatagttcagttgttcaaacagactatcactaaaccgctttaaccactcctcatcgacagaaggcaaggttagggccagcgatgcccaagcggggtctgcccctacagcagctaaatcactgatattgacagccagtgctttatacgccaaatcttctggagcaatattaggcagaaaatgaacaccagaaactaatgtatctgttgtcactgccagttcttgtttttctgcaacggtcatcagcgcccaatcatcaccaatccgtagattcacatcacgtcggcggataacatggcgattgaaataacgtgcaatgaggtcaaattcaccacatgccataatagaattccaaaaagtgactgacgataagaacatgaggccgggaaaccggcctcatgtttaaaatcatcgagttataataggggctattggcaggcaatcacttttttttacgtgctaccgggccagctttgtccaataccccgttcacgaatttatggctgtcttcagcaccgaaggttttcgccagttcgataccttcattgatagccactttgtaggggacatcatcacgaaagcttagttcaaacatcgcaacgcgcaagatagccttttccacctgacccaactcttcgagctggcgggaaagataaggagccatcaaggcatccaattttgtcgcattgaccgctaccccggacagcaattcacggaaataggtgacatcaacaccgtttacgtcctgctctgacagaaactgcaattcaacatccgcgatgctgtttttagataattgccatgaataaattgcctgaacagcacactcacgagcacgacgacgagcagcaggtttcacaaaattccccttaattaaaactaaaacttaagccttaatggctttaattacattgatcatttccaatgcggtcaaggcagcttcagcacccttgttgcccgctttagtacccgcgcgttcaattgcctgttcaatattttcggttgtcagaacaccaaatgtaacaggaatattactggacattgccacgctggacaggccagaactacactcgccggcaacatattcaaagtgggccgtaccgccacggataacagtacccaaagcgatcaccgcatcatattttttggactcagccagtgccttaacggtcaacggcaattcataagcccccggaacccatactacggtgatattgtccgaagaaacctgaccaatgcgttccagcgcatccacggccccttccaacaggctgtcattaatgaagttgttaaagcgggcgatcacaatagcgatgcgggcttcaggagttgcaacaacacctttgattacgttcatagccttcctcatatcttattcatatccgcaggggcgcggatcttatcacattctttttctctgcgtcttgatttatgttcaaacttaaatcagagcggttttaaacgaagacggacatcaggcccaatctgttgtacatctatcagcgtgaattcaggcgcatccgataacttttgcagttcagggatggcaaacagcccacgggcactatttcctaatactttgggagcgatatagaggataagctcatccaccagccccagagacagtaatgcaccagccagcgttggaccacattccgcccagacagagtttacctgacgtttaccaagctgcatcatcaacagcactaaatcaacacctgtaccgtgtaccggcagtaatattttttctatattatcaggccattgctgttcatttttatcagcactatttgcactatctgaaccatccaggtcagtgtgtgctaaccaacattgaccggtttgttgaactacctgatgctgcggtgtgattcgatttttactatcgacaatgatacgaactggctgacgtaaagcttcctgcggatagacggcctgtgtttctgcatccagttcattccagcggacggtcagtgacggatcgtctgccagtaccgttgcactggaactcaggatagcactgcattgtgctcgcagtttctgcacatcctgccgggcggctggtgaagtgatccacttactttcacctgatgccagtgcggtacgcccatccagtgatgctcccagcttcagttgcagataaggaaacccggtgcgcatacgcttgaggaaccctttattcagcatttcggtctgttccatcatcacgccatgctcaaccgaaatacctgcctgctgcaatttatataaaccgcgtcccgctacctgtggattcgggtcctgcattgccactacaacgcggctgatacctgctgctatcagggcatcagaacaaggaggggttttaccgtggtggctgcatggctcaagcgtcacataagcggttgcaccttttgctttttcaccggccatacgaagcgcatgaacttcggcatggggctcacccgcacgtaaatgaaaaccttccccgactatctgatcatctttaacgatcacacaacctacattcggattcggggatgtggtaaaacgcccctgatacgccaattccagcgcacgggacatatatgtttcatcaagagtcatatagcagcctctagtcttgtagtctggcgatctcttcgccaaattcccggatatcttcaaaactacggtagacagatgcaaaacggatataagctactttatcgagctttttcagtgcatccatcacaaaatttccaatcattttagaggggatttcacgttctcccgttgctctaacctgagatttaatgtggctaattgctgtttccacatcatcggagctgacagggcgcttttccagtgctttctgcataccacgacgcaatttctcttcgtcgaaaggctcccgaacatcatcacttttaatcactctgggcatgaccagttctgcaatttcaaacgtggtgaatcgttcatgacattcgagacactgacggcggcggcgcacttgtgagccatcccctaccagacgggaatcaataacttttgtatcaacggctgcgcaaaatgggcaatgcatattgtttcctgacagttaaccgaacaggaagacagtttaccctgaagtgataatgaaaaacaccctgtaagtgagcactcacagggtgtttaaattagactgcttatgttattaaaagctatgcaattgcatacagaaacataattaaggaagaatggtcggctggtatgccccttctttctccactttctgtacaatcatatgctcacgcttcatacccagttttaacgccagtgcagaagcaacataaatggaagatgccgtaccaatgctttagagcac

SEQ ID NO: 390 - DNA, 4623 bp, Xenorhabdus sp.; identical to SEQ ID NO: 69
  CDS (3)..(713)

SEQ ID NO: 391 - DNA, 10077 bp, Xenorhabdus sp.
  CDS (1188)..(1619)
attgttgctggataatctcagtgattacattaagccgggaatgtcagttgaagatattcagggaataattgcccatatgcgtagtgactatgaagagcgggttgatgaatatatcatcacaaatgctgagctatctaaggaacgccgtgaattatctaaaaagctcaaagcaatggatggcggagtaaaataaggtattatgttaaccacgccatcaggcgtggttactttatcagttccagttaggctttaattctgggtcaaccagagcataaatctgagagtaagtccctttatcctcagacatttgatttaattgctgagcgacatctttgcggcttaccataccgtgaacttctccctgataacgctgacaatgacctgtgccagcctgatcagttaatcctcccggacgaataatagtgaaatctaatctactggtttgcagatagctttcagccagcgatttaagccgggcagactggccgaataatgatttggctcgtggtgataaagtatgccagctatctccacatccgatggatgtaaccaaaagcattcgtgagatctgagccttttccagtgcatctataatggccatattaccaaagtggtctgaattaccgcccccaatagttgaaaaaacaatcgggttttctccggcatactcaatcactttttctatgcttctgctgtcacaagcatcaccctgtattacgtttacgcctactgagctcattattgctgcctgctcttcattacggatcaatgcagtaacaggacgattttgttctagtgcgatattaaccagatggcgtccgatacctttaccggcaccaaaaattaaccagggcctcatagacgtgttttcactcataataattcaccgctttaaatgataattatctgagtttattggaatcaaggagcaaaggaaatgaaacagactggcttttgtgaaatgtttgtggagtgagagagaaaaatggctcctgagagtaggagccatttgatttatggctttagccagtttaagtcgcgttagcgtcttaaacataaaaccacccgctttgcgggtggagttcaaaggttataccaagaaaaacacctttccgttacgatatagatgtacaagctaatattcgtaactcaaataaggaaaggtgtttatgggcattaaagcacaaagctcagcgcatacaaagtggctgtgtaaataccatatcgtcttttcgtcgaaatatagacggaaagtgatttttaataatattcgttcaagtgtgggagagatcctcagagacctttgtaagtataaaggtgtggaaataatcgaaggtcatctcatgccagctcatgttcatatgttggtgagtattccaccaaagctaagcgtttcaagctttatgggatatttgaagggtaaaagttcgttgatgatctttgatagacacgccaatttaaaatataaatttggcaacagaaagttttgggcggaagggttctatgtcagtacggtagggctaaatgaagcgacaattcaaaagtatatcagagagcaagaaaagtcggatttaatctcggataaattgagtagtaaagagcatgtagaccccttcaaggggtaggccaaagcagcaaagacacttagcttgaacgaagagaaagcagcgtcatttaggcgcagtcggtaacaagcccttatagggcaagagcaaaccacccgttatacgggtggttatgatttttataagaaattacaatacgtaattactcaaatatttgtggttttgacataccggatgttgcgacacttgttgcagaatgaccacccgcaccacctttccctttaaatggatgagcagggcgctcccattcactaataatgactggctgtgcagccatatccggtgccggagccttagtcattggggagtaagagtgatgattttttgccacgataacctgagactcagtagcttttgtctctttcgctttaacttcttctgtctgagagcatacttccgttgcgacagtcggctgttcttcatgatgttcctgttcagcgatagagtccacaatgataggttctactacgtgagcaactttttcctcagagtcatattgcactgtgttaggtgcagtttcagcctgatttgaaacctcatggctgacaacagacttggtagtttcttgaacaggctcattagtctgcccagaaaccgactcaacaattgattcaactgtagatgggttcactgattcaggtttcgcatcttcataagtaacagcggtttgttctgtagctttagtttctgcaaaaataggtgctggttcagcagtttttgcagcaacaggtactggcatcatttcaacagcttgttccgatgctgcttcttcaattacagagagttctggctcagaagttgtagccactggtgtgaccgggtaacgaacccagactttaccggatgctaactcaggtgaggctaccgcgattgccagaggtaccggagactgagtcagattgcgctcatcgcgataacgacgacggcgttgcccactgacccgcaaatgacgcggtgaacggcgggaacgacgtggcatgatgttatcttgctgttcgttattttgctgagaaccagacatagcagcgttttgttcagcagtatcctgaacgatagattcatttgccgcggcaggttgagttgttgcttcagtttctgtattgataacagctggaacagaagctcttttctctttttccgcgattacaggtgcagaatcagatgtaactaccggaagtgctgcaatagttgtttcttctttcacactatctgtaatacgaattttttgctcaagctggcgacgctggcgtcgaggcataacaggttgacgttcctcgatttcttcttccggaacttcgggtttaattgcctgctgaaccttactttccaattgttgctggcgtttttcttcctgacggcgacgttggcgttctgcacgctgctcgcggcgctgttgctgctgagcctcacgtgcctcgttatctaccgcagtattatcctgagcgttatttttcgcctgagcattacgacctttacgctgctcatcacgctcgcgattgttacgattttcattctcgttacgctcacgacgttggttttggcggcgtggattacggcgatctgatgaacgacgaccatcattaccagaaggtctcttggctttctcctgagactgcttctcttcttcgccgctgaatacttttttcagggcatttaagaagcggctgaataggccaggtttttctgctttttgatgactatttgctttggttgcgacttttttctcttttgtttttgctgcggcaggagctggagcttcagccggcaaatcaaaagtggaaatagcgggctgttcaggacgtttgcgttcatgctgcacatcttcctgaatatttgccatttctgtttcatgaatctgtggcaactgatagctcagagccgagatttcttcgcctttacgaacacgtaaaacggagaaatgcggtgtctgcatttgatcgtttggtacgataacaatactaacgccaccctgacggtgttcaatcgcactgacagctttacgtttttcattcaacagataggaagcaatctgtacaggaacaatcgcatgaacctgatgagtattttctttcagggcttcttcttctatcaggcgaagaatggacagagaaagtgactcattatcacgaatggttcctgtgccgctacaacgagggcaaacatggtggctggattcacccagagatgggcttaaacgctggcgtgacatctccagtaagccaaaacgggaaatgcggccaatctgaatacgggcgcgatcctgacgtactgcatcacgcaggcggttttcaacctcgcgctgatgacgtactggtgtcatatcgataaagtcgataacaatcagaccaccaaggtcacgcaggcgcaattgacgggcaatctcatctgcggcttccagattggtattaaaggcagtttcttcaatatcgccgccacgggttgcacgggatgagttgatatcaattgcagtcagggcttcagtagtatcaatgacaacagagccaccggaaggcaatcttacttcgcgctggaaagcagattcaatctgcgattcgatctggtagtggctgaacagcgggacttcaccattatacagtttaattttgctggcaaaatcggggcgaccgagggcagtgatgtgctggcgtgccaaatcaagaattttcggattatcgatgagaatctcaccaatgtcgggacgcaggtaatcacgaaaagcgcgtacaataacgttactttcctgatgaatcaaaaaaggagccggatggctgttggccgcttttttgatggcttcccagtgtttcagacgaaaattcagatcaccctgaagggcttctgcggatttgccgacaccagcggtacgaacgataagccccataccttcgggtacatcaagggaagagagagcttcttttaattcgatacgatcatcaccttcgatacggcgtgaaataccgccagctcgcggattattcggcatcagaaccagataactacctgccagactgataaaggtcgttaaagcagcacctttattgcctcgttcttctttatctacctgaacgatgacttcctgaccttctttaaggatatccttaatgttaggacggccatgggcatggtaattatttgggaaatattcacgggcaatttcttttataggcaggaagccatgtcgctctgcaccataatcaacaaatgcggcttcaaggctgggttcaatccgtgtaattttacctttatagatattggcttttttttgctcgtgtccaggactctcaatatccagatcataaagacgttgcccgtcaacaagggcaacacgcaactcttcctgctgggttgcgttgattaacattcttttcattctaacttactcattattttttacattagtatagagccatgagtaaaaagaggagcatttactggaaaccgatggcctcgtgtcttttacaaaaccgtcagcctcacggctatcggttgtatagaggcgcctaaatgtcggcgagcctgaatttcatttctttcattgtaagaaacgcagcgctctttgttgggagatactgtaataaattagtacaggttttacccaatccagtaagtagcaactcacagcccataaattgtttgattaaacattacgtcttacgccattgctgcgtttttgttcaaacaaacagataacaaacaatttcaatctgccattcatagtttagtaaatcgtggccggaaagcattattccattgctattggggtgatagcaaggtgactttatctctttaagagttttttatcatgaaatagtgataagttgttaatctttagcctttattctaaggcaatttaataataaagaataaaaatgtggatattatttatacatgatttaaaaatgagtagcactctgtttgcgggataattaaaattgcgcccatgaaaacaaataatcaagttgtacagtttgtcactattgatgacgatgaggccggccagagaattgataattttttgctggctcgattaaaaggtgtacctaaaagcatgatctaccggatcttgcgtaaaggtgaagttagagtcaataaaggaagaatcaagcctgaatataaattgacagcaaacgatgttgtcagaattccgcctgtcagagtggcggaaaaacaggaggctcctgtttctgccaagttggataaagttgccgcgttggcagaatgtattctttatgaagatgattatatattggtcataaataagccttcaggaactgccgtgcatggtgggagcgggttaagtttcggtgttattgaaggattacgggcattacgtcccgaagctcgctttcttgagctggtacaccgtcttgaccgagatacttccggggttttgctggttgcgaaaaaacgttctgctttacgttcactgcatgaacaattacgcctgaagcaaatgcagaaagattatctggctttggtgcgtgggcagtggcagtctcactgcaaagtcgtacaggcacctttattaaagaatctcctgcaaagcggtgaaagagtcgttaaggtcagcagcgaaggtaaaccttctgaaacgcgttttaaggtggaagaacgttatgaatttgccacattagtgcgggccagcccagtaaccgggcgtacccaccaaatccgtgtacatactctgtatgcggggcatccgatagcatttgatgatcgctatggtgacaaagcgtttgacgggcagcttgcagaaacagggatcaaccggctgtttctgcatgccagttcactgaagtttacgcatccatcaaccggtgaaacgatgcgtttcgaagcaccaatggatgcggcattacgacaatgtttaaaaaaattgcgacaaatgtaatgcaataatcatttgtttaataacgtgccgtcagggggtttactccctgacgggtaagcatttcagtcagggtgattaatggcaggccaactaacgtattggggtctttgccatctagtttttcaaataatgtgatccctaagccttcacttttaaaactgccggcacaattaaacggttgttctttttccaagtagctgatgatttcagtatcagtaagttccctaaaatggacatgaaatagttcacagcgagtatcagtacttctggttttgctattgaataatgtaataccggtataaaaagtgacacactgaccactggctttttttaactgtgcgaaagcgttctcaaaattgtgcggctttcctgttaattctccatttaaaatacaaacctgatctgaacctataataagatggctggaataatcttgttgtaatgctgtagccttttcttgtgaaagccgcatcactaattgttcaggattttcattctcctgtgggctttcatcaatatttggtgctgcacaggtaaaaggcaggccaattttttccagtaataagcggcgatatatcgaagttgatgataaaacaatcggaagcatcatttttccataaaatacgtagagaaatatttgcaggcattttaaactatgcaccgcttattaagcgaatatttggtggaaaggtgcatatgtgtggcctttttttttgactatatcccgttacaaagataatatgcgcgccttatgcagaaggtaaaattacccctgaccattgatgcacttcgtgcagcccagaaaagactagactacactggcagttattctgctgaacaggtatctcgtcttctagaatcggtggtcagtgtggatagtgatgtagataactcattatcatttcagattgataatcagcgtctggcagttgtaaaagggcattcagatgtggatgttacgcttgcctgtcagcgttgtggtggtaaattcagtcatcatgttcacacaacgtattgttttagcccggtcgtcaatgatgagcgggccgaagcattaccggaagagtatgagccaattgaggttaatgaatttggcgaaatagatttactggcaatgatagaagatgaaataattctttctctgccggtagttccggtacatgattctgaacactgtgaagtgtccgacgcggatatggtgtttggtgtactgcctcctgaagcagaaaaaccaaacccatttgccgtattagccagtttaaagaaaagtacttaaggagtaaggtcgatggccgtacaacagaataaaccaactcgttctaaacgtggtatgcgtcgctctcatgacgcactgactgcaacaaaagtctctgtagacaaaacttctggtgaaactcacctgcgtcaccatgtgactgctgatggctactaccgtggccgcaaggtaatcaacaagtaattcagctagttattagcaagttgatatcttggctaatctaaccttagcgttagatgctatgggcggggattttggtcctcgcgtcacggtgcctgctgcattgcaggcactggcatctaatccgcgattaaaactactgttggtcggtgaccccgaagccatttctcctttgcttgcaaacaaaaatgccgagctgctcagccgtttgcaaattattcctgcggaatatgttgttgccaatgatgttaaaccgtctcaggcaattcgttccagtcacggtacttcgatgcgtattgcactaaatctggtgaaatcaggtgaagcgcaggcgtgtgtcagtgcaggaaatacaggagtattgatggggctggctaaactgatgttgaaatcgatagaaggaattgaacggccagccttggtgacggtcataccaaatctgaaacaacaaaaaacagtagtattagatttgggcgctaatattaattgtaatagtcgtatgttagtgcaatttgccattatgggcgctgtaatggcagaagatgttgcgggtgtaaaaaatccacgtgtagcattacttaatatcggggaagaggaatccaaagggctggataatatccgcgaagccgccataaccttgcggaatagtgagttaatcaactatataggctatgtggaaggaaatgagctgttaacggggaaaacagatgtcctcgtgtgtgacggcttcgcaggtaatgttacgctgaaaacaatggaaggcgcgatcagagtgattctgtctctgcttaagtcaccggaagggcaaaagaaaaaatcgtcatggttgatgaaaatatttaggaagtttttgcttaaactaatagcaaaacgcttcggtcatctaaaccctgatcagcataacggcgcaacactattaggattgcgtggtattgtcataaaaagtcatggtgccgcgaatgaaaatgctttcaaagctgcaattgagcaagctgttcaggcagtagaaaagcaggttcctgaaaagattgcagcccgactgaatgcagtattacccaagagtgaataagcataaatgtatacaaagatcttaggcacaggcagttacttgccgtctcaggtgcgtactaacgcagatttagaaaaaatggtggatacgactgatgagtggattgtcactcgcactggtatccgtgaacgtcgtatcgccgatgaaggtgaaacggtggcaaccatgggattcagggctgctgaacaagccatagaaatggcaggcatcgataaaacgcaaattgatttaatagttgttgcaacaacaacgggaacgcatgcttttcccagcagtgcctgccagatccaaaaactgctaggcattaacggtattccggcttttgatgttgcggcggcttgtgccgggtttacatatgcattgagtgtagttgatcagtttataaaaacgggtgcagccaaatgtgcactgattattggttctgatacgctttccaaaactgttaatccagaagatcgtggtaccgttatcctttttggtgatgcggcaggagcaatggtggtaggtgcttcggaagaacccggtattctgtcgacccatctgcatgctgacggtcaatatggcgaattattatcagtacctcatcatgatcgccaaaaaatggatacaccagcataccttacgatggttggcaatgaagtatttaaggttgctgtgcgagaattagcgaatattgttgatgagacactggaagctaatggtttggctcattcccagcttgattggctggtaccccatcaggcgaacttacgtattatttcagcgacagctagaaaactgaatatgacgatggataaagttgttgtgacactggatcgtcatggtaatacctcagctgcatctgtcccgactgcatttgacgaagcgatccgtgatggaagaattcagcgtggccaacttgttttacttgaagcatttggcggtggctttacctggggctcagcgctagtacgtttttaacttaacaggaagataaacatgtctgattttgcaatggtatttcccggccagggttctttagagcacatggtacgagcat

SEQ ID NO: 392 - DNA, 13890 bp, Xenorhabdus sp.
  CDS (10160)..(10558)
gtttattcatcgggatgcgatataaatagatatcatttactcttataatcagggattaggaaaaataaagaaccgcggaagaacagacaaataaaaaaaagaaaactcaaggtgaaatcaactttataatggatttcgcaaaaaaccaattaatactcaattaatactaattatagatgacagcatagaaaatgaaataataagtgccataacaagtatattagacgaagaaaactataattttattaactactgtagaatgtttataaacacctatataggtcaggaaaacttcttttggatattaattgcaatatgcaataaaaatgaatgtttcgaaaaaaattaaaaaatagtaaatttacctatataccatctcatattgatgtcaataatagtgccggggattgtgatagtagtgactctggttatggggattgtggaagtggtgacggtggaggatgcaattgagggaataaattccctcaattgtactcagccatttttagtcaaaaatcagtcaaatatcttgtctggcagaacaaaattacgcagtttcagcagcaccagcgggccttcgccagcctccgttcgcagtgtatagtttagtacctgtccattcggcgtcctccagctcatctgatagctactgcttgaacctgaccacggtgtaacttttgctttttccagcaaccggataaaaccccatgttcccggttgctccgcataaatgcgcattctcgatcttgtacccgaccagcttaagatcgctccttgcgcagtggtatctgccggccagataaatttcttccagtccgggcgctgattcatataaatcaatttctggttgtctatcaccagattggtctgcattactccaccggccgttcccggtcgtacttcaaacgccagccgcgcttcgccactggtaaatacgatatctgatagagaattcagtgtattcagggcagacagaaattccgggttaaatttcaatccctgggcattaatactatcaggcacccagtgattaccttcacggcgtaaaactccacttaaccggctttccagaaaacggctaatccgtccactatccgcacgtaaatattgcgccagcaacggcagggaaacttcacttcctcccaatttgaacggataacgcccgccaaaagccagattccagtcatccactattgcccgtttccattgcgcattcaggctttcagcagttggcgccaacaattgctgccacgactgttccattggcagcacaaatacggtctgaccaaatccgctccattcctggcccaaactggctgctactaagttgccataatcacgggtatcagataaatcgaccgctttaccctgaaatatcgtctgtgccatagtctgagccatcgcctgcggatctgctgaacttgtcacctgttgcagtttcaaccgcacgcgggttactcgtgtcagaaaactgtacagactaagatgttgcccatcctgtgctccggctttgggttcaatcagttccagcaatgggccgaaagtcggttccagagggccggtaaaaccaaccttttggctgattgctggctgtttatccttattaaaaattgacttagcagattgagcaaatgaatctgacacttcctgacgccccgttttaccctgatacgccaaggtattcatcaaaccaatcaacggtgactgacgaacatctgccatcaaagtcaattgatcaatcgtatcggataacgtatccgaacgtctccagtgcagaccattcaggaaattcagccaagcgcctgagaaatcagcaaagtaacgatctgtcagttttaccctgagcacttccggagaaagctcatcactggcattttgctgaccgtcactcaacacccagtcaatttctgtccgtcgttcattcaccaaccgttcgatcgcaggctcaactgactcctcccatgccttgcgggtaaacatacccggtacaaagctatctgccgcgaaaagaagctcagaatctgtatcgcctgtcatatcagagagagacatgtccgcataatgggtagaaacctgttgcagcaatttctgatatagcgaggattcgccattacggtgaccaatctctcgtaccaatgccgttcgtgattgtcgaactaactcttcatcaggtttcatcgtccaatctggattgttggacaagttcttcgcatagaaagagagtaattctggcaccttagcctgccaggctgcggccggcatacccgctggcactgcccagttctccatcacagtttcacggaacatgccttcatcaatattttccggttgccccatcatcagataagccttgagagggccataagcttcctttgcagcaactgagcgggcggcgctgtttggtggcagactcaccagcatattcagatttttctccatctgctcagcgactgaatttcgcagccaaggcataacatattgcgtataaaccggccagagtgcctgtaacaccgtatcattctggctcaatcccaaacgggcataagacggagtaccgtgcatttcgcgatattgcagcatcgataacatatcctgtaattccagccacgcctgaatacgctcagctaacggagcctgatcatttttcgccaattcaagctgctccgctccttgctgcactaaatggcggttactggcataggaaaccaacatgccagctccagccatcaccatcaggacagacagtaatcggtttcccgctttccgccattgccagcccagttttgttgctctcagcttcggcggtaactgctgaaacgagcttaataaagagtcccaacggctatctctaccccagtggtgtatatccacacgtttacctgcaataaatgacaagctaaacactattcctgccagcggtaattgttggtgtgaattgaaaaacactgccaatgaagcactaattttttcactgccttcctgacgcaaaaaattcgccaaagttagtaaaaaatcatgacgggaattatggataagctgttgagtcccctgctccgttatcatcgggacaagctgattcagactggtatgcagactttcctgtgtacaggaggaagacaggaaacaacccggagctgaaacttgttcatgagcgttatcccagctagtttgatgcagagaccagacataaactggcacacgccaacctaatgactgatagcgctgggttaaatgacggctcaatgtctcagatgcatggccagaaacgagacgcgaatgaactgatgcttcaagcgaggcctgatgttggtattgatctgtaacccaaatgaacgcatccagtggtcgggtacggcgcaactgacgcagagactgatcgatagtatcatcaacattggcggtaatattaccgccccaaattaacaaagtaccgtcagattccagccattgttctgccaccaaaccgggaataagttgttcaacatgctcaggagaaccaataatcatcaggatttgggttttctttttccatgaagagccatagcggagttttaatgtttgttttaaatccagatatagttctggtgatccttttgtttttttctctttttttacttttgacttaccggataatagggtaaaactcacctcagcatgtttactccaccccaataaaaaaaagggaaaaagcaggaataaagcaccgaaaacggaaccagcataaatcaataatttctttattggcagctctggattaatactgaaataatatataaccactccaataaatataaccagtaatattgctaaggtgtaagccgccgcgagaaaaataactgattttcctgatttagattcagactcaggcataataatcattcactccgatatgcattattgttaaaattaaaaacattcatctgacttgatagattccaagatgcagagtaataattatttaaccaccataaaccagggcttatttaaatcctgagatattgcactcattattaattgtggtttttgatttttttgcactgactccaaggcgatggctattgctaaccaaagtgaagcagcacctgcatagccaattttcccatcaatatcaatttgattttcaggctgtgttaaatggggatattcttcacccaatggcgcagcagctatccgcgctttgttgtcacatcccattcctgatatccaaagatattgaatatcttcaccacaactttttccccataataacgcctgagacaatgcataattaatttcattttgacctaaattttcaggacggcataatcgagtgctatcaatttcacttattactttagaagaggatgaagttactagcagagcaaccgcagcatcaccatgcccatcatcatcactcttagataaatgaacagaaatgatcaataaaggctcgtgagaagaataagaatcaatccattgatccagagtttcgacaccttgcccatgaagataactgactggaagtgtaatctgactatttttacaaactttttcccatactttttgatattgagaagatgataaatttgcatccagttccagacaaacctgaatattagttttcttgagaagatctcctagggcaaaagaaagttcattatcagccagtaatatgcatatcttttcatataacaaatcttctgtttgttctacttttgaccaaaatgattttctacgaataattttcccggtggatgcatctacgatttttggcatttctataatggagcgtgccaattgttcagacaatgtaccctgcataaatgcatctggaatatgaataacagagttaagatgataaagatgcttctgaccacgttttatttcgtgttcaataagtttttctcgttttctatcccagttatctgaccaaagctgattgagatcgaaatataatctcctgataagaaaaataagtgaccagatagaaaaaggataaataaatgaaaataaaataaaagcaaaagatttaaccgatttcccttctggccaaaagaatgcagtgataagactggctccaccaataaaaacagaaagtatatacaaccatttttttagctgtggtggtcttttcctgtctgctttatcagggatatttaggagatcaatagccataatcaactcgatgttgcattacccaatgaggaaattaatgtgcagccacatccacatttatgaccatgaaaggcaacagatataccattatctttgaaagtcgggtgaccttctataatttgagttataccatgccctataataggacaggatactttatcaccaaggcgggcaacaccaattcctgaaaatttcattacaccagatccttcctgcaccgttccaccgtgagtggtcttatccccaatcctgattatgcctttcatgttagccccatatgaaaattattccatttctacatcgattatattcttatttatttttttcattagtagcaaaaaaccacgattttatgctttatttgtagaaataatgcattaatacaaagctagaattcacacctataaggttatagaaaaagtaaaggatatcttatcaagaggaaaaataacaacctcacgtcactgaacgatattgattatcttttatgtaccagagggcttatgaacatagctgattttcatatctatgcattttcctcttttattaatccaagcagaaaccgcatatctaccagatccccacataacgacatgtttttttcgattgcttggtttaccaatttcattaataatgcaatctaattttttacctataaaatattctctacacctatatacacaataaagaaaacgttcaccttcagtttcttctactgataaatcagccaaaaaatataattctctaataattgaaaccacaacaatgaccatttctatgacagcactgaaaagataaaatataagtaccaatctatgtcttatcattgaaatcatcaggaagagaatgtatgacataaataatattgaaacgatagtgttcgacattatataactccctttagaaaaggtcttcaccatttttattttcatagataaaaaataaaaatcattaacattaaaataacatacttttataatttaccatcatactttcctttattatttctttaatacatatgtaattctgttaatatttatatatttttctagtaaaaagaatctcatatgaaaaacaggatatgcattaaacaattaaaatattatcaaatgcatacctatatacaattatgtattttgtattttatgtcgcttagttactcgtctttttatacgctttaccgctattatttgctgtttatgatattttaaatgatccttcattttcaaattagctaaaaaatatcgccatacatatggaatattatttttatagctcacattaactggatcatcaactgcaacctcacacttttcctcaacctcttctggccactgaggtattttactggtttgcattgcaatataccgagagaatgattccaacagatagtatggaacaagtagcaatttatagaaccaatcccatttagtatcaacacgaagaatgtactgaaggccataaatatagctttcttttttttccgaaattggatggcataaaaaaatagttttaggcagttcatccagtacatcttcttccatatagcagcgaataaattcccaataacccggaatattaactttactatcgtaaattcccaaactgaatgtctgcaatacagtttcgttatcatccgcaagaatatgtccatcaataccccatcccagccctattccctttccttcataaagcgtaaagaaaatattattccaaggtgctactaaaacagttccattcacttgataaacatataccatttgtgtttttcgattaaatcgaataggataatgggtttttctaaaccactcctttaaaacaacagttgaaaatgcatatacagcaaaaattgataaggcaataaatggaattataaaataaatgtcgtctgattctgataattcatcacctaaaacatgtcttaaaacataagtaatacaaaaagcaattaggaacacaaaaaaaatcacagccatcacaaacgacataaggctagggaatcctttaaatgtataatatctgtccacagtttccagatacgttgaattcattttaatcactgtatcatcattactaatcaatgggttgtcaggatgtggctggccttggtaaagttgatctcttttttcttgttcagtcagcttgcgattaagtaaataaggggtaaataaccccttgtaaattgacataatgtagctcctaactttccattatttagcttaaatctaaaaaggcttctttttcttgtgcctctgttgaccacatatgaggaatacttctcgttcctttaggaatccttctccacatgcatgataataaccatttttctatatcatcttgtcccttcaatgcaatataaattgcagaagcaacaagtattgccgtcaaaacaactatagcgataggaccacctaatgttaaccatccaacagcatataacacaagtaaaccactagagactcctgaagcaccatatgctattactaatttataatcctttttctctctctcaccccaatactcatcagcagcatgataaatatcccaagtagcacttacgaaaccagcccaagcaaaaaatcttgcgccacgttgcaaacgaattgaccatttttctaattttaccttattatccaatcctaacttggccgcaaacctatcatttgaattcttagctaaatagcgatctgtccaatctgctaatgttcctatagctcccaaaacattaccaccaaatttagttaaattttcgacattttttgttgctgcttcccacgatgccaatatagcataactttgaaaaataagtgatgatgcactcccaaaatattgtttatcttttaatctacctaaaaccggttcactttttgtgtaattctgaaatctcttagccttgtcactgtacttcgcttcagtggtatctatttttggtttataatgtccatccaatatatccttcctaaactcttcatatgatctaaataccctgtttaattttttcattctttctgattctggcattaatctcagtttatccgcttcctctctatctatcattaaatagtaataaaccttcccattttggtttatctgtgcattatttaactctaaccctcccatttgtctatataatctttcatataaacggtcacgcccaatcctgttatccatatcaaaaagtattgcacactcttttgctactgctttaataaagttcttatattgccctgtgcaagaaacctccacaactgcctttcctctattaattgaaacaccaatcattaatggcattggatatttattcactcctatttttgccgctttaaatataactccaaatatatttcttatataaacatccactttatccaccaactctaagtattggcttatactatcagtaatagaatcaaatattttattccacggtaagccaccataatttagcccataacttaatgacacatttatactttcaattaacgagtcatcatttttaaatattgcacgaaaaaagaaattatcttttgagacattttcctgctttaatttatcaacaagatagtccataacttcattcttctcggtcataccctctatacaatcatttactgcttgcacgtatagcaaagaacaaacagcattatttgaatcgtaattatataaaaacctttttcttaatacgtcactatccaaccaatttaaatacatagtaagcataggagaaagaaccgattcaaaatatgaagaaagcttctttttatattccattaaaaatgcatcttccttttctctgtctatatatttttaatatttttcattccaataaccctctactctttcatccaaagattttatgttctcctttctttttttctttttagattcccaagagtcatatccttctattttaactccacctgctctagatcccgcagcccaaataattgcatcttcatcttgaatatcttgttcttcacatactactctatactgagaacatacggattgttttaatgatgatagcattgaggataatgctagtcctctagaatatttagggttactatgaaatgtatgtttagctctataattataaagatttgtgatgcttactaatatagccacggggtcagataaaaataaaactgctcctttttcaggataaagctgattagcctcattaattacattatcagcttcttttttaacctttactttgaaatttttcccatattaatttttgaataggtacagtaaaaggcattaatgttatgtgagacacatctgttatcgttgataccaatccttttacaatttttttcgaacttgtactatattcagcaactgtattctgtaaattatttaaagattcaacattttcatgtttactactacttaaccataaatcaacatcaaacggctgcatatttttgattcgctgagcttgatcttcatgtttttttttcattttctctgaccaaggagcatctgaccatgcaaaccaaactacaccgttctcttgcccttcaggcataatatataacgtaataaaagatgctctagccactttactttcatcatccatgcatactgtttttttctcggaacttaaacattgcggagccccaccagctcctggatgtaaataataatgacctttagaagtaaccgtgtagacctcccatagattaaatttttcataataaacatataaaaaaccttctcgtaaaatacgggctgtataagcggtttcaccttgaggttcaacaggcattttgacattactagtcaatatagggaatgtatctgttttatccataatagcaggcctggctaaaaatactggcaaccctttattacgctgacaaaaaccacaaccaatttccgtattcataattaacattcctttttatttttccatataaaaggttaaaaccaccgactttagtcggtcagctttagctgcgatactgtgttgcacgagaggtgcaatatggattacagatatggcagccacacggtatttcagattgagtatcattttgtgtgggtaacaaaatacaggcgcaaagtgctaacaggtgaagttggtttacgggtgagagagttagttcgtcagacctgtgaagcgttcgaaatcaggatagtagaaggggtcgtgagcaaagaccatgtacatatactggtgagttgtcctccgagcttagcgccctcagaaatcatgaggcgaataaagggaaggacagcaagtaagttgtttgaagagtttgctcacttgaaaaagcgttactggggtcagcatttttggggcagaggctatttttgtgcgacggtaggtcagttaacggaagagatgataaaggcctatctggcgcatcattttgaaccgaacccgaatgatcacttcaggctggataattgacgcatcgtttagccgatgcgtatccggactttcagtccgttaatcactaacccaccgactttagtcggtggttgttgagtaataatataaaagtaattaagatgaatctattacctgaaacttttcacggaaagtttcaggtatgtttgtagtgtcagatgctgtcacgttgggcttcattattcttcaatgaatttttcggtgcgacttttgcaatactgaaaccagtaaaaccatagatgagtactaaaaatacagcggtatagcactgaattgcccacggtagtaaatcaagagtactgacgcctaatgttgtcgccatataaataccggcagaagtccagggaaacagtggttcgatgacagtacaaccatcttctattgttcgggacagatttttattatccagccctatctgttgataagcccctttgaacagctctgccggaataagcagagccagtttgccgtcacaagttgtagctgttaccacaatagtcgtagctaaggttgcagcgatgagctgccctgtagtatgaacggtttgtagaagccagttaatgatgatggtcagagcaccagtaagtgttagtgatccggcaaatgcgaatgcacaaaaaataagtaatatagtccccatcatggaagacatgccaccgcgattaagcaggagagggatatcattcacatttccgataagatgactttcttgttcagggaacatggagagattgaaaccatcaattaatgaattgaggccctgcttgattgtaaatccctgaagccctacaccgagcacgatagctagaacagaagcggcaagcatgattggtatcaccggacgctttgttatggctccccatgcaactagtgctgggggcaaaattagcaataggttgaagtgatagagactttcaagagattgagtaattgctgttattttttcaggagttgctgagctgtctgtcaagtttgtatgaccagcgataaagtaaacgatggtagctaaaaggaaacccggaatagtggtgtacagtaaatgttgaatatggctgtaaagatcagtatcggcaacaatagctgcaaaatttgttgaatcagatagcggtgaaattttatcaccgaaatatgctcctgaaaccaccgcacctgcggtagccgctaatgaaacatcgagactggctgctattcccattaaagcaacgcctactgttccggcggagccccatgatgttccggtacaaacagaaataacacttgtaataaaaaatgtagcaataaggatatattctggactgattagctttaatccccaataaaccatataagggatcgttccgctcagcatccaggtaccaattaatccaccaacgcaaatcagtatcataattactggcattgctttgactaatttttccacgatagcattaataatgtcatcccaacgatagccttgccaaaaagccagtaatgcagcaatgactgctgatactagtaataaagactctattcggaggcttaattgaccataaccaataattagcagcaggagcatggctacaatgggcaatataaccagtcccaaactcagttttttcttgttatccattataaatatcccaatttgcggcagggtattacaacaaaaattactctatcaaagagactgattctctgatgatcagttctcctgaaaacatattcatttgtggtggtagttcttttttagcactgagatgtaatgccatattggcggcccgttgagccattttttcaattgggttatgtattgtagttaaaggaggatagagatattgggctgtgacaatattatcaaatccaacaattgatagctgttcaggtaaattaatttttctccgatgtaaaaatctcatcattcctgctgccattacgtcattaaatgttagaacggcagtaaaattggtacgacaatttaaaagcttttccgctgcttgctctcctcctttttcgttaaatggagcactaataatccaatcattatctattgtaatgccagcttgagccattgcgttataatatccttccagtcggagttttcgatcatcaataggcagatcagctgttatataagcaatttttcgatgaccattttcaatcaggtaattggtggcaatctgagaagcacttatattatctaaccaaacacagcggttagcgatagccggaacatagcgatttataatgactaatcctggagtatgggcgacatagcgtaatatatctgcctcactcattctgctgacatacgcgactatggcttcacatccctggttaattaaaaaatctagggctgctttttcgagttccgcttgatgtctgccattacagaccatcagcttagtttcattttggcgggcaaccttttcgacaccacgagctaaaagggaaaaaaatgggtcagcccaattaccagttagtaagcccaacatatttccacacctttttgttaacgccagagcagctaaatttcgacgataatctaatgcacgcattgctttttctacacgttcacgagtacccggctcaacataagttgtattgttaataacccggctgacagttgctacagatactcctgcctgatgtgctacatctttcatagttgccatgtttttccccagtagttctgtaatgtaaatatgaagccgaatcatataccaatttattcatatgatcataaatgcctttgagggatttatatccaactgaataacaggttttaatatagaagagtatgacttatggatttgatatattggggaggaatatataaatcatagtgatctctttcacaaagtgttttcaactccatcattgagttaatcgatagtttttcatagataattttaaaatatcgctctaatgttcttcctgatatttttagttcgttagccatatttttgttattgactcctcggcagaataaaaaaattattaaccattctttttctgtcagaacctcactaggaggagcagggcgagatctcacatttttcataaggttatttaggtcaaataaaagtcaatatacggacttttataagcatttctctccttaaaacgttaagatcacgctattccataaacagtgtgcttaataatgaatatttttaattttatcagaaaaatagatgacccacgttctgacatcaataaaaaacatgaattgatggatgtcatttttttggccttttctgctgtgttatgtggcgcttctggctggaaatcgattcaagaatttggtgagttacaaatagactttagagcac

SEQ ID NO: 393 - DNA, 11844 bp, Xenorhabdus sp.; identical to SEQ ID NO: 71
  CDS (3250)..(3633)

SEQ ID NO: 394 - DNA, 11295 bp, Xenorhabdus sp.; identical to SEQ ID NO: 72
  CDS (9621)..(9920)

SEQ ID NO: 395 - DNA, 11295 bp, Xenorhabdus sp.; identical to SEQ ID NO: 72
  CDS (10142)..(10453)

SEQ ID NO: 396 - DNA, 6354 bp, Xenorhabdus sp.; identical to SEQ ID NO: 75
  CDS (6054)..(6353)

SEQ ID NO: 397 - DNA, 13505 bp, Xenorhabdus sp.
  CDS (10242)..(10679)
tgctctaaagtttttgggcggtcattacgtgtcaattgtccaccagagcagatagaagcattgcaggctgctgcggatgaacttgatcagcgtttgcataacctcaaagaacgcaccagagtgactaacactgagcaactggtttttattgtggcgctgaatatctgtcacgagttggcacaggaaaaaatgaaaacccgtgattacgcctataatatggaacaaaaaattaaaatgcttcagcagacgattgagcaggcactgttagagcaaggtaacaaaagttagggcaaagttacaaaagtccgaaattaaccagctttatatcgtcagtagacttatccttgtttagaaatcaggcagtagtcacgatagatgaacataagcagttgctttctccatttagttccatacaataggctacatgatattacttaagactaaatgggtaggttctgattgtagattcctggctaattagtttaaagtaataaaaaatttctctgaggtgttcgtgagcggggatgtcccctgagccgatatttcatatctgatagaatgtggtgctccgtttcttgtgagcatgcttggctagtccaagaagcctaataggggcgacaccatgttcaccttgaaccaagggttcaagggttaccacctgcagcggcatcttggagaaccctatctatctgttttgtatccttttctgcactactttaataggcaggtactatgcaatcagattcctttttctctcttcggaaaagcatcagacaagacattcgtcaactacgtaaaaacctctcccctgaacaacaattgcgattcgccctacaggccgttgagcgggttatggaacaccctaaaatcctgcaagcaaaaaaaattgccttgtatctttcttttgatggtgaactagatacacgcccgttgattcagcaactctggcagcaaaataaacaggtctatttgccggtattacaccctttcagtcggaatcatttgctgtttcttcgttatcagcctgacactcctctcatccgaaatcaattcaggatagaagaaccaccactggatatccggcaggttttacctgtttctgagctggatattatgtttattccgctcgttgcttttgatcgtagcgggcagcgcttagggatgggcggagggttctacgacaggacgcttgccaaatggcaacagcaaaacttttatccaattgggttagcacataattttcaactggttgactcattacccagcgcaagttgggatattcctttacctgaaataatcactccagaaaaaacatggcgctgggtataaccgctgaaaattatttattcttaaatttcaatgcgtaagggctataataatagcccttatatcatttaagttagtaaagcatacgagaacgaatagtaccaggcaaagcttttagctgttgcaggactaattccgcctgagccggatttttcgtcataatatcgataacaacataacccatatcgccttcagtgcgcagatattgtgcctcaatattgatttcctgatcggtgaaaacctggttaatgctggttaagatgcccggacgattttcgtggatatgcaataaccgattggtatccttcgcatgcagaggcaatgaaacttccgggaagtttactgcggataatgtagaaccattatcagaatatttaaccagtttacctgcaacttcataaccgatgttctgttgtgcttcttgcgtagaaccaccgatatgaggcgtcagcaatacgttgtcaaatttgattagcggtgagacaaaaggttcgctgtttgttgccggctcttcagggaagacatcaatcgcagcaccagaaaggtgcccgatttccagcgcttcagtcagtgcaggaatatcgatcacagtaccacgtgatgcattgatcaaaatcgagcccggtttcatcagttctaattctgccgccccaatcatgtttttggttgaatgagtttcagggacatgcagactgataacatcactcatatttagcaattcagataagtgatgaacctgctgagcattgcccagtggtagtttgtgttccaaatcatagaaataaacattaaggccgatactttcagccaaaacacttagctgtgagccgatatgaccgtagccaataatgcccagttttttaccacgtgcttcgtagcagcccgcagcctgtttattccatatacctttatgagcctttgcattagcttcaggaacccggcgcaacagtagcaatagctgccctaataccatttcagccactgagcgcgtattagagaatggggcgttgaatacgggaataccgcgttttgctgctgcgttcagatcaacctgattagtaccgatgcagaaacatccgactgccaccagcttttcagccgccgcaaaaatttcttcagttaactgagtacgggaacggatcccaacaaatttagcatcacggatagcttctttcagctcttccggctctaatgcccctttatgatattcaatattgctgtaccctgctgcccgcagattgtcgactgtgctttgatgaacaccttccagcagcagaaacttaattttttccttttctaaagataccttaaccatttacccgccctagttgtactaactttcataatgccgatagatttcactaaaataacaaaaaaaacgttaacagcaatataatcgtttgcctgtaaaacagcataagaaacagtaaaaaagttgttacgcaaagtaaagggtttcgttacaaggtaaaatcaggattttgaggaagatttaatcaataatacaatatatatatctgaattttattttttgaataagtcagaaaattttttaagggcagaatattctgcccttcgcaagcggttactctgtaatcgttttcactccgttagaactgccaaccagcacgacattcgcgccacgattagcaaacaggcctaccgttactactcctgcaatcgcattaattttattttctaactcgataggattcagaatggcaagattatgaacatctaaaataacgttaccattatcagtgataacattctgacgataaaccggagttcctccgagttttagcagctcacgggcaacgtaagatcgagccatcgggataacttccacaggtaacgggaatttacccaacacgtcaacctgtttggattcatcaataatacaaatgaatttctttgctaccgcagcaatgatcttctctctggtcagtgccgcaccaccacctttaatcatctgcatttgagcattaatttcgtcagctccgtcaacataaatgtctaaagagtcaacttcattacagtcaaacacagggatgccaagacttttcaatttctcagttgatgcttctgagctggataccgcaccttcgatttgatctttcattgtccccagcgcatcaataaaatgagatgccgttgaaccggtgccaactcccacaactgttcccggtttaacatattccagcgctgcccagcctaccgcttttttcagttcatcctgtgtcatatcaatcactgcctataatcaattacaagaaaaatccagccgccagtataaacaatattttatcttaccctgtgaaaaaatatggcatagtgctacctagaccgaaaaatattttgggcacacaatatcattctagaataaataccattccagaataatcgaagagttaatgacaaatggagagcctgattttcaatgaaacgtcctgattaccgatccttacaggcgttagacgccgtgatccgcgaacgcggcttcgaacgtgcagcccaaaagctttgtattactcaatccgccgtatcccagcgcatcaagcaattagaaaacttatttggtcaaccactcttagtgcgtactgttccgccccgtcctacagagcagggacagaaattgctggcgttattacatcaggtggaattactcgaagcacaatggctcggtgatgagaatggcaatgaaactcccctgctactttctcttgcggtcaatgcagatagtctggctacctggcttttaccggcactccatccggtactttcagatttacccatcaggctcaatattcaggtggaagatgaaacccggacacaggaaagcctgagacgcggggaagttgtcggagccatcagtattcagtcacaaccactgccaagctgtctggtggataaattaggcgctctcgattatctcttcgtcgcttctcctaaatttgccgatcgctttttccctaatggagtgacacgctctgcattattgaaagcaccagcagttgcatttgaccatctggatgatatgcatcaggcctttttacagcagtactttgatttatcgccgggtagtgtgccctgccatatcgttaactcatctgaagcctttgttcaattagcaaaacaaggcacaacatgctgtatgatccctcatttacaaattgacagagaactaaaagcaggtgaattagttgatttaacacccgggctgtaccagcgccgtatgctttactggcaccggtttgccccggaaagcagtgccatgagaaaagtcactgacgccctgttaaaacttgggcgccagatgttacgtcaggaagatgagattaattaacgctgtaattcaaaaactgcatcaacgtgatcagaaaactctatgctttgtggttcataagtttcatctgctgaatcccctgctggtgcagcggccatctgagttgtccttaattgcagtctgttcattggataaggtacagcttcagggggacgataagtgacactatatacagcacctaacttactgttaaagccttttgccagttcagttgcctgttgaatcgcatttgcgatcgctttctgtctggcttcactacgatatagctgaggatcagcaacgctgaattgcacagaattaatttcattcagtcctgctttcaaagctccatccagcaacggattcagttgatccaatttatgtactttgacttcaactgagcgagatgcgctataccctataatggtcgatttaccatttttctgatcatattgatattctggctgtgtccggatgttggccgcattaatatcctttttatcgataccactcgccttcaaaaaatcaaaatacttggcaacacgtgcatcaactttatgcttggcctcggtcgcgcttttctggctcactttgacatgaatcatcagagttgccatatccggggctgctttgattgttgcactaccagaagtagatatatgtgggacagatggtaattccgccgctgaaactgacatactgcctacagccagcataacagcaaatatcagtgagttacgtttcactaaaacctcctttcggatatacccaccctctttcaagccactgttaactcgaaacaaactggatatacagcaaataaataagcattttggtcagactctaataacctgtaacagtctaataggctagaagatcccaatagacagtatgacaagcaattttcagaaacattagcacactatttataaagaattgtttaaattataaagaattgttgcagttaattaaaaatctgtaatccctgcttcaataaattccatgcgatataccacattacgcaccccacaaacagattaatgatgcgttgagaacgcggttgattaaggattggagaaaaccacgcggcgagtatcgccaatgcgaaaaaccaactgatagaggctgtcactgcaccgatggtaaaccacggcctcaactcagctgataatccacctccaatgctacctaatacaataaaagtatccagataaacatgaggattcagccaagtgactgcaaataatgtcacaataatccgccagcggctttgaacaaccacatctttattagaaagtgtaaagtccgcagataatgcgacccgaaaagccccccatccataccataaaaggaatgcaacgcctccccatgtcaccgcctgtaacagaaaagtagattgcccaagtagagcacttccaccaaagatcccagccataatcagaatcatgtcactgatggcacataatgcggcactcatcagatgaaattgccctgctgcatcacaaaaacattttggggtccaagtgggatgatcattgcagcactaagaaaaaagccctgaattaacgtcgaaaacatgcagaaattcctaataattattcaataaaatgaggtctatctgcatattaggcaaacacattcattagtaaaaattaattattcttattcatcattaataaaattaataaagcactgagcaggtaaacagtccgcctgattatttccttccgcatgtgacggacggttgaagtacaccatgctacatatagcccttgataaggggggatagagacatactcttcccctcgcggtttatttttatttgaacatgaacgcagctgccaagctaaaaaacatttttttcactttttattcttatttcaattaccgaaatgttttccttttctaaataaaaataaagagcctcctatgaaaaatatcacaaaagtttcattaattagcctgcttatttcgaatagcgcttttgccgcaaattatgtcctgaccaacgacaatattaagatctcgtttgaagagcctaagtctgtcgttacgattcaggataaaccgttccaccgccagatcacatcacaggaactcttttttctaacactgccaaatcaagatgtgattcataccgctgattttaaaatcaaacatatagaacaacgggataacgcaattaagattgattattcccacaaggattttaacgtcaccgtcgtactgagcatgctgaaaaagaaatatgccagcattaattacactatcactgcggtaggtaaacccagagaaattactaacatcaccttcttcccaactaagcagcaatctccggcaccttatattgatggcgaaatcaacagctcaccaatcattgccaacccatttgtcattctgcccaaaaaaccttttgtgaacaccaatgtccatgaagcaagcagtagcctgaacgtcgagctgaaaatggctatccagcctaaaattccgctcagctatactctcttccttggcacctttccggaaaccaatcaactacgccgcagtgttaaccaactgatcaacacactgcgaccacgtccatataaaccctatctacactacaatagctggatggatataggctttggctccgcctacaccgaacaagatgtattgaaacggatagatgaatggaataaagaattcattaccggacgtggtgtgaagcttgatgcctttctactggatgatggctgggatgacctcactggcagatggctgtttagccctgccttcagccatttcgataccattagaaacaaagcagccagcctgcacagttcaataggtttgtggctttccccatggggtggctatggtgaatcaggcaaaacccgcgtctcgcatgccaaagaatatggttttgaaacagctaatggagggctcgctctctctggcccaaattatttcaaaagctttaacgcccaagttcttaacctcatcaaaaatgaacacattacttccttcaagctggacggtatgggtaatgccaattcgcatattaaaggtagcccgtttgcttccgatttcgatgcctcgattgccctcattaataatatgtgagcggctaacaaggatctgttcatcaacctgacaaccggcaccactgccagcccttcctggctgttctacgccgattctatctggcgtcagggttctgatatcaatttagacggtaaaggttccccagctcagaagtgggtcacttaccgtgatgcacagacttatcgctcgattgtgaaaaagagtccgttattaccacttaattcattgatgtaccacggcatcgtcagcgcgaaaagctcctatgatggactggagaaggtacaaacggatcttgttttaaccgatcacgtctggagctacttcgccaccggctcacagctacaagagctatatatcacaccgtctatgctgaataaggccaaatgggatacgctggcgaaagcggctaagtggtcacggagcaattcagatgtactgatagatagccactggataggcggcgatccccatgcactgaaaatttacggctgggcatcatggaataaacgtaaagcaattctcggtcttcgcaatccgtcagataaagaacaaacatattatctggatatggcaaaagactttgaaatcccgcggggagaaacctcgcatttcagactaatccccgtatacggcaataactccactgtaccggaaaactataccaaagctgtcaccgtgacactaaaaccgctggaaatgcttgtatttgaagccgtacctatgaagtaagcaacacctacttctctgattaaaaatttaaatgccgtttaagcaaactctgacttggtgtgagtgtatctatttctcacaccaagtatttcttacatcaaaagttttggttaattgtttgtgttcttctgcaaagcaatctgctgctgatgaagataaacatccatttgtgggaaaggaataccaatcttatgtttatctaaagctcgcttgaagttttccatcagatcccaataaacactccaggcatcaccattggttgtccatacacgtacaataaaattaagtgatgaaggtgccatctcatgcaaccgaatagttacacctttgtcatgctggatacggttatccgcttgaataacatcacccaatacttttttaacttcatcaatatctgcgtcatatgccactccgaccataatctgagtacggcggtttggttcacggctggtattgattatattatttgtaataatctttccattagggataacaatgatacgatcatctgccgtacgtaatgttgtagagaaaatctgcacttgtacaacagtcccttccactgacccaatgatgacatactcaccaacacgaagcgggcggaaaataaccagcagcacacctgccgcaaaatttgataatgagccctgtaatgccagaccaacagccaaaccggcggcaccaataaccgcaatgacagatgcagtctggatccctaaccttccgagaacggcaatgatagtaaacgcgataatggcataacgaattatggctgataaaaagtcagaaatagtcgtatcaacaccacgtaacgacataacgcgtttcactgccttacatgccagcttggcaatagacagaccgactatcagaattaaaatggcaaatacgatattcattgcatactgggtcagtatttcttgattattgaccagccaatgtgttgctttatctatctcaccggacagattgatctcttccataaaagcctacctttttttgttggaacctatctacatgaacacgaaagcgatggaatagaaattatggcagaaagcggccatggattgaacataaccacttaccctttatttttttgcaaaacaaaatctctataatttgccagcatatcgataaaatcgtctgtaccgcaaaatgccagactttcgttatcgtagtaactcataccctcttccatctcttcagtatcaaactggagttgattggctcttatcatgatttcttcttcattcattaacagtgtgtattcatgaccattcaactgccactggcgtgcactgccttttatttctagcagcgctgcggttattttatctaatatgctcaaatcgtctttcacctcctcattaagccaatgaccaatagcttcatgatccattgaaaaacgcgttgtaacctgaccagtgatatcctgcataaattcatattccatcacatacctccacattttacttatctcaatcacatccggattttaaacattcccgatgctcccacctcagagccagcccacaaactgacacaaaatctgccacaaaaatcaggcacaaaaaagggaggcatgtgcctcccttattcatttatggctttagccagtttaagtcgcgttagcgtcttaaacataaaaccacccgctttgcgggtggagttcaaaggttataccaagaaaaacacctttccgttacgatatagatgtacaagctaatattcgtaactcaaataaggaaaggtgtttatgggcattaaagcacaaagctcagcgcatacaaagtggctgtgtaaataccatatcgtcttttcgtcgaaatatagacggaaagtgatttttaataatattcgttcaagtgtgggagagatcctcagagacctttgtaagtataaaggtgtggaaataatcgaaggtcatctcatgccagatcatgttcatatgttggtgagtattccaccaaagctaagcgtttcaagctttatgggatatttgaagggtaaaagttcgttgatgatctttgatagacacgccaatttaaaatataaatttggcaacagaaagttttgggcggaagggttctatgtcagtacggtagggctaaatgaagcgacaattcaaaagtatatcagagagcaagaaaagtcggatttaatctcggataaattgagtagtaaagagcatgtagaccccttcaaggggtaggccaaagcagcaaagacacttagcttgaacgaagagaaagcagcgtcatttaggcgcagtcggtaacaagcccttatagggcaagagcaaaccacccgttatacgggtggttatgatttatactacgaatgtccctttttgcactgctaccgctcatatactattatagcgccccttataacctgaggttttcacgcctttttatttaagaatcagaaagtaagatgatgtattggattaacggcaaaccgcaagatcaaatctcggttaatgatcgctcggtacaatatggcgatggctgctttaccacaatcagagtagagcagggtcaggcagcttttttgccttttcatatgaaacgattacaaaaaggcgttgaaagactgtttatgccagtaccggactgggtaaaactggaaagccacattcaacaagtggtaacaggatatgaatctggcgttttgaaagtgctcttatccagaggttcgggcggacgcggttacagcagtgatggtattaacgggccaaaccagatccttttattaagcccctatccagagcaatattataagcaacggaaaacgggtgttgtattagggcttagtcctgttgctatggggattaaccctcatttggcgggcattaaacatttgaaccgtttggaacaagttctgataaaacggtttattgatcaggaaaagatcgatgaagcgctagtacttgatagtgatggtttattagttgaatgttgtagcgctaatatcttctggcggagaggtaaaaatatctatacgccggatttgagccagtgtggtgtggaaggaattatgcgacagaaaattatccagctattggaaggtagcgattaccatttgtcgtgtgtcatgcgttatcctgaagcattagcgcacgctgatgaggtaattatttgtaattcactgatgcctgttatggcagttaaccagatccaggcacataaaaatcagcctgcatggaaataccaatccagagagttatatgaatatttattatctgaatgtttaagcctgtaattctgtgggttattaaactgtagtgattcagccagccgttgaaaggcagataaaagtggtaaccgaatgaaacttaaaaagcgcattcttattctacctgtattgattattcttgttgcagcaatagcatttttcttttttatcaaaaaagtagaaaacttttctgctcagaaggttaatctggctcaggatctcatatttaccttaccggtcggaatggggcgtattggcttagaaacgctgttgattcagcataatttaatcaaagataacggtttattaccgtggcttttccggttagagccggagctaatcaaatttaaggcaggaacttaccgactacagaaaaatatgtcagtaagagaaattctgcaattgtttgccagtggtaaagaggtccagtttactattcgctttgttgaaggcagtcgtctttctgactggtcaaaaatattacagaatgcgccatacttaaaacatgcggctgaagataagacgccacaagaactggcagaatcgctgggtatgaaaatagagagtccattggaaggatggttctatcctgatacttatctctataccgcaggtacaagtgatatagacttactcaagcgggcccaccaaaaaatggttatggctgttgatcaggaatggaaaaaccgggctgaaaatttaccgtataagagtccttatgagatgctaattatggcctctattatcgaaaaggaaactgccgtagatgctgaacgcgctaaagtggcttctgtatttatcaatcgcctgcgtttaaaaatgcggttgcagaccgatccgacagtgatatacgggttaggggataaatacaccggaactattttccgcagcagcctgagcacttttacgccatacaatacatatatgattgaagggctaccaccgacaccgattgccatgccgggtcttgcatcaattaaagctgcggctcatccggcggtaacaaactatttatattttgtcgcagatggtaatggcggccatacttttaccacaaatttaatagagcataatagagcggtaaacctttatcgccagagattgaagcaggataaatgaacagcaaatttattgttattgaagggcttgaaggagcaggaaaaaccacggctatccagacagtgtctgatacactgaaacaatccgggatttctgatcttgtttttacccgtgagccgggtggaacaccattagcggaaaaattacgccagatgatcaagcaagggatcgaaggtgaaatattgacggataaagcagaagttctgatgctttatgctgcccgggttcagttggtggagaatgtcatcaagcctgcactggcaaaaggttgctgggttgttggggatcgccatgatatgtcatctcaggcatatcagggaggcggacgtaacattgaccaacatttattggcttcactacgtgaagcagcgctcggtgatttttcacccgatctgactatttatcttgatttaccgccagaggttggcctacaacgtgcccgcgaacgcggtgaactggatcgtattgaaaaagaatcattagattttttccatcgtacccgcacaagatatcttgaattggtcgcacaggataaatccattataaaaatagatgcaacgcagccattggaaaaagtacaggatgacattcgtcaggctctgcaatattggctggaaaaacaggaaatacatgcatgaattggtatccgtggcttaaccatgcatatcgtcagctgattgaa

SEQ ID NO: 398 - DNA, 6032 bp, Xenorhabdus sp.
  CDS (1369)..(2388)
ctcggaccatgtgctctaaacatgtcctttgcggttcctctcagcgtttttccatcaatcgcgatgagacttttgcccgccgtaacccggcgctggttgatccagccataaaaggcttcgaccaatgcgtcttgatctatcattttgataatattagccacacagtgacgacgaggaatgccgtgagtaaatgaggtatattgtttaagccactctatttgtaactcaccaaattcttgaatcgatttccagccagaagcgccacataacacagcagaaaaggccaaaaaaatgacatccatcaattcatgttttttattgatgtcagaacgtgggtcatctatttttctgataaaattaaaaatattcattattaagcacactgtttatggaatagcgtgatcttaacgttttaaggagagaaatgcttataaaagtccgtatattgacttttatttgacctaaataaccttatgaaaaatgtgagatctcgccctgtattcctgcccgtctactcgccttggttgaacaaaatagaatacttatggcacacgttacatgaaacagtcacacgtaaccattgttgtcggtatatgtggcaactgctcagtaatgtgaaaaaattcttgaaaaaatctgcaaagagactctttcagagaaagtaaatcgagtgtctcactattatgaaaagttatttagtaacattgacttcatgatataggtgctataattaaaagcacataaagtggttatcataatattctctgagctttgtggaaaaaccgcattcataatcagactgtaaattttcccctctctatattattaaataatatttataaaaaaccgaattaatttaaattgcataataatttaaatacaaaagatagaggtaacatcatgaaatacacaaatccactcatgattattgtttttttaataacttggtcaattagttcagcttatgctggatgtcctgatggcaagaatggaacctatactggatatgttggtaaaattatttataacgctaattatgaatacccaaaatttaccttaagtaattatccagattctattatgaatctatcagaaaaagtaggaattaatacacctagaggaaaaaatatttctgacctcattatattagcaaaatttaattttaataaaattaccgtaacatgcacagatctagacgtatccactctaactttagaggaatgagatgaacgctccccactcattaaatctggagcacaatgatgaatgaagggaaagtacataaaggtgtggagcctcgcagatttccggcatcatagtgcccaatacgggatgcataaagctccctcagactggagactccacaacatgaaatgtacaccggttggcgttgatattgcaaaacatctgatccaagtccacttcattaatgagcacacaggtgaagtggttgataagcagttgcgtagtcaagattttatgacgtttttcagtaaccgtgagccttgccttattggtatggaagcctgtggcggttctcagcactgggctcgcgaactggaaaagcaagggcacaaagtcaggttgatgcagggtcgcttcgtcaaagcgttcgtcatgggcaacaaaaatgacgtgatggatgcccgtgctatttggatggcggtacaacaacccggcaaagaaatcgccgtcaaaacggaagaacagcaatcagtactggtcctgcatcgttcgcgtagacagctggtgaaattccggaccgcacagattaatgccctacacgggacgctactggaatttggtgaaaccatccataaaggccgagcagcgatggacagggagctaccggcagccttggagagaatgaagacaaagctaccgccatatcttatcactgtgctggaagaccagtacaacagattgagtgaattggattcactgatagatggtcttgaaaagcagcttatcagtgtggcaaaacagagtgaaacttgtcagcggctgatggaaattcccggtgtgggacccttaatcgctacagcggcagttgccactatgggggagacatcagcgtttaaatctgggcgtgagtttgctgcctatgttggtctcgtgcccaagcagagcggttcaggagggaaagtccgcctattaggaataagcaaacgcggggacacctatctgcgaaccctgtttatccatggtgctagggctgtagccttactggctaaagaaccgagtccatggataacagaactgaaaaaacgacgtccgaccagtgtggcaatcgtggcgatggcaaataaactggcgcgaacaatatgggcaatagctgctcatgaccgtaaatacgaaaaaaatcatgtcagtatcaggccatattaatcgcggatacggataaatattaactcgttagaaaagggtgaatgctaaaaagttgctatggcagccagagtgatgacaaagacggtaagaccgtgacctgagaaacctgaataattgccagggcataaagcccgccagaggaataaggatcaggtcagcgaatctcatagtggcccgcagcgctggctgcaataaggccggatacagagctgcaactactcgtcaatgttaaaacaacggaagccttgcaaacggggaggcgttcatacagtaattatggggattttcttgagtagttttctcaattactttcttatttgtttgtaaacccctttcttcagccacgagttaacacttttttcaagcttagttagctgctctagatgttttccttcatttttcatcagcttttcaatattgattaatttccaacgaatcacaggcaattcagcagcagaaggctcatcaaacagtgaccactcaggctttcctttcttaaaggaaagtaaaaaatcacgatctttttcagtaaaatgagcttgtagagctgcaagcatttttaaacgagttgtttccaattctactaattcaacaggtttgagtgtcattccttcaaactcgttgtaaaacttctcatctaatttttgccaatttggagacattaactcattaattggtcttggatgactcagtgcgtaagtcaaaaatccgacaaaaatttctctggaaatcccctcttcattaagaagcatccccatatcaaacagatccctcggatgctgtctgtccatcgcagcacagattttccctccatagagatccggcaagctaaccacctgaatttcagcataaccaaattcatcctcaacaaattcggttacgtatctttcttcaggtttatggagagttcccagggcaaccggagaaacttcaactttgacagtagcaacatgattgaacacaacaatacgcagttcatcaggtttattgtcctgaaaaacagccttaacatcaggttgagtattaatatcgtcagtaattcgttgcaaagcagcacgagagttcaacaaggcttcatctcttggctccgatgacaaataagctaagtctatatcaacagacagacgtggaaactctcgcacaaacaggttaatagcagtgccaccctttaatgcaaatactttttctttagctacgataggtaataccctgataaggagttttacctgctgatagaaaactgagtttttatccataactatcttatttagattgaatatatttcagacatcaaaggtagcgggtactgtaattttgtagcgttcatcataacgtccctgagcgactacctgacgtttaccagaacccaattctatctgtgattcttcaagacgcttcacccattgatgaccatagtaatgactaagaaatagaaaaatacggttggtttgtacagcatgactacgtaataacaatgactgaacttttctcggactcaaatttaccagcccctgaaataactcagccgcatgttcaaaacttatatttttccctattgagtcaataagttcataagctgccaactcaggagaactggctttaagttctcttccatttacttgtacaagagtaaaatctgtgtcagataattcacttaatttattgttgctgcaatataaccagcgttggtcaggaaattctttaaaccatttaggaagagattgctttcttcctactcctacccatacttgttccgattttaatggtaaatagtggctaagtccctgataggttaagctagttaaacctgcaagatgaactggaaaatgaagctgttctatcacagcttttagtgcatcgctccactccggcttgtagtcttgtcttgaatttgggcggtagtagactcctgtaaacagtttttttagccaaccattctgagtgtacttttgcgttaaggagtagctgataccattttcaatcaaccacggttggagaattaaggctcctggtacagtatgacttactaaccagtttatttttgaagacattttcacaccctgagtgtaaatattgaacacacactaaactataagtttgcatatatcaatatattcatactcaaggtgtaataattattagcttcttaaactagacagtcattttcgctgctctaatttgctgttttattccatacctttcgacatcacttcccgatacaaaaacttgaaaaaatccgcccaagtaaatcatcagacgtaaattctccggtgatttcagtcaatgcctgttgtgccagccggagttcttccgctaataactccccggaacgagcgaataccaattgttggtgcccttcctgcaagtgttctgcggcggtattcagtgcctgcaaatggcggcgtcgtgcgaggaacccaccttcagtattactgttaaagcccatcgcttctttgagatgatcacgcagcagattaatcccttgatctgcaagagcagaaagacgaattaacgtgtagccattaatttctgatatgccgctggcttcacctgtcatatctgttttattacggataatcgttacaggcagggattctggtagcttagccatgaattccggccagattttttctggttcgatagcatcagtcgtcgtactgtctaccataaacaacacgcgatccgcctgttcgatttcctgccatgcccgctcaataccaatgcgttccacttcatcactggcttcgcgcagaccagcagtatcaatcacatgcaggggcattccatcaatatgaatatgctcgcgtaaaacatcacgagttgtacctgcaatatccgtcacaatcgctgcttcacgccccgccagcgcattcagcaagctggatttacctgcattcgggcggcctgcaatgacaactttcatcccttcacgcaacaggctaccctgacgagcctgagaacgcacctgttcgagctccacgattacttcatccagcttggcttctatcttgccatcagaaagaaaatcaatttcttcatcaggaaaatcaatcgctgcttcaacatagatgcgcaggttagtcagttcttccaccatttggtgaacctgtttggaaaatgttccctgtagggagttcatcgcagagcgcgcggcctgttcagaactggcatcaatcagatcggcaatcgcctcagcctgagccaaatccagtttatcgttcaggaaagcacgttcagaaaattcaccgggattagcgattcgcacaccggaaatagtcagaatacgtttcagcagtaaatcaagaataaccgggccgccgtgcccctgaagctccagtacatcttcaccggtaaaggaattagggccggggaaataaagggcgatgccctgatctaaaactgagctatctacatcacgaaatggcagataatcggcatagcggggtttcgggagtttccctaataccacctcagcaactgccgcagctttgggaccagaaatacgcaggataccaacaccacctcgtcccggaggggtggcctgagcaactatcgtatcggtggtattcatggaattctctcttttaccaatttgccaatgaatggaaatcataaccacccgtataacgggtggtttgctcttg

SEQ ID NO: 399 - DNA, 14620 bp, Xenorhabdus sp.; identical to SEQ ID NO: 215
  CDS (9179)..(9577)

SEQ ID NO: 400 - DNA, 7191 bp, Xenorhabdus sp.
  CDS (2)..(2662)
cgccaagttgtgcgaattaatccgttattttcctaaaggccatagcgccttgcggcagttgctgttttacctggatcgacaacgtattgttacgccgacatatcgcaaacttcaggacatgttctcggatgccttcgccgtagaggaagccaggataaaaccaattcttcaatccattcccgactattggcgtgaacaactgtcctcgctcattgatcataaagatggactcaaccagctcactttactcaaggccgatcagaaagattttcaatataccgccgtgaaattcgaaatcgagaaagcgcaaagcatggaagaactgtatcgatttgccgaagaatttttgccttcgttgaaaatttccaaaaatgccatccgttattatgctgatatcgtggaacaatatgccgcctaccggcttcgacgcctcggaaaataccagcaatggctatacgcattgtgttttatctttcaccgttaccagcaaatcacggataacctgatcgtcacgtttctttaccacgttcgagcgatcatggattccgcaaaggcatttgctgaaacagaacagctcaagcatagcagccaggtcatggtggattttcccaaacttgccaagttcctcaagtggtttccaactcgaagccaaaacatgactcaggaagagttaaacgagatggcttacagcattttacccaaggatcaattctccacgcttgctgattttctggctggaaataccttcgataaaacagcggccaaatggcaatactatgccagtgcgtccaggctaatatcgctgtatttaaggcccattgtgttggcagtaccattttcctattaccgagaagatagccatgtagtagaactcattgaccttatcaagacgcactataccaacggaaaatcacccaacagcttgaagatcgcggatgatctgggtttgactgttcccaagcacctacaaacttatctgaaacgcaaaccggaagatgagaacttagacccgtacctgttcgagtttttcatctaccagaaaatgtatcacctgattaatcgcggtaagttgtgctgcaatgccagtgtttcttactgcgatatcaaccacgatttgattaatgacctactggtggatgatatcgaaaaaatcgcactggaatttgggtattcaaaattgcccgtgtattgcgaatcaaggctggacgatgcgattgaggctctggatcaagcgtgggcatcaacgacagaaaatattcgcctggaacaaaacgcggggtttcaaattaaagaatcggctgatggcaagcatcaatggcgtctcttgtacgatagcagtgaaaagctcgatgatagctttttccgcactttgccaaaggctgagatagccgatgtcgtcatgtttattggtgagctgaccggtatgtggcatggatttacacacctgaaagaccgttacaccaagcggaaaaagccagctcccctggcgttgaatgcctgcattctttctgaggcattcggatttggcaccataaagatgtcagaaatgtctgacatcgattacagcgctctgcgctcaacccgcgaggactttgtgcgtattgagacgctctgcgccgccaacgatcgggtgagcaatttcatcaatggtttgtctatctttaaaatttggaacctgctggacgacaagctgttagccgatgctgatggccagaagtttgcgactaccgacagtaccattcaatcacgctattccaaaaagcacctcggaaaagggcgcggcatttcgctctatacattgattgccaatcatgtcgccgtgaccgcttcgaatttgggcttgaatgaatacgaaggccattgcctctatgacatggtatacggcaacaagaccgacatttatattcattcggtaaccggcgacaaccactcactgaataagctcaactttgtcgcgctggatgccattgatgtcaattatgtccccagcatcaagaacgttcgcgaagcttcagaaagcctttatgaggccaatcccattgctgatatggacgggccgttgcgccctatgggcaccattgatgaaggactcattcgctctcaaagcagaggtatcaagcgcgtcctactttccttggtattgcaggaaaacacacaaaaccacctcatcagaaaattgaattctcacacacggtatgcccggttgagagctgccctgtatgaatacaacagaatattcaaaagcacccatgtgctcaatctgattgatgatatgcatctaagaaaagcaatacggactgccaggaaccgtacggagtcgtaccatcaattacaaagcattatccgtaaaatctacaacaacgtgttcaaaggcaggaaaatcaccgataaccgagtcagcgcccatgctgccaggttagtcgccaactgtattgtggcgtacaacgccatgatcctaaatcgagtgtataaaaagatggtatttgaaggtgtgccggaagaaatactggaaaaatttgcgagaatatcgccgattgcctggcagcacttgttctttactggtcgttacagtttcaagaaggcgagcaaaacatccattgatgttgctgcactggctgagctgttggaacaacacttaaaacaggcattctggaagtcatgaccgcagaatcgtcacttttgggggttcttcggcggaacccgcagacgacttaaatcaaacagcggatcatcgtctttcgccccgcaggcttttgcctgttcaaccagtttcgccaggcggggtttaagctgccggatcatcggtatccgccattcactgtggtttttactcccttcgacccgcagaacaatataattgctgtccagattgatatcccgcaaccgcaggtgcaatagctgattctggcgcatccccgttaaccggaacgtatccagtaccgtcagccaatagccggtcgggtacaacgcacagcggcctccccggggaattacctgcctgcgctcttcttcctcatactgtcccatcagcagatagaggcgggttatctgggatttactcaggattttcttcgtttttttctcttttttcactgctgcatcgttaaacgggttttcagtgaacggcagcagttttctttccatcacgaaattaaaaatcgcccgcaggtgggctaccttattgttccaggtgtagctcgactgttttttctcggtcaacagatggcgtcgccaccgcagtacatcgcggtgagtgacctgttccggcaacactgtatcgcccataaacccgataaaaacccgggtcaccttgcgataactccactccgtagccggtcgcagcatatgcgagaaaaagtattcttccagtaattcatcccaacccattttttcctcattattgaacattattgtttccttcgtgtgtcaagttgtgtcccggtacagccacgtcctgttaataaactgaaaattaattaacacgttgaattattttatttttcatataatgaccttttgtacattgctgaaacaaggcattctgacgctgatacgggacgtttgaacaatttcaaatcgttattgttatcatttgtattatttcccaccaaaagttcactccgctgtctgaaacagtgacagtaatgtccgggtatcatcgcgggtgtcaggtgctgggacggtcatcggtgtgacaagcggagtaaccggatcgggcgatggatgagcggtagccgccctcgcttcagcagattcaaccggcttcagcaatggcgatttcacctgctcagctgctgactgaagcagtaaatccgtcaacggaacagaagaaggagacccatcaagatgcaacatcagacattgccacgcaccgggcactaaagacagccaggtgaccgcttcctccggtaacaaacgggcagccagcagcgttttatgagaaacaggcagctcagacagtgaggcatgaaaccggaagcggaaacggcgagctggcacccacaaccccggcagccaggggtgtccatcatccagttcaccttccagttgccgcaacagcggcaggtggtaaaacaacgcggcccagaataccactgcctgccacaacaagctctgtgcggcctgtgtttccggtgccacgccggatggcagcatgtgtcctttcgccagccgcacagcacaggcagtaaattgcagggtcagatctataaaccctccacgataagaccagacgccttcctgtgtggccgggatatgctgcacacgggcgcataattgccggagcggatccagataaaactgctgatacaacccggcgggcagcgcactgttttcccacagttgccggagagcctgaccacgttctgcgtttgccagcagcgcttccgctgactgtggccggaaatacccccggttgtcgcgaagggtttccgcttgttgtccggatgattttgatggtgtcacagacgcgcggacaaaatgggatttaaaacgttccaacatgggcttttcctctttgggttcaaatttagcccagtgtcggtcaatcccacgctgaaacaaggcgaaactctttttgcgaaaatgaaaattgtttgtatgacttacccttaaacgtaaaaaagcgccccgaaaggcgcagtcgtgaaacaaagaggatgaaaacagaaatcaggccgcgtgttcataggcctgcaaacgctgcgaccagttgcccagataatgggccggtgtgtagcgtgtccgttggctgccgggatcattcagcacatcaccgatcgtaaccgccgccggaataccggtcagggaaagctggatataggccatcaccgctgccagcgggtcgatatcaatcgcagacacccacatactggacaacggatcatatccctgctcccttaatacctccgcggctgccaacatcatacaggccgcaccacagcaaggttcgtggaaggtgacaaagggtcgggtctgcaacaagtcagatacctcattcaactgcaattgtgccatgactctggccacactccagggcgtaaagaactgctgaagttccttattccccagctccagttgcataaacacgctgccgagaaaatcaccgggttcttccgacaatgccagcacggtcatcgaaaaaagttccacaatccggtcaatatcttcccgttcgtatttgttgatggttttcagatagaactgctcgagttcctcactgaaacagtatttattgtgaatggccgccatcgcacagttgcaaaaatcctgaaaaacccgataccggttacgggaaagggcggtttgtttaaacagcgaaataaagtctttctgatagtcagggtgagaggccatagcatgttttcctgataagactcaaaaaggaaaacacgccccggaaggagaatgtgtttccccttccggttgaagtaaagataaattgatgctgcgttgaacaaagaattactggccgacggccatcgccggtagtgccagtgccgtttcggttttgtctccgttaaccagatacagtgccggacggttttcttgtcctacctgcccgttgtggctgtccacatgttcaccctggtcataacagtcatagcctttgaggctgcctgacggttcgctgtaccagtggcggatttcacagtcaaacactgatgacagcccgcccatcagttccgccgaaggcggtacccatggcgtgtcaaaacgcacggttaagctgctgacatggcgccgttcccagcggacatgatgaccgaacggccattccagcccatagtgctcatcgtagaactgcaccgtggaggccatccctttcagtaagccactattaccgttaatctccggagccagccgggtcggtcgtatcatcagcatatcacacggctgggccgaggtcggataaaccgacagcttctcccagcacacgcccatatcaaggttgtctgaccagcccaccacgccgaaccagtcagtgtactgacgggtcagcaggcgggcaatcatgtcacgcgctgatgccggtatagtctcccagcgcagcaggcttaagcccgactggcggtagatactgtcaatccgcttcatattttcggtggtcaacaacacattgtcctgcaacagcgccagccactgttcaaacgccagattctgcgcggtcggcgctgccgtgccccgaatcagttccggatacggtgtgtaagtgaggggcttggtgggttttaatatccccgcacagcccgccagaaacagccgcaggctctgtaatacagcctgccggtaacgggggacttcttctccgcagacccattgttgcatcacatcgagacacacggatttgcccgtaacttccagttgattagtaacccattctgccatgattaagctcctttgatttttaagtttaaaaaccggagaaactgttcccccacgggagtcagttcccccgatgggtgattgaaaaaagtgtcagttgaaatcccgtctgaagataccggcaacctgactgtcgacaatgaccatcagttcatcatacacccccggatacggtgtgccgggcgtcattgccgggggcgttcagccgggtcaaatcgtatttatccactcagtcattaatggcttcggatagtctgacaccgtgagcgataagttcggtcaccgtatcgttcaggctcagatcagaatagcgtttcagccgcacggcggtaatcacctgccagacggttaaacgtcagacttcccgggtgacaccatcaaacgctgaccgttgcgctatgccggagaatatcctgcacttcgtgatgatagtggtaatcgggtgaaatcatatgcagtgacaacaaattcgcctcctgccacaaaacgtgggctgcctgcggatcctgccagctcagctcaacggtggccgcctgacataactgctgttgttttcgttccagtgacaaacgttctgacgtcagtgtaaccggctgtgcccagacgatctcgtcataaaagcgccccccgagcacactgttatctttggcgtcatatatcatcacggtcaggggaaaaaaagcgcgtcgatactgacccgatgagatttccggtatcggccagtcacccagcaaatggatgactttcaatcgttgtaccgcttcggtgatggaggcagtttcacacacggtcaggatttactcttgc

SEQ ID NO: 401 - DNA, 12269 bp, Xenorhabdus sp.; identical to SEQ ID NO: 79
  CDS (5376)..(5774)

SEQ ID NO: 402 - DNA, 12269 bp, Xenorhabdus sp.; identical to SEQ ID NO: 79
  CDS (7916)..(8293)

SEQ ID NO: 403 - DNA, 10657 bp, Xenorhabdus sp.
  CDS (10406)..(10657)
gctcgttccatgtgctctaaagttttgcaaaatttcacgctcaggtggatctatatcacgggcaccaaccagaataatttgttcaggacgtaaaccagaaccgtgcccgctatcccagaggccgcaggcagcagcaagtaccataccaccgaggtaacctgattctgttgtctccggtgtgttgaaatcaccatgtgcatcaatccaaagcactaccgcttccggatgctcccgcgcgacaacaggtaatgaagcaagactcgcagaacaggtattagcgagcataaacgtccggttttttcccttaatactcgcttcaattgcctgacgcaactcaacaagcgtttcacgggcttgaggaagactaacactccagtcatcgttctcaggaggcgcgctctttccaataaaatgcccctgaataccatagtgtttttttaacgcctcagcggtacgagcagcaccttcaatcatgcgtgctgccctatcagctatgcgaccctgagaaacgataagatcaatcatggaacagtttccttttcattattatcaataaaaatttcaggttaatcttcggtcataactcataaaaactaattctggcttcattttttcctgaacataaacgggcacttgccctctctcttcacattttcatccagaaggccatactgcagccattcaagcgcttctgtaccataagagccaagctgcaaagaacggggaacatcatcatatttatcaatgcgattacggatattttcacggatcttacgaccatccggagtattaccggcgacgatatcgaaacgctcacgtgggttgatgaccataataaaatgctcaccaagattcctgcttctacgtgactggttcgccggactgctcatattgcagaatagctgcataccgttaaaacacatgcaccaggctgaagaatcgggatatttactgatactttccggccagggttcaggatctatttcatgtaatttctgcaagacttcccagccaaacgcgtgataatcactaatagactgaactcttattgcttcttgtgagaacgcaacaaacagcgggtatgcggtatttaaatcgccattccaattctgcgaaagttcaacataatctttaagcccttcagctaaatgctgaatgccactcttctctgcattctctacgaagataaattttaataacttttttttaaatgctctctttgagaagatacaaggaaaatcaacatgatcaagtcgaaaccctatatcactgagaacaatatgatgccagtctttttcactttcatttacttgaggttgtgagattaattttgtaatacctggatttttatctaatatattcacttaaatcacctttcattaatagaaagaagacgtgtctgacacggcgataattaccctttaaatgaatatttaatgtgataactgaaagataaaatcatttattatcaaggagggcaattgaaatttcattcattaataaaaaacatcaaatataaacaataaaaacaataaaaacaataaaaacattaaaaacattaaaaacattaaaaacattaaaaacattaaaaacattaaaaacattaaaaacattaaaaacattaaaaacattaaaaacattaaaaacattaaaaacattaaagactgtatcatcacgacctaaaagcatatataacaattatcaaaagaaacgatataattattataaaaacattcagaaacaacacattaaaaatacacaaaaataaaaaaacaaaaataaataacaaaatattaaagtcaacatttataactcaaataaaaatataatttatgtcaatgaagattatttcataatatagatagatataaaataaaatataaaaaacctgtatttaatttaatcactggaacatgctttttttatttacggataaataatgtaaacttggcaatgaaatgaaaagtgaagccgattgagaattagtcagatggataaaaaaaagcgagaaaatcagcaagctgtcagtggcactacccgcatctatgtacaacaaaaaaatcacttacacacccctaagctggactgggtagctgaagaagtcccggtggccttagtctacaacggcatttcccatgtcgtcatgatggcaagtccaaaagacctcgagcatttcgcaattggcttctccctatcagaagggattatcacttctccacaggagattcgcgggattgatatagcttccggctgccacggcggtattgaagtcaatatcgaactctccagccgccgtttcgctgaattgaaagaacgccgacgcagtatggcaggccgaaccggttgcggtatttgtggcacagagcaaatatcagaaatcttccgccccatccctccactgccttttacacaaactttttcattggtttatctggatcaggcgcttgcacaattacctcttctgcaagacatcggttcattgactggctgtacccatgcagctggctggattgactcggaaggaaatttacttggtggatgtgaagacgttggccgccatgttgctttagataagctattgggaatgcgttcaaaaacagactggcaacaaggcgctgttttggtttccagccgtgccagttatgaaatggtgcagaaatctgccaattgtggtgtagagatattatttgccgtttctgctgctacttcactcgcaatcgaagtagcagaaaaatgtaatctgacgctagtcggtttctgtaaactggggcgagcaacggtgtatacacattctcagaggttaaccaattaatcaatgctatgaagcatccataaattgggttcaatataatgtgcgatctgtttttctgtatccaccaccaggggaaccaatgcgcccggaataatgtacttcccgctttgcgggaacttcatttctgtccacttttcccattcttccactgttccgtcaatattcatagaacggaatgcaggtttaatgattttggcccctaaacgccaatgagtgcgtatccagggatcaaatggctcctctttttcatttttccaactacaatattcgacaaaatcttgcaatggataacagctttttcggcttggcctgacaggtacaacgacgccttgtaatcctgcttcacgagcggtttgcttcacattattaattaatagcgctggaatattgcaaccacgaaattcaggatcaacggtaacagaaagtgctgacaacatattcgcctgtcccttagcctccataccaagccgcagtattgcatcccatccctcgtcaggcagttgctccagtgaaggtgcttcccataaaaaaggaattgaatttaataccccaataagacgctcttcctgcccctgttgcagaatggcatatttttgaaaatgactaaacgggggttcatataaggtatcccaatactgttcagacaccttgtcgtagttcgaaaataaaggccagctggcatcaataaaatcacttgatttttcctcaatatcttccctctctctggcagactgaataataatttttgcatccataattaactccctattaaagacggttctttgaatcaaaataatacatataaaaaactaatgaattagctgagtaaaataagtgcttttttgcagccagaacgggactattaatcacgcaatcactacaggccattaaatttaacctcatcacatttttagaaaaacgacaaaatatctcttcttcttatcaaaaattaaaatcattaaaatacaaataattgaattagtcactgattaaaaccacaacaaaatcaacatcaaataaaaataattatcatttacattatcatttgaagaatgtacatttctcctgcgcaataaatcaggccatttttatgattgggtaacgagggatcccccactctaaatgaggataacgatgaaaaaagttaaggtattagtcgccactttaggcgttttgggatttatggcacaggctcacgcagcagtaggatttggtcagagtcaggtaagttcaccatcatacgttaaggttggtccaacccaacccggtaaaggcccacacggtggcaatggcggtgaaccgggtatcggcattagttccgtttatggtggtcaaatcactggcttttctggcctgacacgtatggcacctgctgacagtaatggaattcacaatatctcaatggctggtgctccgggcactcatggtggtatgggcgtattccatttcagcaaagtcgctaatgaagaggtttacttcggtgaatggtctcagactggtaaagctgatgacccaactcatacggtttattacgccggcaaagatattaccaccaatattccaaccgacggcacagcaacctataccgtgaccggtattaaccaatacagcggaaataatgcgctgtccggtacatttaccgcagattttggtgagaaaacactggttggctcaatggcaaatgatgctatgacaataaatatcaatgccgatatttatgctgatgcgagtttcgagggtgatgcaagagttggcaacctcgccggttcaacagaaggtcatttctttggcgataatgcatcgagtctggcagggtatgcaaaatttgatggtgatcattccaaagatactgctttcggtggctctaaacagtaattgctaatttatcagaggacagtgttcattttttagcactgttctctgtttttatttttaataacgtaagttttataagctggctttgcgatgtctgacaatagaaaaactcttatattattaacggcattgattgctttttttatctctctgccgatatatgccgatgaagataccccacgcaatatttggcaggaagcacaacatcaccaacaggaaaatgaaaacaaactgattacacctgatcccatttttgctgagaataatgcagcgttgattgtcattaatggacaaaaatttcaggtagaagataatctggataatgttggttttgcactatttcttgcgaccattcaccaacagtggccggatgtcaggcgttttcttgcatcttataaaaaattgtcaggatatgattccatgctggtcaattttgctcagggagggctggctcgccttgaagaaaatttagaactggccacctatcattaccaacaaattctgaaccaacagcccgattttccccgtgttcaactggaactggcccgagtctattttcaagatcataaaaatcgggaagcagaacgcctattttcagaactaagtgaaaaaaaacaagtaccagaagcagtattgaagaacatcaacagttatcttgaagcgataaaactaagaaatggctggcgtggctcgttctctgctggttacgcctacaacaataatgtgaatatgtcttctaatcaggactttgcttgtctaaaaataaacgaagagcaatgtattcaacagcagataccaaaagctgtcaaagcatggggtatgtcttatgacgcaacaataagccgaagacatcaacttttcggtaatcacggtattgctatccgtggtctgatttatggtgaaaattactataattaccacgatgaaaatgaaaatacctttcagttaaccagtggatacagctataaaaacagaaaccacgatatctcctttagcccgttatttgaatataaacaaattgctggtgatcgcttctaccatgccgccggaatcaaaacaaaatggcgatggggaataacctctcagacaactcttgatattgaatctgaacataaacaactgcgccatcagcacaattaccgcagaaaagacggtggattaacctcttcctacctcaatttattccacactatcagcaaagattttattctgtttggtggcggggactggacttatcggggtaacgaccaatatcccgtcgaccgctatcagcaatggggagttcgggcaggagttggcggacaaatctattccggcatccatggcgtattgtttgccacattacgtgatcggcgctttggtgcttacagcccgatgctgaatgctaagcgtcatgatacggagcaaatatacaccgctgttatcagagtgcctgcggctgaaatcatggggatgaccccttctgttactttccgctaccgacgcaatcacagcaatgtagattggatgtacagctataacaaaaacgaagtgctgctcaggctggaaaagtttttttaatcaaaatctgatgattttttatttgtgcgatgataactgaggcaagaaatatcaatggcatatcaaattaaaaccggactaactcccatcaccatagctctgtcactggcattttcactggcagcacctcctgtgtttgctgaatccaaacctgccagcacaacgtcagacagcaaaactgatttaggtaaaatccgggtgacagataacagagataaagatgaagccggttatgatgcggtttatgacaaagatatctccaatatttatatcggcaaaaaggagatagagcgttacaaaggcgcatctcctgctgatgtcattaaaggggctgttggtgtttacagtggtgatgcccgcaatagcggtgccttagatatcaatattcgtggtattcagggacaagggcgtattcccgtcacgattgatggaaccgaacaggcaattaccgttggacgtggctataacggtgctaataaccgcaactatattgatcctaacttaatcagcagcattgaaattgagaaagggccttccctgaatcgcagggtgaaaggttccgtcgggggagcagtctctatcaaaacactcaatattgatgatgtcgtgccggaaggtgaaacatttggcatcaataccaaactggaaaccagtagtaactcagtcaaagagcgcactccgtctttgtcactgggacaggattaccgcgatgttcccaattttatacacaatggaatcgaatctgatcctgcactaaaaatcactccacactcatcaaaagacaataaactgttcggtttcaaagataatgcctttcgcgttgcagtgggaacacgacaagaatattttgacctgatgctggcttatgcttaccgccataagggcaactattttgcaggtaaaggtggtgcacatcgctatgatgcagcagcaacagaagccgatataaacttaatgctcaacccaaaaacgagtctagatccttatctcccctttgcagcccgtatttatcgccccggtaatgaagtccccaatacttccagcaaaatgcaatcggtgttaatcaaaaacacctggcacttcaccgatgagcaggcattacaacttgctttccgtaacacgcgtatggagttcggcgatatcatgccttcaaggctggcatcggtgcttgctaaagaaaatagtgttcctcaatggccgctggccaatgcccgccagcaggcggctagcctaaattataaatgggactctgctgcaaacccttatattgattttgatatgaatctgtggacaacccgcacgataagtaacaccaatacttcaggtggatatccgcgtggtccggttaccagagactatgattgggagggaggaaaaggcaggagcactaatattgatggaaccttaatcaatacagccgtcaccaatgcccaaaataatcgttggggtgtagatatttccaataaattcgaactgacccaaaatttggatcttactctgatgggaaatttccaacgcgaacgcttgggttctgatgatgacatcagccatattgataatctgtatttctttcagtccccagcaagaaaagggcaacgtcaggaaattaatctcgcttttaactttgactggcgtcctacttcatggctggcattgggtgctggtgctaaacgtgtttcctattggtccaaagatgattttcttaatgaacggcgtatcgcaagagatagaaattataaagaaccgggagaaataatcggatacaaaatgagctactggcgaacagtaacagaggacgaagccaatgacttcaaaaaacgaaatgatgaaaaatattattctaaacttagcagaacagaaaaacgtgaattgcgtgctaagacaaaaaaaataaaagatagaaatgatcgtattcaacaaaaaagatggttagttgaagaaaaattcgagtggaaatataaccctgaaacaggaaaacttaataaaagcgataacccctattttaatggccaattggatatgaatgaaaaggttatcgacccaatcagcggcagagaagcctataaatatgagtatagtgcaaacagtctgagtaataatgataagatactctcacaagatgtagattctccttgggaaccagccccaaaacgtaaatcccatgcttgggcaccaacattctcagctactgcctatatcactgacgatctcagagtctatacccgttatgccgaggcagtaagaatgcccagtatttttgaagatactgtcggtttttcaggcgttaaagaaaattacattggtttgaaatttaaaccagaacgagccaaaaccatagaaacaggtttcgtttatgatttcagccagttagtgaatgctgaacgtaatgcggatatcaaactctcctattacaatactgttattgaaaatgtgttcgacagggataatacctataatttcgcccagttagataaacaaaaactggcaggtttagaattacaggctcgttacgacaacggcagtttctttactgatatgggtttggtctacaacatgaaaaataaggtgtgtgacaataactctgccgcaagaatggattctcagaatcgttacggtgttcccgaatgtattgatggtggtttcccgggcggttacttgcgtacttccattcagccaaaatataccgctaacctgaatgtcggcggacgcctgtttgatgaaaaactggaactgggcagccggatgctctaccacagcagagcagaaaacaaagatgaaaaatggttgatgggtgttttgccgaatgaatataaagggatatccaacaacccgatgcgctggaactccgtcttcaccgttgatgcctatgtcagctaccaaatcacccctgcgatatcaatggaactgactggcacaaacttaactaaccgctattatcttgatccactgactcgctcaatgataccggcaccgggcagaacctttaagctcagccttaccagtcagttttagaggatagtatgattaatacagccatatcagataattcagtgaacggcttgcagttaacgctcagtaagcgttttctggctggtattcttatcgctgtttcattgcatatcagtctgatatggctgttaaaccgacattcagagtcgaacgacgacagtgcccatcatcttaatcagaattctcctttgacaagtttttcaatcacgatggttgcggcctcagcattagcagaagagccggaaccggttgaattatctcagccagttctgactgttcctgaatcaccgacagctccggtaattgcactggataaagtcgttcaaacagaaaaaaagatcgatactccggccgaaccaataaaaactcaaaaacctaaaaaacagccaaaagaaaaaccgaaagaaaatagagaaaagaaatctgctcagtcatctcagactccccaaaacagcccggaggaacttgaaacgaatggtactgatcaggtcaactcacaaagtggaatgagtcaggcgacaacttctcaacctttagtgggtcagggtaatagtgagtcagacaattaccatgcgaggctccggcaggaaattgagcgccataagcgttacccccgcaaagcaaaacgaatgaagcaggaaggtacagtcaccgtcaactttatacttcaagatgatggttcaatcactgccgccaaaatcattcaatcctccggctacagtgcaatggataatgaagcactgaaagcgctcagtcttgctaaatctattggcccgaaaccaacaacactgccagcagatatcacactgcaaatcagctttgagctggttcgataatatacatgtcacaaccgaccttttgagcaataaccagacaagtgtcactgattgcaaaaatcaacacgccaaattactttcactgaataaaaacactcaggagatttaccatgtctagaggattaaaagggaaagttgcacttgtcaccgaagccactcagaggaatgagatgaacgctccccactcattaaatctggagcacaatgatgaatgaagggaaagtacataaaggtgtggagcctcgcagatttccggcatcatagtgcccaatacgggatgcataaagctccctcagactggagactccacaacatgaaatgtacaccggttggcgttgatattgcaaaacatctgatccaagtccacttcattaatgagcacacaggtgaagtggttgataagcagttgcgtagtcaagattttttgacgtttttcagtaaccgtgagccttgccttattggtatggaagcctgtggcggttctcagcactgggctcgcgaactggaaaagcaagggcacaaagtcaggttgatgcagggtcgcttcgtcaaagcgttcgtcatg

SEQ ID NO: 404 - DNA, 14112 bp, Xenorhabdus sp.
  CDS (8021)..(8419)
ccccgccgctcagaaccggcaagagggcaggagcgcagggtattcccctctttacgtagcagtagttcagggctggcaccaatcaacgtgccatctgccagcggcaagtgaaagttatagctctgtggattctgcctgttgagttgtagccacaggttcagtgcactcagtgggggaatgctttcaatctgtagcagacgcgataacaccactttatcgagcgcaccaatgcgcagaggattcagcgcactttccaccatggcgcaatacgcatcgtgatccggaatgaagtgagtctggccctccacctgtaccggagagtcggaaaggttaaaggcatagcgatcgaaccaatggcagatttgtggaataaacagcgaacagggttggcgtttatcaaaaggaatagctcctacgacaataggattttctactccggcttgctgagccagacgaagctgctgctgtactctttgctggaactcgctttcgacatgatgtccggatgaggccggaagtgtcaaggtggcgaagcatccccgggcgagcaaacttttgtgaggtgacagaaatatgaagtcatcttcttgcaacgtgagtggcagaagttcgttgacgataccagacaaaatcaggtccctcttgttagtataatggtcagttttttctccataccggagaggaggaaaataccgcaggcaaagaaaatgccaaccgccaatagtgtcggataccagatattatctgttatagctggctgtggagaagatgctgcggtagaagtaggagaaacgcgcctctttacggaaagtttcagcgctgaggttgtaactctcatgatgctaatccctcgctaactacatacgctctgtcagatagaatagatgttgaaaacatcccaacctgaatccctaatttttcgcatagagcgatgagtttcatcacaagtttttttcttatcttaaacataatcaaacaccgtctgactttgccttataaaaataatctaataaccatcaattcatttgtgctgcttacaggcggcgctggaaacccaatttgataaaacattcatcatgaaaaggtatgatctcctgaagaagaaaacggcactacaatattgcaaatagaaatgattatcaatataattatcattattaattatttgctggttttgtgtcaaaacggttctgttgtattaagtgaatcatcctgagctgttgtgctgtggtaaatttggatactcctccaaaaagtaaaaagaccgcactaggcggcctttaacaaaaatgcgatttaacctaaaaatattgaatttaattcaatgtgttaggttaatttgcattaaccatacattcactctttcaattgacatagtaatctaccaaaatcattagaagcagcaggctcaaaatcaatttgaccaccctgtgcataataatgatatagaataaactttccctctttgtctttactttttatttttactttcagatcttttggctgcccctgataaggcaaaaaaccaaagccagagaagccttctaaaggtgaataagcatattctcgccccaaagaattactgttagttgaattttcactaacatcctcctcagtcattgattcagcttgacgcccctttgaatatcgaagatcaagcttgtcacacgtgttgtttatactattatcccccagttttacttctccatgatcaccaacatcatccgggctaaaaacatacctctttggtttgaaagtatatgtatacgcatatttagctcccgacttggctttagtcactgtcgcaataaccgttgcagttttagatgagctaaaagttccaaaaggaaaagtgatttttttattcactatttccacgagatcagaagatgggggggcatattcaatatcatcgtcatagcgggcaatatcctcatgataatgttcatggtttgggcttggttttattagtgttatcgttaatccctcataaacattatacggtttatcttgttcatgagtatatttattctcatgagcatgacgtccgaagatgagtaacccggctttctgtactaccggtttgaaattgacgggtgtttccttgctattgctggcatatgcattaccatcatcagccgtgatattcagattgactttgacgccatccactcctactttactcaccagtaaagcttttaaatatccatcattatctgtcgtttgttcctgttccttaaaatacacatcattacgcagcaattcatttacgataacttcccaggttgcattgagtttgtagttacgaagtggttgcccgttttcaggatcgataattaagactctataggtatactcatcttttccattcccaaagagagtttcttttggagaaacttccatttcacttatgaacggtttatctccaggagcaaaaggattaaccgtaatagtcatttcagcggttttggatagtttcccgttctctaattccaccgtggcagaaatcgggtaactatttacaccattggggatatatttgggtaatttaatttgaatttcattacccgcgcccggaagttcgccaccatttttgctgaatgcttctgcctgccatgtcaccggtttggtcggttcacttgaaaccacagcagcaatgactgatatactctgattaccatatccagcaagggtattcggtaaggtgatttctaattcagtatttttatcttcatctttaaccgtaacagtcattgttgcggttttggatagtttcccgttctttaattccaccgtggcagaaatcgggtaactatttataccattggggatatatttgggtaatttaatttcaatgggattaccaacacttggaagttccccaccattttttctgaatgcttctgcctgccatgtcaccggtttggtcagttcacttgaaaccacagcagcagtgactgatatattctgattaccatatccatcaagggtattcggtaaggtgattcccaattcagtatttttatcgttaaccgtaacagtcatttttgcagttttggatagtttcccgttttctaattccaccatggcataaatcgggtaactatttacaccattggggatatatttgggcaatttaatttgaatttcattacccgcgcccggaagtttcccaccatttttgctgaatgcttcttctgctcgccatgtcactggtttagtcggtttatttttccatatgacaggttaaaaccaccgtctttagacggtgactttgactttaatgttttgacctacgcgcgtttacgaggtgcgtggttcgacgactttcagtcgtcagcaccgaagtgcgctaacccacctacttcagtaggtggtagttaagttgacgtgacagtagcgattattgtttcctcctcttcactatctccatggagggtattcggtaatctaatttccagactcggtttttccctgtgatccagcacaatggtgttatttctttccaccaaatcatatcggctgcctgccagtgtgcgcattgatgcaacactatccggtgacaactgagcactcagcggtacaccaaatctatagttgaaattggcctgaaagcgggcatcgctgtgtttgttggtgccatgccggtaatctatgcccatggttatcagcggaattggtgtataagtcatgcctactttggcaaaaccgggatttttctgtttggtatcacggttgaatagagtcacatcatcgccaaagtatttttcgtaacccagtttactgccgatgtgcggataagcaggcaggaagaactcgccattgatatcaaaaccattagcagggcgctcttcccaaagtttatcatctcgtgactggtgccatttactcagacgaatataggtattggctgataatttaaggtaatcagcccatgcttctgcacccaatcccagtcggttattttttcctgtgatgtcctgatcaaagaaagtattaaaaccatacatccagtctgagatgaaataacggctgccaaaaccgaggttaactgtatttcggctgtctttattacgataacccagctgagaaaaaaacagccagttgactttattatcataaagtggaaataacaggtctaatgaactgttatgcaatttaccttttctatccaacgataaattaattttggctgtaccaaattgtgacaaccattcttgtacctcgctatttattgttccgttcaatcttcccaaagcgtaagatttagcctgctctgccaattgagatggcgtagatgataataagccactaatcctctgaatattttgtgcgaccatgctggctttatcttcttctatataaccagaaatattttcttcgtcttcaatcggagaaatagtgcttactgccagatcctgatggctttcactcactgaaaacgtgttcatagcgacaaacggtaataaaaaagcaaacattaatatgaaaaaccgcctgaatttattcaaaaaaataaacttcatagatacattcctcaataaaacgcaaattttcaccagcgaattcacattaaatgtttagggcgtgttgacgtttgctcgaagggaattgggtggcatgataatttggtctcttattttcgccaaaaaactcgttacccgaactatcatgccacgacctatgttatcagatcctgtgtgggataagctatttgtcttcatgcaacaaaatcggcttacctatcataaaaaaacgcatcgcctcatcatggaaggtattctttttcgaatgagaaccgggataccctggcgggaactacctgctgaatatgggaaatggaatacggtctttaagcgttttaatgtctggtcaaaaaaaggtgtttttaattcattattcaacgaattagctaagaattctgatactgaatggttgtttattgatggcagtattgtccgtgctcatcagcacagttcaggcgcagcttcaaaggaaaatgaagcgattggaaaaagccggggtggacgctcgactaaaatccatttggccgtagacagttacggcctgcctgttcattttgaattatccgagggacaaactcacgacatggtgcatgcggaaagtttggtggcgcaatcaccgcccgcggattttgtcgttgctgacaagggatacgatagtcaggcattgagaacttatattgaagaacaaggtgcaacagcggttattccctaccgaaaaaatagccgaaattcggataaaaagtgggataaggatttatatcgttatcgtcatttagtcgaaaatgcatttgccagaatcaaacattttcgtgcaatcgccacaagatacgataaattagcgagaaattacgccagcacattagcactggcatttatcattatctggttacccatgtgggtcgagtaagtgatgaaaacaaaacgtcaacacgccctagtaatatttgtggatgatttagacagatgtttgccacaaacagcaatttcaacacttgaatcaattcgtttattactatttattcgccgtagcgctttcgttattgctgcagataatgatttcataaaagctgcagtgaaggttcactttgatggcgcgggaattacgggcgatgttgcaactaactatttcgataaattaatacaggttccactccatgttcctcgccttggtttgaatgaggcgaaagcgtatctagtgcttttgctgcttgagcgagagaccaacgcaggccatttcagtaaggaaagattcaatcatgctcttagcgttatccctgagaagctgcgtaatagttggaaaggtgaaacgatcaatcaagagtttttatatgaattggtagagcatgttaatgcactcaaaagtttaatggatttagcccagggtcttgcggctcttcttcatagttctttagcagtaaacgctaatccccggctaatgaaaagatttttaaatactgtttatttacgtgatgctctttctgcgcctcagggaataacgttagatatagccgcactggcaaaatggcatctccttgaaaggtgcgacgaaagccttgctgaggaacttgctagtcgtgttcattcggataatgacggtagggtacaagttttggcggatgctgaagctgctgcagcggatcagagtagtttacctgagcctttcaagaatacgccatttactcagcaatggctccaactcctgccagctttgggaaccgaggatctacgcccgcttctccacctcagtcgtgactctggaactcgtgacttcggtgatgacaatatgactcctgattctagaaaattgagagacgcactgaaagttgcaactaatggtcatgaatccttagttgaacttatgaggaaaataggaccttcacagacagagttggcgatgactaaggcctggcagagtaatagtgcctcacgtacctggaagagtagcaaagaaattgtaatgctgattgagtgctgcaaggtttacacggaaattggaaataaagcagtcaacttgttggatcaggcccctctgaaacttattggcccgggtttaatcccaactctgggtgctcagccatgggcacagcaacttttagaacgatggaaagatcttaacgaattaccaaaaacgactaggaatgcaattgtgaaccttgggaggaggcgctaatgggaacatcaacttctagtgggggaggccgcgcaggttcaccgtttgatcctgaatggttaaaacctgaaagtgactctacaacaggtgaaggagattcgcctgattcaccatcggaggagaacggtggaaatgtaattcctgatggtgcaatagcaccagaacgacggtttggacctgctcgttcgctacttgggggatatctgcaaaatggcagccacgataatttacgtggtgcgacaaaaagcatggtctccaaaggaatggggggcgtgcgacgagctgccgctactatgcgaggtgttgccagtggtgtcggtagtcttggtgagttcctgacgtctgttagggatggaaacgaccagcgagtgattgattggcttacttacgttcgtcaagagaatctttcggcaacagatcttactcttgaaattttgaaagaggttattcctgggacaggaagcgttgatgacgaatcgctccgtaatgctggcgcgcaggctatggcgcaactctatgaactttatccggacgtggacatatttaatctcacggatgcgcaaatagctgaagtcatggggttgaccattgcgaatgagatttgtaatcgaatagatctccagcttggacagacttacgaaaaattaaaatatgatcctttattaattcaggaacggcgttctgatattcgcgagtgggtcggtgctgaggttagagtggtattggaaaaacaaactacaaaaaatacagaaccgaaaagcttggctcagtctattctcttctctgccttagaggtattttcagaatgattaaagttatgtgtgctaaagcagaactgattccagcgcaggttcctgctgatgagcgagtattctcctattttaaaggcgctaagcgtgcaggtgttggtacaattgcgaatcgatggcatggtgcattaaaacggggtgggtttcgaccttcaacagagatttgggattttgtacagttttgcctcgcggtatgtagcgcggatctatcaagccctagaagaacaagtgcagatggctggacccggaatattcagcttacggttggattgtgcaatccagataagtggctaccgctaaaatccgatcttgaagatatgctaaaagttctgactggtgattattggttattaaatttcaataatgcaggcatggaacctcctcaaggagatggagcttttctcagtaatgattgcgtatctttatttttccatataaaaggttaaaaccaccgactttagtcggtcagctttagctgcgatactgtgttgcacgagaggtgcaatatggattacagatatggcagccacacggtatttcagattgagtatcattttgtgtgggtaacaaaatacaggcacaaagtgctaataggtgaagttggtttacgggtgagagagttagttcgtcagacctgtgaagcgttcgaaatcaggatagtagaaggggtcgtgagcaaagaccatgtacatatactggtgagttgtcctccgagcttagcgccctcagaaatcatgaggcgaataaagggaaggacagcaagtaagttgtttgaagagtttgctcacttgaaaaagcgttactggggtcagcatttttggggcagaggctatttttgtgcgacggtaggtcagttaacggaagagatgataaaggcctatctggcgcatcattttgaaccgaacccgaatgatcacttcaggctggataattgacgcatcgtttagccgatgcgtatccggactttcagtccgttaatcactaacccaccgactttagtcggtggttgttgagttgttagcttacctatgaattggggttttttcttaatgttattagatgtatatggatagttccaaagcctaaatatttctttgtaaaattcatccgtaaatgttaattgccattttaatatttcatcagatacatatgcttgtaatattttttgaagttcatctctttccctgtcatattgatatcctgttgcttcatcaattaaagatataatacctactttagcaaatgatcttattaacatttcacattgttcagctattattgattgcctagcggatagagtgatttcttttcttgcttgcatgaatgaatcacaaagatcaactaaaatgctagcttcatatccgttaatctttttttcgccttcatagcatattattggttcatagtgtgtttcagatttatccttatagatgaatggagcaagtgacttttggttcagatatcgttgtaatctatctcctgagacttggtaacttgtttcctcatcgacaagttttagagctttttgcatttctcttccagagagtattcgtgtaccatctttcaatacgtaacaggatatgttaaatcctgctagatctaatgaacctctatactgtatttttcttgagccgttcatttttcacccttgttttgtttcaaattgtcacatataacccccgtactgtactacgggggtagtctaaggttatcttcgggctttcaggtgaacctgaacaaaacctaactgttttttagttagattgtctctttgcctacaggcgaaccgaaatccacttcttcatgaatatttttaccattcacacccgctaataatgaatcaagatcatattctttctctctaataacatggggagtagaatattcacggagtaggttacataactctttgttattactttgattactattcatatcagaacctttttggggtgaaaaaatagtctattcatgaccttgagattaaattttaactgtctttttccaaaattaggtgaccatgttcatcaagtgtgatcatggacagcatttgttcaattgcgtaatgcaccaaatcagcctcactgtaaattttttgccgtccgctcataatatttttctttgttaagaggaatgccttttcctgtaaatctatagattccgatttcttcaacctgatagtagttttcaatgtagatgcatgacccattagcagcctccgttcaccataatctttaattctataaaatttgtgtgcaagttgcctacgacatgttgacaggaaacatgtgatatgtttactatctatagataatgttattagtgatttgtatacaacgccaattgagagcgtttttagggaaagaaagatcgggtactcagggttaaacctcagtacttttttaaaagcgttaagggttcgcataatctatattatgttaaatttaaatcatgtacataatccaagcatcatagcgtaatcctactcattatatgtatcagggttccctccctactcttctctgaaaatacgagggattcagacaaaacaattaaccctcaaaacatatcagcgacttatggtttgtcatccacctcaaaacctctgaggttgtcgagcacagcctctgagatacgtaacgcttcttctttgatccgtacggtaagtagagccacatttgtgaaatccggtgactcaacaagtaccgcttctaatacactgtattgaggcatttcggtgcgctctacattccacgaactatttttcagaatgttccagtatgctttctggatagttgcgtttttccccatcaaccatagttcgaagcgtaaagctttatgattcagaacaatgccaaagcgtagttttcgctcccgtagatagtcgtcaaagaacgaaaagtacgtaaagtccagatatccgggcgagacatttccgaaaaaaaatttatcagcaagattatttgttaaatacgcttttaaatgcatcatgtaccgcaatagataatgatatgctttttggatatccccttgttcaagctgggctttgtacacagagatacatttatcgacatcttgtatattactgattaagtcagtcgcagaaaatgtgcagagcatttgttgtttgttatcgtcagtcatgatttattccatagtttttacttggtacagaataggcagttacttgaacaattcagctggcagatagccggggtagcctttacattagtttagatattcttagcctgatgtctaatgatgggtagaaacaagctatatagctgttttattgctctaccttgcatttttatttgcatacataatgctgaaattgcttggcaatagtttgttgagctaatgtatttactcttctgagtgttctatctatgattccatattaattcattcgcttatgatttatttatcaatggagctttcatgattcatatcattcttgcaccaaccaaccttgggttaagccccctatgggaaggacacatacccgggacatggcgggctccgcaagtactgatggaacatggattagcgcaaaagctgcgagctaataccatcagtaaattaatgtctccaatatattcacttgaagctcaaattgggacacgtatacgcaatggttatggtattcgtgcctttaatttacagttggcggaggaagtggctaaggtacaagagagtggcaattttccactagttattggtggtgactgctcaatcctattaggcgcattagctggttctcgtcgtacagggcctatttcactcatccacattgatggacacagtgattatcgccatccagacaactacgatacaaatcaaatgctaggtgcagtagcagggatggatttggctttggcaacaggtcgcggtgaggctctattaacagactggccagatatagaaagcccattagtgccagagcagcaggtactccagttaggcgaacgcgagaaccgagatgctgattttgcttggcctgatattaaccaaacggctatttcacagattgatgtatttacagcaaattcaataggcgaaaaagggatcctcaacaaaattgagcaaatgttaggtgctcaaccgacatggcgtttttgggtacatttagatgttgatgttcttgaccaaagtatcatgccagcggttgattcacccgggagtccgggcattgaattgaattggttgaaaaatatcggcgcacaattaattaataacccattatgttgtggcatgactgtttcagttttcgatcctgatttagatcccgatggttattatgccgagctgattattgaaatcctggaagaaatgtttctgcgctgtacatccccttctctctgaaaattatattttagggactgcttttttattaggatatcaagtctatttgatatcctataagtagcatataaccttatttgcgaataaaattatcgataatcaaaccaatcgcttcttcgctacgtccgtgtaaaatagcttttgcagtatataaccccattccaactacgctatttaattctacatttggtggcatcaccaattcattgggcgaagtatgtacatctaacactgctgggccatcatgatttagaaagcgaataacggcttcttctaatttctccggtgattcaattgattcaccaaagatccctaatgatgtcgcaagcttgctaaaatcagggttatctaagttagtatagttattaagaagcccttctactttctgctccagttctacgaagttgagtgatttattgttaatcaccaccaccttcacagcgagtttttcttgtgtcattgtcagtaaatctcccaataacatcgttaaaccaccatcaccagaaatagagataatctgacgtttagggaaggctttctttagccctagtgcctgaggcattgcgttcgccattgtgccatgttttaagctggttaatgttcttctctgaccattagtattaatataacgcaataaccacaccaccggagaaccaccatctgccgtaaaaatagcatctgcatcagcatgtttatccaacaattgaactaaatattgaggatgaataatttttgattttgcgcccttatccagccaatttattttttccaatgtctttttatggaattcgacagatttgcgcaaaaaaccatcatcggttttcttttcaagaagtggaagcaactctaacaaagtttctttaacaccaccattaatccctaaatgaacagaatggcgtttccctatgttagctaaattaatatctacctgtatgatagtcgcctttttggggaaaaattgaggccaggcaaaatcagtacccaacaagagtaaaacattgcaattttttagcatagtaaaaccagactccataccaagcatgcctgtcattcccacattatagggattatcatattcaatgaaatcttttacgcgagaagtatgtgcaattggagcttgtagtttttcagcaagctgaagcagctcatctcttgcatctttactgcctatccctgcataaatgccaattttattacctttatttaataaaacagccagtgatttaatatcttctaaggcaggaatcacttgtggtggatgataattaacagtaatttttgatgtatattcaatctctgatttactaatattgacaggtaatataataacagccacccctttttgactcagtgcagcactaattgcattttttgtaatttcaatcgctttttctgggttgctaatttcttcacaaaacacagagcactcactataaacttttttaaaatctacatactgaggaaaagagctatcattcacgtatgttgctaactggcttgcgattagtattactggcgctccgttccgatgagattcatacaacccgttgatgaaatgtaagcttcccggtccacaagaaccagcacatgcactaatctgcccagaaatgaatgattcagcgcctgctgcaaagccaccaacttcctcgtgacgaacatggatccattcaatatcactggcatgaatagcatctgttacataattaagagtatcgccaacaataccatagcaatgtttcacaccggaattttgaaggatatcaacgataacactagcaatattttttttcataaaagtaacctagcaatcatataaatagtagataaaaatgttaaccacacttttatattggttgttaaccctataaaaacatgaaaataaaattccgtgaaaataaagtggcattcaataatgattttaacaagatattaatataaatagatttactttatgctttttctaaaaaagacacttatctatgatgacatcattccgatttttaatttaattaaaattaacaatttatgtactttaattcacataattgtatgtaaaatataatgtaacagatatttttcttttatataaaaagttccacctactcttaatagggggttattaaggagcaattatcaaatatataaaaagtctacgtgataattttttaaaataagccgggccctatccttttatctggaaacaagtacgtttattttaagaattttttgttgaattaacatt

SEQ ID NO: 405 - DNA, 9758 bp, Xenorhabdus sp.
  CDS (7851)..(8249)
gtttgctcacttgaaaaagcgttactggggtcagcatttttggggcagaggctatttttgtgcgacggtaggtcagttaccggaagagatgataaaggcctatctggcgcatcattttgaaccgaacccgaatgatcacttcaggctggataattgacgcatcgttcagtcgatgcgtatccggactttcagtccgttaatcactaacccaccgactttagtcggtggttgttgagttcgggttcccagtgcttgttatcccaatccttgccatgattatggtgagttgggtacgaagccagaaaaatattcaacagtgtcaggggcaattgatactgttgcagggcaataaagtacattggcaaaatgtaaggtgggaaatgactcagccgccgtggcttagccgttatggaatgatgctttcactgtgcgcgtttgagcaaccgaaaggttttcgtcataagtctgctgttcggttatgggtggcatcagacagtatgccaccgcaaatgtggcgctatctcaaccagctgatgcgtcaataccccgatacataaccaataaagaataactaaccttatacccagttcttatatccaatgtacttcggatattaaaatagcgcttccatctctgccaatatctgcatacaccactgactcagacgttcgtcagtctcttcgaactggttcacatcatccagagcaaggccgacaaactgtttgccatcatcagtcagtggttttggactggtgaattcatagccttcagttggccagaaaccaataaactgtgcgccagtaggcagcagatggtgatacagcattcccagcgcatccaaaaaccattcactgtaatcaatttgatcacccataccatacatggcaacaattttgcctgataaatccagtgatggaagttgatcccaaatagccagccagtcttcctgtatttcaccgaaatcccatgtaggcataccgagaattaagacggaatactcttccatcaattgagggtcacaatctttgacgttatgcaggtcaatcagatcttcaccaagaatatcgcgtattttttctgctaccatttcagtgtagcaagtggtagaaccgtaaaatagaccaattttcatcgttaattatcagtgaatttttaatatcagaagaggcattgtaacagaagaattgctttttcaggcataatagctgaccggaaggcacggatacaaaggagggcttgtgccaaaaaaacatgacttatcaaaaaatgatgtgccggaacaaagcccgttatctgatcctctgatagagcaatttttggatgcgatatggctggaaaaggatctggcagaaaatacacttgcttcttatcggctggatttacagtgtctgaataactggttagttcaagggggctatgatttactttctgttcagtccattgaattacaatcatttttggctgagcgggtagatggcggttataaagccagtagttcagcgcgtttgttaagtgcaatgcgcagattatttcagtatctttatcgtgaaaacattcgggcggatgatcctactgtacttttatctgctcctaaattacctaagcgcttgccgaaagatttaagcgaaaaacaggttgaaaatttactgaatacgccttcgagtgaccaaccgatagagttacgggataaggcaatgcttgaagtgctttatgcttgtggtttacgggtatccgaattagtcgggctgacattatcagatgtgagtttgcgtcagggagttgtcagaatagtggggaaagggaacaaagaaaggttagttcctttaggcgaagaagcactgtactggctggaacaatatcttgaatatggacgtccgtggctgctgaatggcatagtatccgatgtattttttcccagtaaacgcgggacacagatgactcgtcagaccttctggcaccggatcaagcattatgcagtattggctggcattgattcggaacgtttatctccccacgttttacgtcatgcttttgcaacacatttaattaatcatggcgctgacttacgggttgtgcagatgttactgggtcacagtgatctctccacaacgcagatttatactcatgtggcaactgagcgtctcaaggtgctgcaccaacaacatcatcctcgcggataactcatttataaatagcggttcaacgaacactatttttggagaaattgcgaagcaggatgaaaaaggaacaaaaaatgaaaaagattgcgttttgtctttccttaatacttactgcttttaccagtaatgcatttgctgataatagtatgattaatcagtcattatcaaatatgggcctcaaagcagaaagtattagcccatcagggattgctggtgtaagtagtgttttaactcagcatggaacgatttatctatccaacgatggccattatatgtttcagggcccgctttacgacattagcagcaaaattccaaagcaaattgtcaataaatctctggtggaaaaactggaagccctgaaaggtcagatgattatttataaagcaccgaaagaaaaatatgtcgtcacggtgtttacagatattacttgtggttattgccgtaagttgcatgaaaacatgaaggaatataatgacgaaggaattacggtccggtatctggcatttccgcgtcacggtctggaacaccagtcagctaaagatatgcaatcaatctggtgcagtgcgaaagctaacaaggcactggatgctgctttcaaaggggataaaatttcacctattgagagctgtaaaaaggatatcgccaagcattacgaactgggtttacagtttggcatcaatggaacgccggcaattgtactcaaggacggtactctgattagtggttttttaccgccaaaagatttagctaaagcattggcacagcatggtgaataatcaccagagtatcttgctgtaagcaaataatacgcggtgaattaaactcagtaatcattaaaatccagtgatgaattaatccagtgaatagaaaaacacaactccgccgccgtccagcggcggatgatagtctccttcctgatagtatccacccactattacgccgtctttatgtcacacgaggcatacgtcaggctgatgagttagaacgcggtgctaaagggttactcaattatcagtccctcagtggtatagacagggctgtttctctgcttgttgaagcattacagcaacattggcgcattgttattgttggtgattttgatgctgacggcgcgaccagtaccgcattaagcattcgggcgttacgtgcaatggggtatcgggatctggattactttgtgcctaaccgctttgaagatggctatggcttgagtgtgcaggttgtaaacgatgtcgtgaaaaaaggcgcagatctgatcatcaccgtggataatgggatctcttcccatgatggtgtcatggttgcacatcagcacgggcttaaagtgatcgtcacagatcaccatttgccgggagaaacattgccaaccgcagatgccattgttaacccgaatctgacggattgctccttcccttcaaaagcgctggcaggtgtcggtgtcgctttttatctgatgtcagctcttagggccgaattacgtaaaatagcctggtttgagcaacagggtattcctttgcccaatctggcggaactgcttgatctggttgctctgggaacagtggctgatgtggttccgcttgataccaataatcgcattttggtgtatcagggattgaatcggatccgtgccgggcgttgttgtgccggtatccgggcattgctggaaatttctaaacgggaagcagcaaaattatcagccagtgatttgggattttcccttgggccacggttaaatgccgcaggacggctggatgatatgtccgttggggtcacgctgttattaactgacgatatagttcaggcccggcagattgcctgtgaactggatgggctgaaccagacccggcgtgaaatcgagcaaggaatgcagcaggaagctttgcaaatttgtgaccagattgaacgcacgcataccgaattgccttatggactggctatttatcatcctgaatggcatcagggagtagtcggcattctggcatctcgcattaaagaacgctttcatcggccagtgattgcttttgctcctgccggtgatggcacactgaaaggctcgggccgttccatcaatgggctgcacatgcgcgatgcgcttgagcgccttgatactttatatcccggattaatgctgaaatttggtggtcatgcaatggctgccggattatcgttggagcaggataaatttgagttgttccagcgccatttctctaccttggtcgctgagtggctggatatagcacaactggaaggtgttgtctggagcgatggggagctgacactgggagaactctcactggagatcgcagaggttcttcgggatggcggcccttgggggcaggcattttctgagccggtatttgacggaaagttcaggctgttgcaacagcggattgttggtgaaaagcatctgaaagtcatgattgagccattaaacggagggccaatgctggatggtattgcttttaacattgacaccaagtactggcctgataatagtgttaaaacggtagaattggcttataaactcgatattaacgagtttcggggtaatcgtgatgttcagattttgatccagcacatctggccctgttaaataagccagagtgattgctcggattacatcgccgaaatgataagacaaagcctgaatccattgccacataatcaggtttgattatgtggcaaatcaattgaaatgctataaaccctgcatcagatccgttacaatgcacggttcgacaatatctatggtcatctttctataaaaaccatcgtttttataaaccacaacgtataagacacgaaatatgtttgaaattaatccggtaaaaaaccagattcagaacctgtctgagcggacagcagttctgagggggtatctttgactatgatgccaagaaagaacgtttagaagaagttaatgctgaattagagcagcctgatgtctggaatgagccagagcgggcacaggcgttaggcaaagaacgttcatcattggaaggcatcgttgaaacgattgatcagcttgaacagggactggaagatgtgagcggcttgctggagctggccgttgaagctgatgatgaagagactttcaatgaagcaatcgctgaattggaacaactggaagaaaaactgggtcagcttgaattccgccgtatgttctcaggcgagtatgacagtgcgaactgttatctggatctacaggctggctctggtggtacagaagcacaggactgggccagtatgctgatgcgtatgtatctgcgctgggccgattccaagggcttcaagactgaaattatcgaagaatctgatggtgatgtagccggtttgaaatccgctaccatcaaaatcatcggtgagtatgcttacggctggctgcgtactgaaacaggcgtacatcgcttggtacgtaaaagcccgtttgattccggtggtcgtcgccatacatcattcagctccgcctttatttaccctgaagttgatgatgacattgatattgaaatcaatcctgctgatttgcgtattgatgtatatcgtgcttctggtgctggtggtcagcatgtcaacaagaccgaatctgcagtgcgtattacccacgaaccgacaggcattgtcactcagtgtcagaatgatcgttctcagcataaaaacaaagatcaggcgatgaaacagttgaaagccaaactgtatgagctggaaatgcaaaagaaaaatgctgataaacaggtaatggaagagaacaaatcggatatcggctggggtagccaaattcgctcttatgttttagatgattcccgcattaaagacttgcgtacaggtgttgaaacccgtaatacgcaatctgtgttggatggtgatttggacaaattcattgaagcaagcttaaaagctggcctatgaggaactaaaatgtcgcaacaacagcagggggctgagcaggctcctgacttaaataacgaactgaaaacacgccgtgagaaactggttacactgcgtagcaacggtatcgcatttccgaatgattttcgtcgtgaaaacatttctgaagatctgcatgcaaaatacgatgataagacgcaggaagagctggaagcactgaatgttgaagtcactgttgctggtcgtatgatgacccgccgtatcatgggcaaggcttcttttgcgaccttgcaggatatgggcggtcgtattcagatctacgtttctcgtgatgatctgccggaaggcatctataacgagcagttcaaaaaatgggatttgggtgacattttaggtgcacgcggtaagttgtttaaaaccaaaacgggtgagctttctatccactgtagtgagttgcgtctgctgactaaagcactgcgcccattgccggataaattccacggtctggcggatcaggaaacgcgttatcgtcagcgttatctggatctgatctccaatgatgaatcgcgcaagacattccagatccgctcccgcgttatggctgcactgcgtaatttcatggtcagtaaagacttcatggaagtcgaaacgccaatgatgcaggctattcctggtggggcgagtgcacgtccattcactacccaccacaatgcgctggatatcgacatgtatctgcgtattgcaccagagctttatctgaaacgtctggtggtgggtggttttgaacgcgtgtttgaaatcaaccgcaacttccgtaacgaaggtatttctccgcgtcataacccagagttcaccatgatggaactctacatggcttatgcggattatcaggatctgatcgttctgactgaagaactgttccgtaccttgactcaggatgtgctgggaacgactttggtcaaatacggcgaacaagaattcgattttggcaaacctttcgtcaaaatgaccatgaaagaagcaatctgcaaatatcgcccggaaaccaacatggcggatctggatgatatggataaagcagtggctatcgctgaatctattggtattgaagttgataaaagctggggattgggccgtattcagtgcgaaatctttgaagaaaccgctgaaagccacttaatccagccaacattcattactgaatatccggcagaagtttctccgttggcacgtcgtaacgatgataatccattcattactgatcgttttgaattcttcattggcggacgtgaaattggtaacggtttctccgagctgaacgatgcagaagatcaggccgaacgttttgcagagcaagttcgtcagaaagacgaaggtgatgacgaagcgatgttctacgatgatgactacgtcactgcactggaacacggcatgccaccaacagcaggactgggcatcggtattgaccgtatggtgatgctgtttactgacagccataccatccgtgacgtgatcctgttcccggctatgcgtccgaataaataatcattttgattaaaacttataatacgccctgctcagttaaatgtgcagggcgtatttttatctataagataaattgatgtagtcgaattaaaattgaaccgctttgaattgataagcagttgctgatattcggtaagaagtatatatttatttttccatataaaaggttaaaaccaccgactttagtcggtcagctttagctgcgatactgtgttgcacgagaggtgcaatatggattacagatatggcagccacacggtatttcagattgagtatcattttgtgtgggtaacaaaatacaggcacaaagtgctaataggtgaagttggtttacgggtgagagagttagttcgtcagacctgtgaagcgttcgaaatcaggatagtagaaggggtcgtgagcaaagaccatgtacatatactggtgagttgtcctccgagcttagcgccctcagaaatcatgaggcgaataaagggaaggacagcaagtaagttgtttgaagagtttgctcacttgaaaaagcgttactggggtcagcatttttggggcagaggctatttttgtgcgacggtaggtcagttaccggaaaagatgataaaggcctatctggcgcatcattttgaaccgaacccgaatgatcacttcaggctggataattgacgcatcgtttagccgatgcgtatccggactttcagtccgttaatcactaacccaccgactttagtcggtggttgttgagttgatgaaatgtttttagagggttttgaatataatgtttattatcagatctgctatttaatagctctacaaatatgcagagctttatacacttcgtctttcaagttgcctctttgttggctgcactcgttcaccccagtcacatagttatctatgctcctggggattatctcccttgccgccgcgacgcatcttgaaatccattgtgtatatatattttgggctatctatttatgagccttttcctccagacgttgctcaatagcacgtatcacaaattcgcgtaatttctccacaccaagaaaacccactgcgccgccaagagcaggtgatacgctgacaggaataccaatcagctctagcccgctggagaatccccatgaaagtgctccacagagaagaggttcagcccagtggtttttgcgttccacaccatcataaatcagccgtccataacagatcatgatagccagcaatgcgccagatatctgtggccaggcatttctcaggtagtacataaggtcaatccataattcaggatattcttgcattattcgccccataatttatttccggtcgttcaatcacaatgcctgaattaaaattaactgggcagagattggatcccggtattcagtgataagttacatatttccataatagcgttagcaccggatatccacatttttatgaagttgtgccctgcataatacgaacttcatagtgatttttattgtgaagttctctcagataccttgatggtaccttgcccaatcagcactccaataatagtgagagtgctaccggcaagttgaatgagaccggggctatctcctacaaaagtctgtatcgctaatgcaaaaataggaacaaaattaaaaaagatggctgtttttcctgcgccacgaatagtaattgccatgttccagaatagataagcaacaacagaaccagcaagacccatataaaaatcagctaaatgactttcaaatggtgctgataataatatcgaaacgggtgattcaacagaaatcgcaatgatcgacaatatcagggaacctctaaaaactctcaatacaaaaaataagatcaattttgaactcaccaataactgaccttattgtgtatgactttttcttgcttgttcaggggaaaaaaacaaacgcatcactttttcatcacatctcgaaattaaaaagcatgaatacccgattttccgaaataaaccaaacgttgcaaatcatagcaggttgccttcatcgtcatcgcaaaattggctcgcagctggcctatcgtccgaataatttttcaccctctgagagagtgagccaaagatatgttctacgcgtgcccgagttttcgctatttcttattcggccttttggcagtgtgaaagggtctttagagcac

SEQ ID NO: 406 - DNA, 11434 bp, Xenorhabdus sp.
  CDS (6186)..(6584)
gtgctctaaagtagctctctcccgtcagatgcagaaaccgcagctaaggcaataagaagacattgggcggtggaaaatgagctgcattgggtattagatgtggcctttcgggaagataacatctcactcaaagaccctgatggggctgcgcaaatggcgctttttaaccgaattgcgttaaatgtgattaaacagaataccagtataaaggatagtcaagcggctaaacgccgaagagccacatggtctggggaattccgcagtcagcttatctttgattaaattaaagacaaagtggaatcccgccctgagtcatagagtgatctaaacttaatacttgtatttggtcttcgtgtcctctttggtatcgatttcctatagaatcaagtgttgaacaccctgctgatattaacccctgtttcttaccattcaatgttagatatatcatatatgacataaaattaccgtcctagtttctattcaaataatgttggtttgaacaccaatccagtagacgttaatttaacacattaaaagcagttgtaatggtaacatcaaaacaaaaaagatcgggctgaacttctttttgtcaactgtattacacgatattgcattgtagtaccgtgtaaggatagtttcttaactacattgtattataatgtaaatgttcctcatgatttctacgttgcaaaaacgctatagctataaaggacattatttttagaatacgactatacggaatatcaaaatcagagtacgtctcatctgaactaatacacattatcaattatataattcccaaaaccccggcctcagttacttctcctttcactaacttctccgtagcaccatcataataaatttcaccatccacaattagcagagaacgcggggcgattttagcggcatcatcaagattatgggacaccatcagtaaagtcagtttccgatctctgcatacctgatccagcaattccagcatctcattacgtaacgcaggatcaagcgcagaaaaaggttcatccagcaataaaataggctgctgacgcactaaacagcgcgccagtgccgcccgctggcgttgcccaccagaaagctgggcaggcaggcggttcagatattccgtcagtgatacctgcgatgcaatttgttgcagtgtttgctgctgttgaacacttaatttaagtccggggtgtaaacccagaccgatattttgctcaatggttaaatgggaaaacagattattttcctgaaacagcatggataccgggcgattggaaggggatgtattggtatgattttccccattcagccggatatcaccgcgttctgcgaactgaaaaccggcgattaaacttaataatgtacttttacccgccccactcgggccgaggatagcaatgcgctcgcccgcctcaatactgacgttgaaatgcatggaaatttgttcataggtataagtcacattttcaagtttaatcatggcgtcggcccggtaagcgttcaagcacgctgaacaaaataaaacagaggaacaaaagcaggaaagcagttactgcgccatcctgactgcggtatgctccgatttgctgatagagatagaaaggcagggtacggaaattttcgtcaccaaataacgccacaatgccaaaatccccgattgacagcacactggcaaaagctaatgcctgcgccagcgggattttcagggctttaagttcaatccagcgcaggcgattgaatcccttaatattcagcgagtggcataacgggttgtagcgcactgccagatcgcgcattgggttatccagtacttttaacgcataaggaattgctattaaggcattggtcaggataaccagcccgtaaggagaatcgggtaacccgatggtattattcagtaaaatgaaaaagccagttgcaagcacaatacccggcatcgccagaatcagtaagccactgctttccagagcctgtccccagcgcgataaatgacgcaggtataattcgcggctgctccataacagcatcatcgtcaggaagatacacaataaccccgctcccagtgcaataacaatggaagttgtgaacgcctgccataattcgggtttactgagaacatctaacactgcgctgttcagcccatccatgatgaccgccagtaatggcgggagcagaagcagtaatgcgagagtgataagcaatccatcacataactttttcggccaggaatcctgtgggttacgccattgttgctgatgcccataaccgaccgaaagtatgcctttaagcttttggctcagtaacaccagaccaagacagcaaaagagctggataagtgcgagcagagcggcctgacccagatcgtagtcatacttgatagcctgataaatagagagctcaatcgtagttgcagaagggccgccgcctaatgttaatacagtggcaaagctggcgaagcacagcatgaaaatcagtgcgcctgttggcaaaatctggcggcgcaggtaaggccattcgacaaaacgaaaatgttgccactcattcataccaagctgagctgcaagctgccgttgttctattgcaatattttccagtgactggagtaataagcgtgtagccatcggcatattgaagaaaatatgagccagtaaaataccctgaagaccgtaaggcgtgaaatggtattcaattcctatccactggcaaagactggccagccagccaacacgtccgtaaacagtcagtatgccaaacagagcgactaaaaccggcagaaccagtgtcatggcacacaggcgtaggaaaagcgttttgcccggaaagcggcgacgatagagcgctctggccagaaatatggcgggtatcaccgagaataaggcggataaaaatgcctgccagaaagtaaaacgaatcacatgccataaatagctgtcattcagaaagacctgccagtgactttcaggcgcataaaaccacagagcgccaaaagcggaaagcgcaatgaggagcaacaggccggaggcaatcacccccggcaataaccaacccgcgattaacggcttacagcactttgccatgtacggatccattgtgtacggtgttttgctacttcatctgcgttgaattgcagtgatttctctggcacaggcagttgtttgaacacttctggcagaggaatatcagtaacaggatacatccactgcgtggtcggaagaacttgctggaatgctggggagagcatgaattgcatgaatttctgagccagttcaggctgcttgcttgaagccagctgtgcagcaacttcaacctgtaaatagtgcccctcatcgaatatggctgcggcgtaattatcctttttctcagacatgatgtgatagcccggtgaggtggtataactgagcaccatatcgccttctcctttcaggaataacccgtaagcctcactccagcctttagttaccgtcagcgtttttttggcaatgttctgccactcttgtgcggccttatcaccatagagttcctgtatccagagtaaaaagcctaagccgggggtactggtgcgcggatcctgataaataatcttccagttctgctggctgttaatgagttcagccatgttttttgggggattaggcagggtgtttttattgtaaataaaagcaaaataaccgtaatcgtagggaataaaagtactgttattccatgtgaaaggcagttttaattttgtggtatcaatgctgacaggggtgaataaccctgtctgttgggcagactgaatcaggttattatctaaacccagcacgatatcagcctgagttttcttaccttccattcttatacggttcagtaaagaaacaccatcttccagcgcaacgagttttaattcacagtcacactcggattcaaaagcttttttaatagccgggcctgctccccactcggaggcaaacgaatcataagtataaacagtcagtgtaggcttagcctgtgctgcctgagcaaaggcacatgctgaaaccgataatgcactgattgcgataaaccgggaaaataaacgcttaaacactttgctctcctgtcgttattaatagtaattgttaatagtggttattaataatcgttattagcactcataattaaataagtgaccagcagattggtaaaggatttgagaaagtgtctgataaaatgactgctatatatcaatgactgttatatatcaatgaatagtggctcaaatccctacgccggtaccaaccggatcaggttctacgggtttgctctcagcgatgttgtccgacaacactcgcaccccgttgagatgaccgtattgtagaggctaaagcagtgactgcaaagcctcattaatatatctgtcatctttctgactattttttctgatttattggctgtgctcacattcctgctatcgttttataaataggtggggatccgcgttccaaaggggtgtttcctgaccgccgggatgcaattctaaatccattgggtatagaggtttaccgcttgaggggagtgtgaaacaattagctatcttttcaaattcgttttatcgagaggtagtctggtgatcgatgatgatggctaccgcccgaatgtaggaattgtaatttgtaatcgtcaggggcaggttctgtgggcccgccgttatggacagcattcatggcagttcccccagggaggtatcaatccgggagaatcgccagagcaagcgatgtatcgtgagttgttcgaagaagttggtttaagtcgcaaagatgtacgggttttagcctccacccgtagctggttgcgttacaaattacccaaacgtttggtgcgttgggatacaaagcccgtttgtatagggcaaaagcaacgctggtttttattgcagctgctttgcagtgaaaaagagattaatgtgcagcgcagtagtacaccagaatttgatggttggcggtgggtgagttattggtaccctgtcaggcaggttgtttcctttaaacgggatgtgtatcgccgtgtgatgaaagagttttcctccatcgtgatgccagtacaggaatcagcgccacaaccctactcagcctattatcgtcgtagaagaagttaggtaattgttatgctcatgcgcttacgggaaattgttgaaaaggttgcgatggcaacgaatttatcggaagcgcttgagctgttagttaatgaaacctgcttagcaatgaacacggatgtttgttctatttatctggccgatcatcagcgccagcgttattacctgatggcaacccgggggttgaagaaaccgggaaagcgcacggtcagcctctcctttgacgaaggtgttgtgggtgaagtcgggcgcttgtcagagttaatcaaccttgctgatgtacgtgatcaccccagcttcaaatatattcctcaggtaaaagaagaaaatctccgggcctttttaggtgttccgatcatctaccgccgccaattgcaggggattctggtcgttcagcaaaatgagcggcgatcgtttgatgaaagtgaagagtcctttatggtgactcttgccatgcaattggccgcgatccttgctcaggcccaggttcgtggattaacaagtcagtattgtcagacccacatcaaagcactggcggtctctcaggggattgctatggctcagggctggcaggattgttcccagccatcacttgagcaggtatctgaagcgttaacactcgactatcaggcagaacgttcccgcctgacccgtgcgcttgagcaggcaacagcagagtgtcgccggataagtaaacgctttaccgccagctcgcagaaagaaagtgccgctatttttgatctctattcccacttactgaatgacccgaaacttaaacaggatctgtttcactcggttgataatggttttattgcagagtgggcggtaaaaagtgttgtggagaaatatgcggaacaatttgccaatcttcaggatgcctatatgcgggaaagggcttctgatttacgagcgctcgggcagcggttgctctttcatctggacgatgattttactggcaatagccagtggccagagcgttttatttttccatatgaaaggttaaaaccaccgactttagtcggtcagctttagctgcgatactgtgttgcacgagaggtgcaatatggattacagatatggcagccacacggtatttcagattgagtatcattttgtgtgggtaacaaaatacagacacaaagtgctcacaggtgaagttggcttacgggtgagagagctagttcgtcagacctgtgaagcgtttgaaatcaggatagtagaaggggtcgtgagcaaagaccatgtgcatatactggtgagttgtcctccgagcttagcgccctcagaaatcatgaggcgaataaagggaaggacagcaagtaagttgtttgaagagtttgctcacttgaaaaagcgttactggggtcagcatttttggggcagaggctatttttgtgcgacggtaggtcagttaacggaagagatgataaaggcctatctggcgcatcattttgaaccgaacccgaatgatcacttcaggctggataattgacgcatcgttcagtcgatgcgtatccggactttcagtccgttaatcactaacccaccgactttagtcggtggttgttgagtttttgtaataagctggtcggtaaggcgcaaagatagtttctcatcaagatcatcatcagaatgtgctggctcaaagtagatcttgttttttaacccgatatgactattttctttcgcaatatttctgcttccaccttgctgtaactgagtaatagtcgatttgggtaaattgtaggcagaaaggaagctatatatgaattcatcctgattaagcgaaaatacaatttcttcaagtgtatcaaaaatttttgtttggttaactgccatctgatccctctaaattcataatcaaaacgcctatatgtgattgaatttcaatccctccatagctatcagctacagtcaaagactattttttgttagtaatccgtgttgtctgacaaaatgccaaggttctgtggaaatgagttgtatggccgctagtgcagcaaggtagtaacttaaaaagtaaataatttcagcactgatattcctgttatcgaaccgtgaaacaccgcagcaatacacagggctgcaattatcaattgcatcactgtagcaaccccaaggtatagatctcaatatcttttttagcataaggtgattattacgcagcactaaaaaaatgcaacgtcacagccatgtcatccacttgtcgctgatttgtgtatgctcctgaaactcaataacctgtcggcgcaatagtagattaccggtgaacttaaaatggtccctgaaatagtgcttattttccagagaatatacacgcatattggtcgcagcatccgttgctacccgagcttctgatattgcaggcactgatagaatatagatagatttcccgcccaatacactacaaaagctttatcaaaattagatttattttatcatcaagttaaaataaaaaagccgtgagatttaaaaatggtcaattcgtctaccatttcacactcagggcttaatattaaaaatcatcattttcactaaatcgaacacaaattgaagcggattattcctgtgttttattgcgggccttacgctcaactaatcgaccataactatcaaaataccgactcggccagatttcagaagggtggattcccagatagttagcaattatccattcacctttaggccaaggcctactgaatgcatttgccagtgtagatgaactaagtcccgcttcacgagaaacagccgctaaggttgttccacgtttacgtaatgctgcgatgatatcggcctgatgccagtcagttctaatgttgttattcattcctgctaccccttccattaattaatattggtggtggcgattcagacagggttcgcagtaccggtggtgtccaaccggcgaggccgaagcctcccctgcctgaatcaccattgaaagggtgatagcagacgcactggtagaaacatcctaccagtgggacaccatatttcgaggctgcgaaacctcaccactagattttgctaatggcgggaatactttaactgattgttttatctaactcaataaccgaatggctaagttgaacgactataaacccgttcaacgtaacgcccacgaccatcaccatgacccatatccattgaaaccagcgctcttgcttcctgatgactaaaaccattttgttggtaaaaattaagcgcatcctgcgcccacgcatagcgcaaactatggggagaatggcagccgattaaaccaatctttgtggtatgtgcccgccagtagttcatggcctgccggagatcgggtttatcaatcaacctgccgccacgttgttctgcaataacaatcgcctgttcgacagcctttttcaccgctgcaatatccagtacgcgggtttgccttgcccggccgccttttgtgccgaaaataatttgaagttttggttctggttgatttaattgtttgcgccaacttttcagtgaagcactgcattgcaccgcttcctgagaacgtagccccagcaaacgggcaagttccagtgtgacggcaaacccaatatcacgctcaagagccttctgataaacaacctgaaatgtagcatcagggattgcttgttttgttccggcgcggctggttccgcttaatcccaatgcctgattgctcaaacgcggcgaggtttccagtttttcccggcctgccatgcggaagatattacgcagtgcggatatttcattttgtactgttcgtttggcaatcccctgagataaacgagtatcaacgtactgctctacatgtttggctttcaaattcttaaggcttttcacctgaatattcaggctcaataacaacgcacccaaacgcccggcgatccgaatgcgatcatgacaggttttatgactaccgccgccttgtcgggcaaaaaactttaattctttaatcaatcgactcattggcttccccttgcggatgtttgacaacatgcgatctctggcgcgcgaccattctggcaaaacagaaaataactgccttgcccttgatcgatatctgtgcgccagagtgaacgcaggttgaggtattgcggggtatcggttgagtacacggtactgccgcctgcataagcaggtcatccccaccggcaaaaaagccagcctcgatatcgtcaagttctcctttttcaatctaaaaatgcagtgtcagattcactgcgtggtgaagcaggcgtgagcctgtcaggattcgattgttctttggctgcggcgtcactttcagcggtaaaccggcaaaaagtgacgccttgagttccgctaacggtcagcaaaagtcgtacaagcgttgaaatgcccacaggtacgacaaaacgccgcaaggtttggtgtcaaacgggtgcaatgagttaattgtttgggcgtggaaaaattgtttgctgaatatttcaaacagaaatagtgagaaatatgaactggacggacggaaaccatcctgttgttcattgaagataaatgaaaataggggttatgttgatttgaaacgtcagtgcattaatcaatatccaacacacttcgattcggtggcaatataaaaacaccttttggggtgtatttttagtttaaaaaaccttcatcaccagacaaggggtttatgtctgacaatatctgcttccaaaggtgtgcagatgtaccgcagttttgctctccctttcaggctacgggagtttttttgccattacagctatgtgaccatctgtgatggtcggtaatttggttcagactagctgatttattaaatatcctcaaccaatatttatgctgcctccaccgataacaacaccaccacaatcaaccgtatcacccgttctggcagccggtttcccctcaataaaaactgatcccgatccgcttgctatcgtccgagaatgggatgaatgtgattgcagagcatctccctgccgagcgagataaacaccatcaactttgacgctactggcaccagcaataacgggtgttgccggacaatcaccatgttttgtgccaatatcaccgattttgactgcatttcccatattgtttttctccatggatattagaaaatggaaacatatttgcaagttcccaaggaagtagtgacattcagttaaatgttattaataaatttattagccctatactagccgggagtaccatcatcaacaagactggataagattgatttatcaaaattatcaatgtcaaaactatcttctctgatcactttattaagaattccttctatagagcctgtgtcagtgattttctcggaaagcaggtgatcatagaaaaaagctaaaaatggcatggaattgacgatacttatgctttttctcagctctgccaattcagatagcaaaatcgaataaagtttttgtaaatatttttctttttgctttattcctattaactcatactgttcttcgctgattttgaaaatcttatatcttcctttggcattatcagggtatttttctctaatttttaggaaattatcttctttatattcactttggtaatctgtcgctactttttgaataggtcctaaaaaacaatgaatttcccagtcactcagtacatcaaaaaaatcccagatattacgcggatcgtaaaaacggaaaaatacaggtttatcctgctgaggaagcaatacttgcaggtatttacgtaaatgttgtcgaacggttttcatgtttgcttcgctgtgaacgaagattccccacggtgttctgcggcactccagccaaattttaactttttcattgacctgaaccagataaggcgcaattttaactaattctggctgaagaggttcaccatagaggcaggtggaggggggatcataatgttcaagcatcaaaaataagtcgggttctgctgcaccgtcaataatagcgtaaagggtttcttggctcattcttgattctccttatctttcattgggcagtgggcgacgaacattgaaccttcacttgccgctgcaagtagaatggcggggttagcgggtgccagtaaatcaccgggactaccaccggaattcagattaatagctatgcctttgatatcaatgccgccgccatgaagcacaataaaactcccgccaacacgcctgtctttcatacacaaatcccccgataaaaaatcgggggattttttgaatctttttccactttaccgatctgagtaataacgatttcattgaggtacggtaaaatgttccaaactcacgcagaacaatgggctgatgaaactttttctcgcgcaaatttgggcgatagtcggcgtacaaaa

SEQ ID NO: 407 - DNA, 14442 bp, Xenorhabdus sp.; identical to SEQ ID NO: 237
  CDS (4372)..(4809)

SEQ ID NO: 408 - DNA, 18187 bp, Xenorhabdus sp.
  CDS (8143)..(8541)
tttcatcactaagattggcaataaccaataaagtctgatcctgccagcgtcgcagataacaccacagagaagggtgctcaggtaaaagatccagataatcaccataagtcagtatgggctgtgtttttcttaactgaattaaatcctgatagcagtagaatacagaatctttgtcctgtaatacggattctgcattgatttcacgataattatcgctggtcgctatccacggagtaccagaggtaaacccagcattgtcagtgttatcccactgcattggcgttcggctattatcacgggatttttgcgccagaattgtcagtatttcttctgaagacataccttgttcgatgcgttcctgatacatattcaggctttcaatatcccgatattcttcaatgcgcttaaagtgaggattggtcatcccaagctcttcaccttgatagatataaggtgttccctgcattccgtgcagcaccattgctaacattttggcagatgttttatggtgttgtttttcatccccgaatcgggacacaatgcggggttgatcgtgattacaccagaaaagagcattccatgctttctgatgcatcccttgctgccagactgagaagatctttttcagttcaatgtaatctggtttcgcatgtgtccatttttccccattcgggtaatcaactttcaggtgatgaaaattgaatgtcatggagagtgtattcccacttaacgcgctataacggacacaatgctcaaggcttgtagaagacatttcaccgacagtcattaacgctttaggctggaaaacatcacggctcatttcctgcaagaactcgtgtatacgtgggccatcggtataaaaacgccgcccatcaccacgatcatcatcaggatagtcctgctgttttgagacaagattaatgacatccagccgcagtccatcaacgccgcggtcagcccagaattcacagacttttttcagttcagagcgaacgggttcatgttcccagttcagatcagcctgttcgacggcaaaaaggtggaggtaatactgttggctcgctgcatgccattgccacgcgttgccgccaaacttggatttccagttattagggggattatcctgcccaccaccctctttccagatgtaaaactgacggtaagggctatttgcgtcctgcgcggctttaaaccacggatgttccgttgaagtatggttgaaaaccatatctaaaatgatgcgaatgccacggcgatgggcattctccaccaaattatcaaaatcttccatcgtgccatattcaggattaattgcgcagtagtcggcaacatcataaccattatccacctgtggagatggataaatcggagtaatccagatagcacctactccgaggtgctgtaaataatccagacgttgggtgatcccgttaatatcaccagtaccatttcctgtactatcctgaaaactctttggataaatctggtagatagcgctgtctaaccaccacggttgttgttcagtcataacaataccttataaaactatatcctattaactcgcagcttcattattgatcaattctgctttgcgttcgttcctgcgatacatcagaacagttagtgccattggtacaataattacaatcagcatagcgagaaggtagatcacccagaattgaggtttgatggacagaatacccggtatacctcccacgccgataccattggaagtcacgtggtttagcccgcatagcaaacccgccagactcgtaccaatcattgcgcagaacatcgggtaacggtatttcaggttaataccatacatggccggttcagtaacgccgaggtaggctgaaattgccgcaggaacggaaagctcccgctcattttgttttttacttgcccagatgatgccgataacagcggaaccctgagcaatattagataaggcaataatcggccagataggggttccgcccgtgctttggatcatttgcaggtcaatcgccagcgtcgtctgatgtacaccggtaatcaccagaggagcatagaagaagccaaataaggcagcaccgattggtgcaaaactgccggtcatcagccctttgacgcaccaggccacaccatcaccgattgaacgcccaatcgggccgatgattgcatgagcgaggaaaacggccagcagcagggaaacaaccggaacaaccaccagataaagataatccggcaccagtttcttcaggcgtatttcaatccagcctaaggctaacccagccatcagagaaggaataacctgtgcctgataacctactttggagatggtaaaccaaccgaaattccagacttccgggatttgttgcccaagttgataggcattcattaattgtggggagactaacgtgatccccagaataatccccagaatgggcgttccacccatttttttaacggcagaccagcagatcccgacagggagatagaaaaatatggcttcaccgataagccagaggaaatcatagatggtttgccagattggatatatatcggagagaggttttccgtcgctaaatggaatgccgccgatcagatttcgaagacctaatatcagaccaccgctgataagggctggcaataatgggaagaagatctcagcaaaatgtgaaatagcattttcataccatttcatattttgtcgtgcagcctgtttaacctcttctttgtttgcggactgctttccggttgcggcaagcagagctttataataaatatcgacatttgttccgatgacgacctgaaattgcccggcgttagtgaaacagccttttaccattggtaactcttcaatggccttagcatcagcgttttccggggtattaagaacaaatctgagcctggtgatacagtgggttacggaggcaatattctcctgtcctccaactaatctaataagattatcaacatccttttgatttattgattttttcttcatgccttttctcctttctatggcaggagtagtgaataacggaaattggtactaacagaatgattacttttatgatgagataattcatagagtgaagtaataacccgcccatcctagtcagatttcagaattttgaatatgaaaagatacgttgtttgagttttggatcacattttattctactaaattgaaaatataataattttcatattacttaaatttattgtttcagtaattttaatttaccgaaggattaatgcgtttgatttatgagttttgtcgttttcatatatattttttattaattatcaaatgaaatttaatattctgattttactggtatgaaaacccgtttcactggaaggaatataagtcaaacgggctgttggttatttatttcggtattgtttatggattcattccatcataaggtattataaaaaaagattcgcactctttagtgttacaccctaggtaaataattttttcatcattggtaaatgtggttatgccaccaccattgatatgaaagttccataatttcagaacaaatgttttatgatgaacaatgagttctgataatattcattaccttttcattttcttcaataaatgaaaatgaaccactatgttctaggaattgtaatgaaatattttcatgaaaaaaatcaagctgtaataatggatagagagctctatcgaatcgaccagcaatgacgtgtgtaggtattgatatttcttttaacctagggcgaaaatcagggatcattaaaatttgaccgccaatattaaaatctacatcttcaccacaaaaaattggatataactcaatatttctagctccagattccgtagatattttttcggagttcttggggtcgaagaatcggattaatgaagctccttttgcaaagagagattgcatttctggtgatgttgaagcatatccatttcgacgaagttgggatatttcactccatacgtctggtaattgattttcaatgattttatttatgttttcgtgattcttttgccacatgtaaggactatgcaggctattacataatagcaaggattttattaattttggataatccaaagcaagttttaaacttattaaaccaccatatgagaaaccaaaaacatgtgctccatctggacataacttgttaattacatatgcaacatcaagtacatcctcttcaaaagttatttcggaaagagattctggttgatcagatttccctcttccgaaaagatctaagtatataacacgaaattcagtatgtagtatatcaaagtgaggatgaaatattacatgcgaaccggcaggtccaagtcctgatagaagaattaggggttctccactacctgcttcttcaacccaaagcctttttcctctaatattatggaatgcgcctggggcatgctgaaaacatattgtgtttgtcatattatctccgagtttgttacgaaaacattcatttctatttgtcgaattttttctatatccatctgtatttgaagtggatcatcactcataagaacaataaaccctaactctaaagttgaaaataaatcttgtgtagctgggaccagttgtctatcattaattttaatattagattcaagatgactaggtaatttattaatatagtctagtttttttacattttttacgacagatgactgcattgcatgtaaaaaaacaatagtcatatttttaagtaaattatattttttaggtggaagttcttttctggcaaaaaaacgggcagagcgatgtatttgactgtcgcctgtggcaataaagcagaaccgcggatgaccgccaccatgtggtctagctccaatctcaattagtcttgggccttcttttgtgagcataatctctatatgagagttaccaaacacaacacccagagcaccaagaaccttttcagcatatgcagtaagaatttcaactatattttcatctggtgatacccattccatttggtcataaattgccattccattagcattattcagcttagtgtatttgcaaatactacaaatagtgtgaatgctattataactgaaagtatctactacatattctgttccatataaatattcttgaactataactctatcattaataatacctagtctattatatttatttagtaaatcataaaatgatttttcaagtccttctccataatggattttttttactccgtctgtactggcacttttagggggtttaataactaaatctttatgagttagcttacaactatgtaaccactgctctacttcagcaaaatcacttgagcaaatttgtttcatcattggtataccagcatcaataactgctttagccatcagccctttatcacgtctggctaaggcaagttccttaatgttagtgtatttaggaacaataagtggaataagtttttcagccaactcaactccagattcacagcctgtcaatatacaaagaggattatatttacgtaattgtgatattaattcttctaaatgttcaaaatttgcaatatagattttgtcaaaatcttctggttggtaagaagatgcatacacatccggaggtttaggggtagattgtacagagataactttacaatttaattgattaaaaatagcagcaaactgatttcctgaggagtatggatcaataataattacataattatttgtattcatcttgataacctttcgttcttcaatatcatttgtattttcatacaataacgatcccaagcatcttgaacatttttgcttaaagctctagcacggatcgctgaatgtacaagacccggctcaatgattaattctacatcgataccatttgaatttagtttatttgtatactcttgagcatcaataactaaaggatctttttctgcccccattatataagcagtagggagttcgtgaaactcaccatagataaggggtgatatataagggtgtgaaataatactaggatcagaaacgtaacatgcggtataaaattccatttctcctcctgtaaggagaggggcatcatttccgccatttctccatcgggtaaaatccaatacagggctaattaaagcttgaccaacaaatttgggaccatttctatcacgacacatcatcgcaataactacagccatattagctccagagctatctccagcaattattatattatttggatttatccccagagatgatgcatttttttgagcatatatcacagcgttataacaatcctccaaagaatgaggaaatggattttctggagctaatctaaaatcaacagccatgactcttacttgtgtttttgaagctatttcagctgtaacactatgatgcgaatctaacgagcccacaacaaatccgccaccacgaatataaattattaatccgtcattatctatatgtagtggttcataaatacgaaatttcaaatattttccatcagtacttatattatattgactccacttaatatctttaggaattttgtagggaaattcacttgctagcttttgatataaattacgttgttcttgtaatggaaatgtataaaaattaggaggcattacagaattacaacgttcaataaattctttaataccagtagcataattagacataataatttcctttcgttatttttcgagagattttgagctaaattttgcatagggttggcgtagatcggctaaaattcctcttcgaataagtggaatcaaacaaagaatagtaccaattcctccagtccataatgtccattcaagaccaatatatttaatgattaatgaggtgagtagactgcctaatggaattgcgccccatatcataaatcgttggacagagtttaccctccctaaaagctctgttggtgtatcagtttgccttaaagtaagggatgtagggccaaaaactccttcacctaagccatgaagtatacttgcggcaataagaccagctaaagagcccacagctccagatactgcaataaggaataatcctgagacagatattgttgtcgcaataaccaaagtgtgagaaatcccaaagtaattgactaacttaggtgataataaatttgcaattggaaaaccagctgctgcggcaccaataacgatcccaataccaactggagaaagatgtaatatatctttacaatataaaactaagcttgtttcaataatcgttaaaaaaagaacataaattgcgccacagaaaaaaacaggctctaacttaggatggctgaaaacaaattttaagcctagtttaatttctgttatcagaggtaaacgtttatgtatgcctgaggaaattgatttattgttgctatttctaattccaccaagtgttaatgctgatatcaaaaaagatattccattcagtaagaccgctactggtaaggaaaaaagggttatgatagagcctgctgcaactggccctaatgtccgtgctattgattctgagaaaaatagttttgcattacctttctgtaattctgtttttccttggtaaatttctggtagaaatgaactatatgcaacttggaaaatctctgtagctaaaccggcaaaaaatactaatcccatcaaaattggaaaggaaattaggccacccatagcaagaacagcaatgagaatataaatcaccatttgtataatatccataaatatcattgtattacgcttgggtaatctatcaactagagctcctattggaaggccaaatagtaaaaaaggcataaacattaaaaaaggtaataatgctgcctcagcagcagatgcaccaacgatctgtactgctaataatggaagggaaattactaaaaattgattaccgataagactgaaagactggcctgcccatagtaggttaaagtatctatgcttatttagttgttgttgctttaaattttttttaatcataaagctcacccttgaatattaaattaatatttttgtgtctttcaacttgcttctttgataatgcgcgtacactccagtcacatagttgttcatgctcctggagttttatttttccatataaaaggttaaaaccaccgactttagtcggtcagctttagctgcgatactgtgttgcacgagaggtgcaatatggattacagatatggcagccacacggtatttcagattgagtatcattttgtgtgggtaacaaaatacaggcgcaaagtgctaacaggtgaagttggtttacgggtgagagagttagttcgtcagacctgtgaagcgttcgaaatcaggatagtagaaggggtcgtgagcaaagaccatgtacatatactggtgagttgtcctccgagcttagcgccctcagaaatcatgaggcgaataaagggaaggacagcaagtaagttgtttgaagagtttgctcacttgaaaaagcgttactggggtcagcatttttggggcagaggctatttttgtgcgacggtaggtcagttaacggaagagatgataaaggcctatctggcgcatcattttgaaccgaacccgaatgatcacttcaggctggataattgacgcatcgtttagccgatgcgtatccggactttcagtccgttaatcactaacccaccgactttagtcggtggttgttgagtcaccaaatatatagataattgcattctgtaaattttaactatctattgatattaaataaagcaaaccaacttgtgcctagttgactactgatcaaaccttgcgagcatagctagccggatgaaaacgtaaaccccgctcaaccgaagcaatatgtaggtttgtgttatctggataaaatggcaaatttcacgcattatactctccccctttcaggattcagccaactgactgcaacttgaaagtaacagctataccccatgtgttgcgtgttgcattgcggtgataaggaaacgaattttcccagtcagcaagaggcagcttgaaaaacaacgggtatatatgtcggattaaatcaggattaaggatctcataatgtcagataccacctttcaaaaaacattcactctgtacggtatcaaaaattgcgatactgtgaaaaaagcacgtcgttggttggaagatcaagagatcccatatcaattccatgactatcgcgctgacggcttatcacctgatctacttcagctatttattgaacagttaggctgggaatctttactcaatacccgcggaacaacctggcgcaaattaaccgatgagcaaaaatcagccatcaataatgccgaagcagccaaggctctgatgctggaacaacccgctatcattaaacgaccactattagcgtctcaagaagaaaacacatcgcaaaaaacaggcagttacttactgggcttcaaagctgaacagtaccaacagtttttttcacgagattctatccaatagtttctaaaagaaagctgacaaaactacagcttgaaaactgtagggaatttctcttacaaatatccccggtaaatttcaggctgcgtcggagctgccaaaaaacgtagccacaaaaacgcagcctgaaagatgacaggcagaaagatcttccaacttaataggggcgtatataatgacttgtccagtaattgaattaacccagcaattaattaaaaggccttccgtcagccccgatgatcagggctgtcaggagattatgatccaacgcctgcaaaacgctggctttaccattgaacggatgccttttggtgataccctgaatttctgggcctaccatggaacaggagctacgtttgctctggcaggccatactgatattgtcccagcgggtgatatttcagaatggcaaagcccgccatttgaaccaactattcgtgatggcatgttatatggtcgcggtgctgcggatatgaaaggatctctggctgctatggtggttgcagcagaacgctttgttgcagaaaaccctaatcatcagggtcgccttgctttcttaattacttccgatgaggaagcccacgcaataaacggtactgttaaggtcgttgaagccttaatggcccgccatgagcgactggattactgtctggtgggtgaaccctccagccagaagcgccttggcgatatgatcaagaatggtcgtcggggctctctgacggcaactgtaaccatcaatggtattcaggggcatgttgcttatcctcaatttgctgataatccaattcatagttcactccccttcctacaggaactcgtcaatactaaatgggatgatggtaatgagtttttccctgcaacgagtatgcaaatagtcaatattaatgcgggtacgggaagtaataacgtcataccaggtaaattaaaagttcagtttaacttccgtttcagtaccgaactgaccgataccgagatccgccagcgagttgaaagcatgttgaagaaatataatctgaaacatgatattgagtggtggttatccggtcagcccttcctgacctgcaaaggggagctggttgatgcaacaattgaagctatcagccattattgtggatacaagccggaactatcaaccagcggcggtacatctgacgggcgatttattgccagaaccggggctcaggttgtagagttggggcctattaacgcaaccattcataaaaccaatgagtgtgtcagcgtctctgacctacaggaattaagccttatttatcagcgtatcatggagcaattatcaaatgatgtcgcctgaaatgttgacgggtctctcgacagaacacctaatggcactgtcgggaggccaccatttacaatttgatgcaactaaagccttccttgcgatgcaacgggatgcggccaatgctggctttaaattacaaccagccagctcatttcgtgatttttcccgccaacaggccatctggaatgagaaatatcgtgggcaacgtccggtactggatgccgatagtcagcctcttgatatcagcgaaatgaccgaaggagaaatctgtgaagccattctccgctggtctgccctgccgggagcaagccgccaccattggggaacagaactggatatctatgatcctttcctgttgcctcagggtaaaaagctactgctggagccatgggaatatgaagcgggtggttattttgagccattaactaactggttaaccgaaaatatgtcccgctatgacttctatcgtccatttacccgtgactgtgcactgggtgtagcctatgaaccgtggcatatcagctattggcctctttctcatgaagcagaatgtctattcaatgagcagactttgttaaatgcatggcagggtcgtgatattgccggtattgactggctgacagctaacctttcctatgtttttaaaaaatatgttaaaacagaaggataatcatgcactggttaacagattattggtggatagtcctgctgttactcgctggggttattattaacgcgataaaagaactcagccgcctcaatcctaaaaaatttttggataacaaaccgaaacttcctcctcatcgggatcttaatgcttcatgggatgatgaggacgactggcctcaggcgaatggtaaaaagagtgatcatcaaaaggatgatcagaagaaataacccaatcgttccattgtctggcaagtatttcatcaatatttgccagagcatgggccgtttcttcccgccagcatttcaacaatgctttacgcccattcagtgataattcatacgcacattgctcaatctctattttctgttgaagatgttttctcaacgccggtaaagccagatcacttgccaacagcaaacgttgcaacgcaaagtaagaagacgacaaggaacgatgagcaaatgcaaaaccagccagctcccgccagtcattttcattgagctgatgatcatcattatgctcaacaggcagcgcaaacccagtcaacgactttagccaacttgcatcacgggataactgctgctgtgcagctcgggccaaccattccccctgttcactcaagggcagaatcgccatcgcagtataacaaccactactcgcttcaaggtgtgttcccatccgcactaactgaaaaccgcatttttgccaaagtgaccagagtttagcggtataaccaaaactgacggaaatgaagtccagctttttgattcgggctacctgacactgctgagtaatcagacgttgtgcaatccccatacgccggtattgtgcctgaacagcaatgcggctgactctctgtgaacgcatcactgctgcctgcggaaatcctgcatgagctgccagagactgggctaccagattacctctcgggcgacggcgtccagcccatatttcatgtgccaatgccggagataacccgccttcattcaccatccatagagcaccaatcaattgtggattggcattatcggaactggacatggcagcaaggaatgtcattccattgccatccagtaaccgacgtaaatcgaggggagacgtacgataatgtgcgcttgccagtaatccgtaaaactgccgcaataactgaggttgttgtaaccactcagcctgatcaatagactgaaaaaacaaaccattttcaatattaggatcaggtaatgacgatgaaaacaaattgctgtcatcaaatagtagaacgttatccagccacttttccagtggatcattttcagaccagcgcattggcgttttcagctccctaatctgacagtcaggcaaagcagcacagaatttcaataaaaatccccgtccggtaccttcgtaaccctgtaccgtagtggtcattagtacacgcggaaaatgtcgaatcaactcagataactgtggtgtcggaattgccgccgcttcatcaatcaaaagccagtcagcgttgctctgttgtgtgtctgtatttccttgttgccgacacgcattctcccggataaatttcagtaaattatcaactgaccagaatggtatttgctgcgcgccagaaactgtgtcgctattctgaaggccatcttcaagattattattaaaagattcagcatagcgccgaatgacttcagtcgttatttttgccggggcacataaccagcagcttccctgccactgacgagccagtattcctgccagtgcagacttgcctcgtccgcgtggcgcagtaactacccataccccttgtgaagcctgtaacatttgctcaagaataagttgctggcctgttgtcggatttccatcaggcatcttccacgaccgggtctgaggcaataatgatgcctgaaaaggcttgccctgccgccatattaaacaatcaggagaattgaggagctgttgttggatatgctgaataaaatgggaggttgggatcacaccggcagattcattccagcgagaactgtcttcatccggtaaatcaacccattgtgaccagacaggaacgcgcatcaccaaccaacttcctgcttttagagtccccgccagtattgctaatgcttcggcattaaagccacgggtggcatcaaagactccgtgcaaaaattcacgccccagtaaaccaactgcctttatcggctcaacatagccgggagtaccagatgctattgttatccagtctccctgtagctgatttttcagagaggcaacaatcttttcactccactgattttctccgctgagcaccagtaaacgacgctgcccttgtcgttgcatctgctcctgcaacgttttccattcaaaatccattcctgtcatgattttccaatcacaatggataatatgcctgctgcaattaatgggccaaccggaacacctttaaataaagcaacaccgagcaccgtaccgaccaataatccggctacggtcgatggctgatttgacatcagggatactcccctgcttcccagccatgacacaagaacgccgacagcaatagcaagcaatgatttccagtttaggaatgagctgaatatatcctgtgcagatattttgccacttgcgataggagccatgacaccaatggtgagtattaagatccccagtgttagaccatatttttcaacccaggggaaaaattgattcaagggagtgattcggacaataagcaaaaacaacattgcgagtgttaccgtcatgttatgactgataataccaagccctgccagtactaacaaaatgagtaaagtaggatcaatgtgactcatcattttctgttccatatatacatcctgatatagcgcagaatgataacttaattattagacatgtaagtagaaatattaatatcagtggaaatatggtcaatgaatcactatattttataaaaaatagttgcgaatacgtagttaatctttcaaattatctttctgacagatattgatgcttttacaaggtgaatgcggaaaggtcacgaggcacttcctcggcaacaggaagcgttcatacaggaaatatgaaaaaatcagcacttttaatcacaatcagtatgttattaacaggttgtactactcaatggataccagcaaggagcaatccaacaccttttcatgaagcagatttggagtgtcaatcaaacgctctacagcaattcccggtgaaaaatgaagtagcccagacttctcacctcaaaaccgtcagaaattcctgtggtaaagattgcacatatatgcaaagcgttcctatgactgaaagttatatcattgacgttaacgaaagttccagaaatcaggtctatcgtttttgtatgcagcaaaaaggctggaagcaaaaaacaaattactggctgtaacctaccatagctgggtatccgccctgaaatcatctttttatgaaatcaaaggtgctctaatgtacagagcacctttgtttttttatacccgcatgtttgatacaaaattagccatcattcaagcaaggtaatcgtttgcgtcattaatccaaaataacgccaatccggtgagctacctcttcgtacgcttcaattaagccaccaagactctggcgaaaacgatctttatccattttatccattgtctgcttgtcccacagccggctgccatctggtgaaaattcgtcacctagcacaactttccctttaaacaggccgaattccagcttaaagtccaccaaaattaaaccggcatcatcaaataacttacccaagacttcattagctttatagctcaggcgcttcatctcagctaaatgctctttgctgacccaaccgaaagtttcgcaataagactcattcaccatcggatcatgcttatcatcatctttcagaaacaaatcaaacaaaggaggattcagtatcattccttcttccacgccaagacgcttcaccagcgaaccagccgcacgattgcggataacacattcaaccggcaccatatcaagcttcttaaccagagattcattatctgacagcaactgttccagttgagttggaatacccgcctcttccagcttactcataatgaagtggttaaatttattgtttaccattcccttacgatcaaactgttcaatgcgttcaccatccaatgctgatgtatcattacggaattccagcacaagcaagtcaggattatcagtggcatacactgtttttgcttttccacgatacaactcagcttttttctgcatattacactccagagatatgacatctttaaacggactattaaacaaaaaatttacttaactatatacacaatggatttcaagatgcgtcgcggcggcaagagagtgaacccctgggagcatagataactatgtgaccggggtgagcaaacgcagccaacaaagaggcaacttgaaagacaaagtgtataaaggggccgaagcccctttatatattatttatttgtagctttgctaaatgctgcttgtagcacctctaccatttgatcattttcggactgagtcagcggtttacctttttcgctgataaattgcaggctgctccggttatccaaatcacccacctgtaacttatagttgccttcgctgatagttggtgcttccacacctaatgctttccagccggaagaggacaaacctttataagtaacctctatcgcaccagtcgaacgggtacgatcgttcacctgcatacctatgctttccaacgcgtaaggcagcctgttccagattacgttatatggtgcacggacgataatttgtggcaatcctgtattatcaccgccactttgtaccgataaagcgccatcatcctgcgtattatgctgcgctgaagcttctttttgatcgttcagataaccagtcagcgcatttagcatcaaggtgttgtaacgctggatttccgacggtgtactaaccgctttatcaccctgttccagacctgctcctgaaactgttaaaacaatttggtagccctgctgaaccacagaaatgtggtaacgaaccttataaggaacattttcatctgatcgaggccacaaaatccagtcagttgtcaatgtctgggctgtatcatctttctggctaatcggatagcctttttccgccagaaaactatttacttgtgaccacaatttgctgtactcaggggtattttcaagcaacagcttactgctttgtacgctattttcaacacgggaacccgctaatagcgccacggcctgcaacggtgggcgtatatcaaccgattttccgacattcccttgtggatccacagatggaatatcatattcaccattttgcagaggtaagttcatcccagcaggaacattcaataacttcagagggggggtatcaagataagattcatcaccactcacttgatgtttatagctctgatcgctggaacaggctgccagcaagacgaccaatgacaggccagcaaccttcatgaccttcgatttttgcaataatgttgccattaaaattccctaaattttacagtaattcagccattttcaaggcattctcaactgaaatttgcccttcttgcgtcagcggaaccattggcagacgcaatgtgtcgctggcaatcagtcccagtttatgacatgcccatttagctggtgccgggctaggttcaacaaatagtttatgatgcaattcctgtagactactgttcaggctacgcgctttcgcaaattcaccacgagaagccaactgacaaatttgtgccatttctgctgccgctacattcgctgttacagaaatcgttccttttccgccaagatacataaagtcgagaaaacttgcatcatcaccacttagcagaataaaactttcatcattaaccagttcttggatctggctgacacgacttaagttccccgttgcttccttgattgcgacaatatttttcagtttcgccagacgtgcaacagttggtggcagcaaatcacatccggtacgcgatggtacattatacagaatttgtggtaagtcggtattctcagctattgctttatagtgctgatacaaaccttcctgcgaaggcttattataataaggtgtcacagacaggcaaccaacaacacctgtattttcaaagcatcgggtcagcgatatagcttccgcagtagcattcgcacctgttccggcaataacaggaatacgaccatcagctaattcgagcgttgtcagtacaacatcgacatgttcatcatggttaagcgtggcacattccccggttgttccgacagaaacaattgatgccgtaccactggcaacatggtaatcaatcaattttttcaaactgctcttatcaacccggccagttgaatccatcggtgtgattatcgcaaccatactgcctgtaaaatcgaagtgaccactctccattaccatttcctctaaaatgagtcttacactacaaataagaaaatcatggtactttcttgtcataaggaaggaaactctttgaccctatgatttcgatgatttttgttaatatcaagtgcagacaattaaacagagattataatcatgctccatctattataaatgccattgaccttctcttgatcattttttatgtttagtagcgacatgtacccgcagccatcgaccatagataaggaaaatcgctttgccgaaatcaaaacaacattttttagtgctcacagctcttggtgtagatcgccccgggatcgtcaacaccatcacccgtcttgttaatacatgcggcggcaatatgaggacagccgtcttagagc

SEQ ID NO: 409 - DNA, 9001 bp, Xenorhabdus sp.
  CDS (1256)..(1654)
accataataatttattatcctgagtaataaatttaaaccctgttattttttcggagagaaaacagctgagagagtttttatcttcccaagtaaaagttcctttctttcccggccccactgttatcaccacgggattgccttgtgttggctgatatgtgcaaacagaatagacagatggtgcatagacagtgattgtataatttgttctattatcaatggttattgggtgatacccagaagagaatgctgaaattgatgtggtagtaagtaacatcataataataaaattaaacattctatgataaattaaatttatgattttcataaccgctccttgctcattaataagtaaataaaaaatcaacctttctaaaggaaacgttccattagccaatggtagttgtttgttttagtatattttaaataatagtatatatttttgattattctaattattaatgtttaataaaaattatgttaatttatcttgtttttaatgatgaattaaatgaattgtaattttcaatcggttgtttttgtaggggatattttggatgggtaattttatttttattttttttaatgttttttctaatttatataacgagatagatgatagtgaatataaaattttttgcaaaaaaacgattctccagccaatcggttgactggagaattaaattacctaattttttaattaggattcagatgcagatgcattgatggatgcaggataaagatatgcagaccattcattatattggcaaacaaatattgacgggtttctcgctgaaagtggagatgctaatttatatactttatctcttatttcagcggcagtgtttaatgaataaccaacataagtgccggcaggtaaggccataacattgccatttgaaaataccactttattattaaagttaattgttttaagtgattcgttaagagcattaatttctcttgggcctgcaccatagatttcaacgcggattaaataattagccatggattacctctcttttatttaatgtttgaataaaatcattcatcggttttctgtgtgcagaatgcgatgatatttatatccaatctctttccgaggttggtatgccggagaatttaacaggtattaatgacgttacgccatatcattaaatcacagttatttttccatataaaaggttaaaaccaccgactttagtcggtcagctttagctgcgatactgtgttgcacgagaggtgcaatatggattacagatatggcagccacacggtatttcagattgagtatcattttgtgtgggtaacaaaatacaggcgcaaagtgctaacaggtgaagttggtttacgggtgagagagttagttcgtcagacctgtgaagcgttcgaaatcaggatagtagaaggggtcgtgagcaaagaccatgtacatatactggtgagttgtcctccgagcttagcgccctcagaaatcatgaggcgaataaagggaaggacagcaagtaagttgtttgaagagtttgctcacttgaaaaagcgttactggggtcagcatttttggggcagaggctatttttgtgcgacggtaggtcagttaacggaagagatgataaaggcctatctggcgcatcattttgaaccgaacccgaatgatcacttcaggctggataattgacgcatcgtttagccgatgcgtatccggactttcagtccgttaatcactaacccaccgactttagtcggtggttgttgagtccaaaaaatataaagaaaatttttctgttttttatcctaacccttctaacgcggataccaacggagaaaaataatgaacatcattaaaatgaattctaattatgcaaaacctgaacttcctcaggcagtaaagggtgttattgacgtaggccaagtagaaagctttatgctgattgttattaataactttccacatgaacaccccaaagatattgtggttatatctgtgggggggattgtgtttaggacttttcatgttgaatatcccctgcctgatagtattcatgtgacaatacctttcactgagatacctgatggcagctatgacgttacatatacagtcactgatcattataataatcatgctaaatctgatccagcacatgtcaaaatcatcaattcccccagggcgggattccactttgtctttaatttaatcaaagataagctgactgcggaattccccagaccatgtggctcttcggcgtttagccgcttgactatcctttatactggtattctgtttaatcacatttaacgcaattcggttaaaaagcgccatttgcgcagccccatcagggtctttgagtgagatgttatcttcccgaaaggccacatctaatacccaatgcagctcattttccaccgcccaatgtcttcttattgccttagctgcggtttctgcatctaacgggagagagctgacataccagcgtgagtcgcggtgggcaggctgacctttcgtgctgcgttcactgaccacttcaatcacactctgtattgaaggccactgttgctgaagctcttcaggcaatgccgcttgaatttgcatgacatggtgacattcttttcgtccatgaccgctatttttctccgtaaattcaacgagttcatcatggtcataatgagcggaaaaacgcgatttgacaaactcatagagtgttttttgattgcccttgagtccaacaataaaatccccgccccgctgcttaatcaactcaagggtttctttctggcaatgcagggcatccattgtgacaatggcctcatcaagagcaagtaattcaatcaattgtctggcaaccgggccttcttttcctttgctttcggcggcacgatgataaagggctattcccgattcaacatcataagcactgaccacatgcaaagcttcaaacaatgtccctttgcaggttcctctcagcgtttttccatcaatcgcgatgagacttttgcccgccgtaacccggcgctggttgatccagccataaaaggcttcgaccaatgcgtcttgatctatcattttgataatattagccacacagtgacgacgaggaatgccgtgagtaaatgaggtatattgtttaagccactctatttgtaactcaccaaattcttgaatcgatttccagccagaagcgccacataacacagcagaaaaggccaaaaaaatgacatccatcaattcatgttttttattgatgtcagaacgtgggtcatctatttttctgataaaattaaaaatattcattattaagcacactgtttatggaatagcgtgatcttaacgttttaaggagagaaatgcttataaaagtccgtatattgacttttatttgacctaaataaccttatgaaaaatgtgagatctcgccctgatgctgatagcatttgtaattaatcgacgataagctaaaaaattatcgtgagttccatcatttgcagtaactaacataccattaattctattttttatacctgattcaatgttgggatattgactaaaaccttttattgttctaaggcctgaaattaatccaattaatttatttccgtgttttggaacatcaagctcatgtgatttaggagacttaactctgtttaataatacatcatgcatatactgcatagtgtctttagcttctttttcatcatactttccaccgattgtatctggtgatgttgtttctgccaacaacaccatcagcattgctctctgctcggcagtaagatcagtggggatcgatattttaggcacgatattaattgttaaatgtggaaagcagtcctcagcaacaccctgagcaaaattaggacagaaatcaatatttgtatcaactgccttaactttacttacccctatattaatcgctgttatttgcaatgtttgctctctcatctgaggattatcacgctgaaaaatagttaccaaaccattctctgacagaaacttaaggtgctttctggtattgaggtttaagccatcaatctttaatgtcagtgtattacccggagttagatgaaactcagttccgagaagcgcttttccgttattccgcgtaacaataaatctagacatcatttgttatcctttttattctggttaaatccgtttttttgccctatcttattcaataagagtaatcctataaacaaattaaacaacaatccaataagacacctcttatttttgataataacctttatattttaaaagataattatcaataacgtaaattatttatcttatctcttaaatgccattgaaaatatttacaatggcataattagtcataagccgtcattatttagcataggaatcaggaatagactgaatcaagccagactgacaagggcaactgctctggctatccagcgttcctgccattctttgctgataattgataaaaccactgacaccgccgataatccggtatttaccggcaaatctgccacaactgacctctgaaccttcaagagcagacggcttaccgtaaaaagtgactgtactactgcccgttaaaattgcaccaccacatgttgtcttatccccaacaactaagaagtatccaatagccatcatttatccttaacgtgaatttaatgtgattgattaataaatatattatcgataaaaaacggatgattaaagcaaccatgcaacatggttacaaatcaatttattcatcctgctttatttaaaatttgtagtagttgtgacagttaatacataaaaattcatagacaaactctttatttcaaaaagttatgtgaccaacatcaattttaaacatgctgctctaaaatattactttaaaaagctaatccattttcgattcccctgatagagttattaataatgtaacaaaaaaaattatctcaacaccaactgggttttccaaatattcataaatcctaaaaagtaaaatgaggaaagatatgtcaaagctcatttattatgttgctgcaacaatggatggttatatcgctacagagaatcatgagttaggctggctggagacatttgctctcagcgatgacgccactccttatgaaaccttttatcagggtattggagcagccattataggggccggaacttatgaatggattatgaagaatacagctggtcactggccatatcaaaatatcccttcttttattctctcttccagaaatttacccgttccggcagaaattaatgctgttatcactcatgattctgccagtgaaattgcagctaaagctcgggccgccgctaaagataaagatgtatggatcattggtggtggagaaacggcagcattctttgccgatgccggagaattacaacaactatttcttaccacggtgccggtctttttgggctcaggtatccgagtcttgccagtcaaccatttgattgaggctgttcctaataaacagcgtctcttaagtagtggcgcgattgaaactattatggatatcaaaccaacagcataaactgaatgatattttgatccattacaggaagccgatcttttataaattcaggatcggttgtactctcagcattaaagatccttgactgccctctcatccagatcaacacgatctttcttacagtcagtgttcgtgttgatacgctgttgttccagccatcatatatgacaatatttccctagatctgaccaataatgaccacagttctgttcatgaaggctatgcgcataactgtggtcacgacactcatatgacagttgccctgacagccgccaattacctgtcacaacatcagcatgagatgaacgtcaacgtgcgctttatcttccagatagcagaagaaaatatgcgtattccgggcgcagataaaatggttgagctggggtgcatggacggtgtcagtgaagtctatgccctgcataacgatggtgctgaggatacaggtactatcctctgacaagcggtactctcacttcatggggaacgacatgaactctggatttctacggttcaacactacaaaaagggctggatgccattcgcgagatgtgtcgcattattgattaatagataactacccacattccaatgcttattttattgacgatgactacctgctagttggagcacaaatatttattaatcttgttactcgttaattgtatctggcgtccggtagggaatatcggacgcccttttatttgataaaagatagtagcatctatatgaccctaatatatattctttaaaaaattaaaaaagcaagagacaggatgatttttctgccattatctaccaatctattaatatttaggtgctcatcaaccaaccatgataggtgatatatgagtaaaaaaaatttatggaaaaccaatgagaaacgttggcaagccattgttgaacgtgataaggatgcagatagtcatttcgtatacgcagtgcgtactacaggaatatattgtttaccttccagtactgcccgcctgccaaaacgggaaaatgtgatcttttttgacaatgaaagtgatgctaaacagcaaggttatcgtccaagtaagcgtttaccaggaaaccagcctgaacaggaagctggcaaccttgctaaaatagcgcaagcctgccgttacatagaacaaaatgaaggccatcttaccctggaaaatatcgccaatcacataggaatgagcccattttacttccatcgattattcaaggcaaaaataggtctgacgccaaaagcctatgcagatgcttaccgtggtcagcgcctgaggagtaatttagaacaaaaacatagtgttactgaagctattttagatgcaggctttaattccagcagcagattctatgaaatttcatccgacttattaggtatgacaccgaaaacttggcgcgccggtggaaagggagtgcaaatttactttgcattgggtatttgttcattaggtcatattttagttgcacaaagtaaaaagggtatttgtgctattttactgggaaatgatcccaataaacttttacaggaggtgcaagacaaattcccgcaggcagaatttattggcagcgatccccagtttgaacaaattatcgctcaagttgtcgggtttattgagactccgaaagctgaactgaaactaccattagatattcgcggtacggcttttcagcaacgtgtttggctagctttacgagaaattccgataggaaccactatcagttatgctgaaattgccaagcgcattggttcaccaaaagccatacgtgccgtagcgaatgcatgtgcagccaatatgctggcggttgcgattccatgtcatagggtagtcaggaatgatggaagtttatctggatatcgttgggggattgagcgcaagcgagaattattaatgagagaggccaaaaaacaatgagtacagatattgatattacaaatcgactgatgaatataaattgggtaaataccattaatcaattaaatacctttggttatagtcacctgaataaaatcttaacagaaaaggagtgcgattcactggtggaattatactcaaaaaaggaattattccgtacacatatccaccttgaaaaacatagttttggtaagggtgaatataaatatttcaattatcctttacctaatctagtttctgaattacgtgatatcttatactctaagttggtggcaattgccaatgattggaatcagaagctaaacattaacataaaatatcctaatacactcaaaaattacctagatatttgccattcagtaggccaatatcgcccaacacctttattattaaaatacaaacaaggtgactataattgcttacatcaggatttatatggcgatctaaaatttccatttcaaatagcattcttattatctgagtatgaaaaagatttttgtggaggagagtttatcatgacagaacaaagaccacataaacaaactcgtccaatagtactcaatttgcagaaaggagaagctgttatttttactgtacaacatcgtcctgttcaaggaactaaaagaatttatcgcgttaatatgaaacatggtgtcagtacaatccaccacggacgacgtcatactttaggtattatttttcacgatgcactatgagcataattattgagatcctacaacttacccatgtttcttagtatgttaaatttgtttcagacgaagtatcctatggcttcatactcatattataacaataaaatctgcattccattgtataaaaatactatatgattttatcatagtcgaaattttatctattatctcaagaatagtcactgaatagcaacaggttaataaaaaacgcatgatactatataattaatcatactaaaaggagaaataataagatggttaaacttaaaaaattttggattttagggaacctctaaaaacttttcacagccacaaaattgagtaaaatgtaggcacagtacctctctgcaaggtagcgccatcatgataccgcctcgttctgctttaaaaaaagacaaacaggcatccgaatatcaccgtcgaaaaatcgatgaattaggtgatccgctgcttgttcttgataaatatgttgatttctcggcactggctgacaccctagaccgtatcgtcccacgtattatttcccccaaagggggacgcccgccattcccgacggaggtgatggttcgcatcattatcctgaaacatttccataatctttccgatgaaaaaatggaatatcaattgcttgaccgaatgagctggcaacgtttttgtcgcttgaccgatgtcattaatattccagaccgtaacacgatttggtgtttcgaaaaacggattgggcaggaaggtgccagagcgttatttgaagaggcgaagcatcagctgtcagcacagggattcattcccagaggagggcaaatcattgatgccacgttgatccccgtgcctaagcagcacaataagctttagagcgacact

SEQ ID NO: 410 - DNA, 16532 bp, Xenorhabdus sp.
  CDS (9666)..(10103)
aaagtctgttctccgcctttggttgcggtctgagaagcggcaacagcaagagcactggcctgacgggcatgttctgcgttctgtttaacggtgacggtcagctgttccatactggctgctgtttcttccagagaggcggcctgttcttcagtacgtgaggataaatcagtgttaccctgcgtaatttcctgaatgccgacatacatctgattagtattatcccgcactgatgatatggacttaatcagcgatctttgcatatcgcgtaattttctgaatatatcgccgatttcatcgtcagtggtaacagcaacttctttatccagccgcccttctgccacatcctgaaaacaggctctcatattgtcaaaaggcctgagcaggttacgtttcagccaccagtgagctgcgatagcaacaataaacaccatcagaatggaaccaaagaacatggcaatagcaactttatagtagaacgctgcattctctaccgtatcttcaatattcttgttgaggtactgcatataatgtttatatgccagctccattttgagctgatattcttctgtcggctggtcaagaaaagcctgaaaatcgccgccataaagaaactctttcatctctttcagagcactgaaatagtccctataagcgcgatcaaggtcagttaatagaccatcccttctttcattctttcctacctgaggtaaagaattaaattgattaaagcttctttctgcttcacttaatgaatgtttgagcaatgcttccattgcatcgatttgttctttgggttgccctactttttgagcaattgcgattttgttcagagtgttacgcgtttgcaataatgcagtccaactcacgcccaggctatccctgcgctgagttcccaaatcaattctttcgatatatgactgatctgtataaataattcccagcgatagaccactggaaatcatttgcataatacaaaacatcatcagtaatagatacaaactggttgatatgcgaagcctgcctaacatgtaatcacctcgttgaacggctgcattatgcagccgtagttatcgctattattttttagaatgtttcccaattagatgggtcttccacgtcactgcctttcttcagcacgggaggattcgttttattagctggaggggtcggcgattttctcgtcgataaaacttcatgttttcttttttcaggcagcttcctgtctgcctgctccggtaactgaaatattgccacggctttggtcaggatcatggcctgctcttccagagctgctgcggctgccgcagactgttcgaccaatgatgcgttctgctgtgtcactctgtccatttcagagatagcaacaccaacctgggtgattcccctgctctgctcatcagatgctgaggcaatttcacccataatgtcagttacacgggtcactgagttgacaatgttgttcattgtctcacccgcactttccaccagctcagaccctgtatcagtacggctgacagagtcttcaatcagtgatttgatctcttttgcagcttcggcactacgctgtgccagattgcggacttctccggcaactacggcaaacccccgtccgtgttcacctgcacgggcggcttctaccgctgcgttaagagcaagaatattggtctggaaagcgatggcatcaatcacaccggtgatatctgaaattttacgcgaactgtcagcaatttcgtgcatggtttgcacaacgttcgccaccactttgccacccttacgggcaatttcggaggcattatcagcaagattactggcctgacgggcgttatcagcattctgttttacggttgcggtgagttcttccatgctggccgcagtttcttccagtgaagcaacctgctgctcagtacgggcagagagatcattgttacccgcagcaatttcgctggtgccggtatagatggtttcggtgctgtgatgaacacttctgacggtattgattagctcttcctgcatgtgcttaagaccaactgacaatacccccatttcattattaccggagacatcaatcgttctggtcaagtcacctcttgagaaggctttaatcgaatccaacaggttattcagcggatcgattaatgctttgcgtaaaccaatccaactcacggtcattacaccgattaacagcacaaagacaaaaatcaggctaataatgacgttacggtaggctatatcagcttcatctgatacctgctcatatagcttttcattctgacccagatagaagatatattcagtatcaaatgcgttctgatacatggtcgttggttgggcaaaaaatgctttaaactctttttttgccagcaatacatccagctctttaagtgcattgatatagacactatgagtttgtttcaaacgctgcatacgctctggatcgcgtatagacaagttcggcatttgttcaaattgctgaaaacggagttctgcacgggataaattaaccttagcctctgctaaaatatcatcaattttgtattcgctctcaccaccgtttatttgcatgatgtagacgatgccaacacggttcaggttattacgggcctgcaacagattgatccagctttcatcaagtaatttttgccgctgccgcagttcatccagcgtatcaaaggccttggtatcattttttatggaattaaaaaacaggccgctagacataaattgcagagcaccaaataagattatgactgagattagccccgtcactattttcattcggttaaacatgacttcccttgtgtaataaattgctatgccagtgttatcggcatccttaaagggaactttatgcgtaatacaaaaaattgagtttttactgcatttttttgatctacaacaaaaacgggctgccttttcacgctgttattttccgtgactctctttatgtgataagagaatggcagccctgaaatatcactctttggcgacagaatccaccagcgccatttcttcactgttgagcagtttttcaatatcgaccaaaatcagcatacgctcttcaatggagcccagtccggtcagatactctgttgacaatgtgacggcaaattccggggcaggacagatttgatcatctttcagagaaagcacatcagatacaccatcaacaacaatcccgacaacgcggttaagcagattcaggatgatgaccacggtgctatcattgtaagtcacatcttcctgagaaaatttaatccgcaagtcaataataggtacaattacaccacgcaggttggtgatacctttgataaaagcaggcgtattggcaatgcgggtgacctgatcataaccacggatttcctgcactttcagtatttcaattccatactcttcatcacccagagtgaaaaccagatattcctttccggctgtttctcctgataacttactgaattcgtctatggctgccattgtgttaccttctatctattgtgtgtgacttaaatctttggatatatatccatcgggtatgacaaaaaagggttattttttgtttgcaaattctgccttacgcacggccaactgttcatggttcagtttctgcaaagcaggaatatcaatgatcagagcaacactgccatcgcccataatcgtggcagcggaaatacccggtactttgcgatagttgctttcgatatttttaacaacaacctgatgctgcccaaccagcttatcgaccagcaatgcataacggcgtcccgcactctgcacaatcaccgcaatgcctttcgtcggtgccgtttctgcgcccggaatgtcaaatatccgatacagttccagtaatggcagatattcaccacgtacctgcaatagtttttcatctcccgccagcggataaatatcttcctcctgcggctgtaaagaactgaccacagcactcagaggtaaaatgaagacttcatcattcactttgacagacatgccatccaatatcgccaaggtcagtggcagcaaaatacggataactgtccccttcccttcctgaaaattaatttggatctgtccgcccatatcctgaatgttgcgtttaaccacatccatacccacaccacgcccagaaacatctgtgacaatttctgcggtagaaaagccaggtgcgaagatcagcatggcaacttcttcattactcatgttttcattgaccgccaacccgtgagactgagctttggctaagatcttctcgcgattcagtcccgcaccatcgtcaataacttcaatacagatattgccgccctgatgttcagcagccagtgtcagattacctgtttccgatttacccgcggcgagacgtttttccggcgtttcgataccatgatcaaggctattacggactagatgcgtcagtgggtcgataatgcgttcgatcaggctcttatccagttcagtggaactaccaattaatgccagttccacttttttgttcagcttacccgcaagatcccgcaccagacgtggataacgactgaatacatattccatcggcatcatccggatcgacataacagattcctgcaaatcacgggaatttcgctgcaattgcgcccatacaactcagcaattcgctgtgtattgtcggttccagagcatcacagtgctgtgccagcatagattgggtaataactaactcacccaccagattaataagctgatcgactttctcaacggctacacgaatactggaagactctacacgctgacgcggagaacccgccatcggacgcggtgccggacgaccagcttcagaaacatcagtttttttcctggtatcagccgacggtgacgctggcaattgagccaatcccttttccacatcagaagtggaatctgttgcattagccgttaccgaagtttcctgtaccgtaggctgagtcgtattttcttctgtttttacttcaacctgctgagactccactacaggcaagaaggttatttgttctggctcaaccacaaaacacaatactgcggtgatatcatcttctgttgcagaggtaattaaagaggcttcaaggctgtctgttgtttgttcgacatcataaatttcaccaagatgccccaactcatctttcatcaaagcaacttcacgctctttcagcccggataggtgaacacggatccgtccctgttctgtggctgaagttgtcgtcggaagatttttttcttcaggctgctctacaggtgttacgtgttcttcctgcttttcctgaatttctgccacatgctgaataatctcttccgttacaggttcaaattcagatgattcagcagaatcagcgatattctgctgctcttcctgtaactctaatgcaagttggcgcaatgtttcgcagatataattaaatgtatcttcatctggctcctgagaacttttataggcatccagttgttgctgcataatatctttcgcttctaaaaacaggttgataatgtcagttgtcaggcgtatttcgtcacgtctggcactatccagcagattctctaaaacatgcgtggtttgttgcagtttggaaaaaccaaaagtcgcagcgccccctttaatcgagtgggcgctgcgaaaaatggcattcagctgttcatggtcaggctcatcggcatcgagcagcaataaatgctgctccatatccgccaatagttcatctgcctcatcaaaaaaagtctgataaaacgcggtaatatccatcgttacttactctgtcaccttattaggatcacttgccggttcagtatttgtctgctccggcacagtgatttcattggattgtccggtgggttgctgagaaggcgttccctcattcgaatccattctgatgacttcttgtatatccatactactgttagcggtcatggcgttgccgccactgttttcctgctcaatccgttgttctgcttctttattcagaacaataatactgatacggcgattgacaggagcatcagcgggaattcccttctgcatactgacggtggatgccattccaacaactcgcataattttggattcatccagaccaccaattagcaactcccgtcttgacgcattcgccctgtctgaagacagttcccagttactgtaaccacgctgtccactgatatattgcagattatcagtatgacccgacaagctgaccttatttggaatgctatttaagatcggcgcaattgcctgcaaaatatcactcatgtggttttcgactttcgcactaccaatcatgaacatcggacgattttcccggtcgatgatctgaatacgtaaaccttcatccatcatgtcaatcaataaatgaggacgtagtgctttaagacgaggatcggtgatgatcaactgatcgagttgctgacgtaaccgatccagacgacggcgatcttcactgacttcaacctgtttggtttggcggaagacttctccatcctgctggaaaacatcatcccctccccccgggatcggatttgttgtatcactactttgctgacccttgtttattgcaacctgcaagggagtacgaaaatattcggcaatgctggttaattcctgcgggctggcaatcgatatcagccacatgaccagaaaaaatgccatcattgcagtcataaaatcagcataggcaattttccatgacccaccatgatggggctggccatgttttttgcgcttttttactctgacgacagtaacattattcgctctcataattattcttcagcttcttgttgtacgggggctttaaccctgcgaacatgctcttcaagttctgtaaatgaaggacgatctgtgaggaataatgttttgcgaccaaactcaaccgcaatttgtggagcataaccattcaggctggaaagcagagtcactttgatacactgcatcatttttatctgctcgctgctgcgctgacgtaacaacgttgccagtggagacacaaaaccgtaggccagcaagatcccgaggaatgtccctaccattgcgtgagcaatcaatacgccaagttcacctgctggtctgtctgccgaacccagtgcattaacaacccccatcacagctgcaacgataccgaatgctggtaatgaatcccccaccattgccagactggtcgcagggacttcactttcctgctcataagtctcgatctcttcatccatcagggcttcgatctcatgtggattcatattgccgctgacgatcaagcgcatataatccgtgatgaagttcatcaggtaaggatcttgtaataaacggggatactgtgtgaagatgtcactttgttgcggattctcaatatcacgctcaagagacaaaagcccatgctggcgggatttggataaaagacggaactgcaaagccatcagatccatgtacatcgctttattgtattttgatctacgcaatatttttggtaaaacacgcaatgtcgcctttatcgccttaccattgttgcccacgataaaagccccaatacccgcacctgcgataatcaaaaattccgctggctgataaagtgcgcccatgtggccaccgacaagcagatagcctccaatcaccgcaccaaaaaccacgatatatcctaaaagtactaacacgcgatatcctttagctaagttggtgagcagatgggatttgaacagggagaattaataaatgaagaggaggattgtagattacaggccagaatgaccaaaacctgtaacctaagttttcactttcccatttaaattcacatagcttgctgagcaaatccatccagcagttgtgaattagtatcggcaggttgcgcggaaagtttacgtttttttaccgcccttgaaggcggttggcaaagactacaaacaaagctgttgaccggctgatgtgcgtgtgtgataaaagtcccaccacaacagcgacactcagttggttgcaacatcccactatcgacaaaacgaataagtgtccaggcccgggtcagagctaaaacgggcgcatctccgtcagacggagggcattgctcaagataaagcctataagacttaactacagcctcaacacctgcacagtgcccacttttcaacaggaaacggtaagcattatagaacatggaagaatgaatattctgttcccacgtcataaaccaatccgttgaaaagggaagcatccctttaggcggggggcttccccgcaactctttatacagcctgatcaaccttcctctgcttaactgcgtttcactttcaagcatctgtaagcgtgcgcctaaagtgatgagctccattgccagctgaatatctttagcttcttggacaatacttttttcagccatctttatgctcttttcttcattgaagtgtcatcctgcgcggacaactgctgaaaaagatgagtggacaacaaaatacctgtatgaatttgttgtagatcgtccacccgcgattccttcgtcagctgctgtacggtttcgtgatcttcaaaccgaaaatggcaaatcagttggttggtttcagctaattttactaactgaggcaatgtcagctcggccaacgtatcagccatcgattcactaatacctaaacggaacatcgcagacgctttctcatggttaattagccgttgtgctaaaagcaaatacgataaatttatgtcataaatatgtttgagcaattcaaccgtactcatttctatatatcccgtccgattacatgaaaaaatcaattaagtgatcaaagaatcactcacgacaaaattaccagtagcatgagattcaataatctccgacataactgaaatatacatctttagccagagcagtaactgtcctttgtattactcttgggatcgcccaatttctaaaatatttcggtaatggattgtaaaagtattattgcgtcatctggataatgaacttgccacaattgattaagaatattcttaatactaattaactttactcctgaatcatcaacttatacaacggagaatatatgtcattttaaatactatgtgacatacatcacaaaacttacattttttattatgattctagctcattaactattcaagcaactgaaaagacaaaatagtccacaattaataagttaaattatttaaataaaaatattagagactgttttttgttttatacgatctattaaacttataaatttaaaataacaagaaaaaatcctacctttagccaaattatcaaaatcttattaaaatttgtttcgtgataatgtaggtaggcactcatcttccactattagttgatttagatcatagttatgccaaatttattaattatatgtgaatactagttattaaaaagataccaatctgatcatttttagtttacgattgctctttttttaaacataaaaaagcctgtactgacagcattttaagtacaaatatcactcagatcacaaaaataagataaaatacagtatgatgttgaaatcaagagatatttgtaatgcctctacacagtttcagtagccaaagagtcttgacatcataaccacccgctttgcgggtggagttcaaaggttataccaagaaaaacacctttccgttacgatatagatgtacaagctaatattcgtaactcaaataaggaaaggtgtttatgggcattaaagcacaaagctcagcgcatacaaagtggctgtgtaaataccatatcgtcttttcgtcgaaatatagacggaaagtgatttttaataatattcgttcaagtgtgggagagatcctcagagacctttgtaagtataaaggtgtggaaataatcgaaggtcatctcatgccagatcatgttcatatgttggtgagtattccaccaaagctaagcgtttcaagctttatgggatatttgaagggtaaaagttcgttgatgatctttgatagacacgccaatttaaaatataaatttggcaacagaaagttttgggcggaagggttctatgtcagtacggtagggctaaatgaagcgacaattcaaaagtatatcagagagcaagaaaagtcggatttaatctcggataaattgagtagtaaagagcatgtagaccccttcaaggggtaggccaaagcagcaaagacacttagcttgaacgaagagaaagcagcgtcatttaggcgcagtcggtaacaagcccttatagggcaagagcaaaccacccgttatacgggtggttatgattacttttatcatcacacttttatcagaacacagtttctcttagcggctattttgccaatcctctgtttttgcaaaatttcagacgcggaggtttggcaaagggagcaacaatcaatcttagtcaccctatgggcctcggttaacggttatggcggtagcgtgccggaatatcgggaagcgcattcgacaagcccaataagcgtgacaagtaagccaatgagaaaagaactatggaaaattcatctgcaatgttattgcgtcggttaaatccatactgcgcacaggcactggaagccgcagcctctctgtgccagacacgggcacatgctgaaatcaccgtcgagcactggttgctcaaaattcttgagcggggtgaaagtgatatcacagtgctggctcgccgttatgagtgggatatgggggcgttgtggcagtctctgttagatcatatcgatgcttatccccgaactgttcacagccgtccccaactttcttccccattattaactttgataaaaaatgcctggttatctgcttcactggaagaaggagaagggcatatccgtagcatccatttactttttgctctgctggaaacgccttcattagtgagttgcgaaggtgcatggcctttgctgacagtaggaacttctcagctacaacggctgcgcccagtgctggatgcccagtttgaagagcgcccggaagtacagcaacaagcaatgctaggacatgataacacgacattctctccggattccccaaccacttctcccgagagaaccactccgctgaccgacaaaccgttatccgatgcactactggctgtactggataaattcaccttagatgtcactgcgaaagctaaagtcggcaatattgaccccgtttttggtcgtgatgatgaaatccgccagatgatcgacattctatcccgccgtcgtaaaaataacccgatactggtgggagagccgggagtcggtaaaacagcgctggtggaaggattagccttgcgcattaccgagggtaatgttcctgaaagcctgaaaacggtcagcctgcgtactctggatttaggattattacaagcaggagcgggagtaaaaggggaatttgaacaacggctgaaaaatatcattgatgctgttcaacaatccccgacgccaattctgctgtttatcgatgaagctcataccattatcggtgcaggtaatcaggccggtggggcggatgctgccaacctgctgaaaccagccttagctcgtggtgaactacgcactatcgcagcaaccacatggtcggaatataaacagtactttgagcgggatgccgcactggaacgtcgattccagattgttaaagtagatgaaccggatgatgaaaaagccagcctgatgctgcgaggcctgaaacctcgttatgccaaatatcatggagtgcatattaccgacgatgcattaaaagccgcagtgactttatcccgccgctacttgacgggtcgccagttaccggataaagcggttgatctgctggataccgctagtgcgagggtcagaatgagcctcgatacccagccagatgaactggtacggttacgttcatcgctggcagcactggatttagaagcggaagccttgcaggaagatcactttgtcggtaatgcggtggaagtcagtcgcctgattgatatcacccaacaacgagaagcacttgaaaaccaacttcaattgactgaagcacaataccagcaagaaaaagcgctgactgaacagttactggattgtcgtcagtcagggagtaacgccggagaaaatgcccggctgcaacaacaactggcagaaattcagaacggagcaccgttactggggctggatgtagatgtgcgcacggttgctactgttattgctgactggacgggcgttccactatccagtctgatgaaagatgaacaggccgatctattgtcactggaacagcatctggaaaaacgggttgttggccaatctgctgccttggaaagtatggcccaacgcttgcgggctgcgaaaaccgggctggcatcggaaaacgggccgttgggtgtatttttgctggtggggtcgagtggaattggcaaaaccgagacagccctggcgctggcagacagtctgttcggtggcgaaaaatcgctgataacgatcaacctatcggagtatcaggaaccgcatacagtcagccagctcaaaggttcaccaccgggttatgtgggttatggtcagggaggaattctgaccgaggcggtacgtaaacgaccttacagcgtagtgttgttggatgaagtagaaaaagcgcatcgtgatgtgatgaacctgttttatcaagtttttgatcgtggttttatgcgtgacggagaaggtcaggaaattgattttcgtaataccgttatcgtaatgacttctaatctcggtagtgatcatttgatgcagttactggacgaacaaccagaatcgacggatagcacactgcatgaattgttgcggccgatactacgtgatcacttccagccagcattattagcacgttttcaaactgtaatttaccgtccgctgggagcacaagcgctgcgtaccatcgtggagatgaaactggcacaggtagcaaaacgtctgaaactgcattaccgactggactgtgtagtagaagaatctctgtataacacgctggtggaagcctgcctgctaccggatacaggcgcacgtaatatcgatagcctgctgaaccagcaaatcctgccggtaatgagccaacaactgctgatgcgtcaggctactcaacagacagctaatacattaacgctgggttatgacgaagaaggcatcacgctgacatttgataaagagatcttatcaggggaggataggtcatgaatttattagatactgctaaaaaagcaggaacagtgttggcaaataccctgaaccgctacactctgggaattcagggctgtgatgctgtactggatgtagaggattttaccggacgtgaagccatgagcgatacctatcgctaccgcattgccttcaccagctcagagcaggatattcagccacaacagatgttgcgtcgcagtgctacattcaccctgcgaacactgggcgaaactgtctttggtatcaacacgccaccaaagacacagcgtgtagtgcatggtgttgtaacggattttaaacgattgggaggctcccgtgatgaagcacagtaccagatcattctggagccgaaatttgctctgctacgcaatcaaaaacgttcttaccgtttcttcctgaataaatccgtaccggaaatcgtcgaagaaattttacgggaacataatttcaagggatgggaatttgaatttaacctgaaaaacacctacccgaaacgggaacaaatcaatcaggtcaatgaaagtgatcgggagtttatcgaacgcttgctatcggagctgggaattttctacaccttccgtttacaaccggatacacaaacagaagttatgcattttggtgataaacagcgatgttatgaatacggtaaaacactaccgttgaatagcccgtcagggatgaatgataacaatgaggcttccatttgggggctgacccagcgccatcaggtagttgaacattctgttcagaccaaagattataactttcgtaccgcacagcatattctgaattcggcacaggctgatatgacccgtggcgacggtgaaaaaatcacctatggtgatgtcaattactataaacttcgccatctgacgacaggggataaactttcacctgaaccagaaaccgctaacttttgggcacagcttgaccacgagcgtttcctgtcacgtcagaccctgctgtacgggcagagtacggatccaactttgatggcgggacaagttctggaaattgaagacagaaccttgccatctaccttgccagccgcgttccaatccaaaatcttaatgactcaactgcgtttcactggcagccgggcagaagcgttactagttaaaatcacagcagtaccgtacaccgagggcctgtgctggcgtccgtcattaaaaccgcgtccggttatcagtggcacactgactgctcgcgtaaccagccccatagccaatgatccctatgctcaccagaatttggatggattgtactgggttaaattcgatgcagacagtgatcagaaaaagaaaggttatgaaagcatgccagtgaggttggcgaaaccttatggcggcgatacatacggttttcactttcctctgattcagggcacggaagtagcaatagctttccacgaaggcgatcctgatcggccgtatattgcccatgcgctgcatgactcctaccacccggatcacattaccgcccgtaaccgtacacgcaacgtcattcgtaccccgacaaataacaaactgcgaatggaagatcgccgtggtcaggaacatatcaagctgagcacggaatatggtggtaaaagtcagcttaatctggggcatcttgttgactcaaatgagaagaaacggggtgacggttttgaactacgtaccgatagctggggcgcaattcgggcggggagagggttgtttatcagtgcagacgaacaggagcgagcatttggtgaacaactagatctgacccagataaaacagcagttagctgatgctctagatatggctgagtcattgtcaaatattatgcgaatggcgcaaatagagccattagataccagcaatcaggaacgctttttggaaggttacattgatggcatcaatgagcctgtgattgcagcaagtgcgccggggggaattgcattatcaacacctaaccacattcaacacagtgccaacaacaacattgtgatgacatcaggcagaaataccgaaatttctgccctgaaacgcattgcaatagcagccaaaaaagcggtttctattctggcccatgaattaggtatgaaattagtcgcagtggcaggaaaacttcagattcaggctcagactgatgcgctggaaatcacagccaagaaaaatatcagtattacgagtaccgatgatgaaattattatctcagccaaaaagaaaatcacatttgagtgcggtggctcttatatcacgattgatccgactaagatagaaagtggcacagaaggcgatttcaaagtacagagtgcaaacttcgactacgcagggccagcaacaatcagtgtgccacaccctaattttaccgcctgtgaaactctgtcatcagaagcagcaggccgtggtgatgcaactgttcccttaagctaaggtatgactatgtacgcaacttatctaccagaatcccttcctctggaaaaccaccgatatgccctaattgacagggcattatttcctgaacttgatgatgaattaccggttatcgaagttgtctcacctttattagctccgcaggcagaattatacccatggctaatttctatgcatgaactgtcaccgacgcaatgggtaaatctattttccgctatcaataaatcgatagaagaacagagacaaccgatggtttccttattttttgacagtgaattaccaccggaagaaatgaaaaagcggttggtacatgggttatatattcaggataaatcaagaaaaggatttatcttgcgctattacgatcccagagttttatttaatttatcatggatatgggatatcaataccttccgtcaccaattatcagttgatgctattaagcattggacattttatttggccgataaatggaatacgctttcattctcgcaggaagaaccttatcagattgcacccgcgaacattcagattagccgaattcatagaattggtatgattaatcaggtgctggcaaaaatgccaccaatttatgatgttaaagaacgtaaaaaaatcagcatggagattgaaggattatttcaggtggcgactgagagatttaaattaacacataggaatgacttggttgcatttgcactttatggcgttacggtgaatttgatgttttatgaacataaatattttaaagcattattgatagatagcgctgagtatgaagaatatttttccagagtaatgttgaatgttaatgatcctaagttgaaagaagtaaaagaaaacttattgcaagtgaatgtattatcataaaagttaatttctgttgagataaatattttatgagaattattatattttaactccacaacccccgaataaaatcggtggggtagtgattaacggactgaaagtccggatacgcatcggctaaacgatcttta

SEQ ID NO: 411 - DNA, 17569 bp, Xenorhabdus sp.; identical to SEQ ID NO: 94
  CDS (10200)..(10598)

SEQ ID NO: 412 - DNA, 17925 bp, Xenorhabdus sp.; identical to SEQ ID NO: 337
  CDS (5898)..(6335)

SEQ ID NO: 413 - DNA, 6481 bp, Xenorhabdus sp.; identical to SEQ ID NO: 242
  CDS (2743)..(3141)

SEQ ID NO: 414 - DNA, 6481 bp, Xenorhabdus sp.; identical to SEQ ID NO: 242
  CDS (6285)..(6407)

SEQ ID NO: 415 - DNA, 30011 bp, Xenorhabdus sp.; identical to SEQ ID NO: 106
  CDS (15567)..(15965)

SEQ ID NO: 416 - DNA, 30011 bp, Xenorhabdus sp.; identical to SEQ ID NO: 106
  CDS (16149)..(16529)

SEQ ID NO: 417 - DNA, 22514 bp, Xenorhabdus sp.; identical to SEQ ID NO: 267
  CDS (5280)..(5717)

SEQ ID NO: 418 - DNA, 30934 bp, Xenorhabdus sp.; identical to SEQ ID NO: 274
  CDS (3)..(341)

SEQ ID NO: 419 - DNA, 32325 bp, Xenorhabdus sp.
  CDS (8936)..(9373)
gcatcaacaactcattgagcgattaacgaattggcaatggtgcgttaacagcaaccaagccttggcgctgcatttctaaccagaaatcagtcgggactttagcggttaatgctgctaaatcttcagccatacgacctggacgacttgaaccagggataaccgctgctactgctgggttagctagtgaaaactgtaatgcagcggctttaacatcaacattaaattgcttagcaatttgataaatcttcgcgacttgttgatgaatagctggggaagatttttgatattcaaaatgcgcgccccctaccaatacgcctgagctgtatgggccgccaacaacgatatcaacattatgctctaacgcttctggcatcagtcgttgtagtgcacggctgtgatctaataagctataacggcctgccaataagaatgcatctggtttcggctcatctaagcccagtgttaattcacaaggttcaacgcggttaacacctagcccccaagctttgatcacgccttcttcacgcaggcgggttaaggcacggaatgcaccagtgcgtgcggtgttaaaatgctctaaccaactatctccgtaaaaatcttgtgaaagatcgtggatccacacgatatcaatacggtctgttttcaaacgtttcagactatcttcaatagagcgcagtgtcgcatcttcagagtagtcattaagaattttgtttttcaaaccgtgttcaaaaagaccgcctttttccccgaaatcacgatttgcaggatcttccatctcatctaacatgatgcgacccactttggtactcaacacataatcatcacgtgaatattgagacaggacttcacccatacggatttcagataaaccagaaccgtacagcggcgcggtatcaaaataacgaacccctaaattccatacttcctgtacgattgcaatcgcttcgtcatccggaattgctctaaacatgttacctaatggcgctccgccaaaaccaatttggctaggaagtaattttttaatactcatattgtaattccttaaataaattagcttgttatcagcaaaatgatgattcaggagagtgaaccatcctatcatggagcatgatagtaggttgattttttatgacatgaaaggacataattagtctaagttaagacattaaaggcaataactatgattgacctgcgccaactcagctacttcgttgttgtagcagaagaggaacatgtcgggcgtgcagcaaagcgcctacatatttcacaatccccattaagccggcaaatttctcaattagaagacagactcggattaatgttgttcgaacgaagccagcaacgaattcgcttaacgtctgatggacaaacgtttttgactgaagcgcgctcactccttactcacgccaatcgcttggaatcattaggccgccgtttaggtcgaggagaagatggtggactgtgtgtcggctacattgaaaatgcaatgcactcaggcatactgccaagttcattaagtgtgttaagggattcacatccagatgtccatattgcgttgtataaccaaacgccagaacgccagttcgaaggactgcgccaacggagccttgattttgcgatggttgatactccaccagaaggaaaagggagtgaattagaatatcgacaagtattgaatgaccgcatgttagtggcggttcctcatcatcaccctttagcaacaaaagagcacattatccctgatgatttaacggcacaacaatggatctcagtcttacacaacaatgataattcgcactcacgggatgattttgttgccgcctgtgtgaaagcagggtttcggccagatattcgtttagaagcagaagaaccgttaacagcgttaggccttgttgccgcaggccttggcgtgacattgatacaaaatagtttgcgctataacttgcctaaaggggctattttacgcgaggtgccctggatgaatattaccacccagctttgggctgtatggcacaaagcaaatttacgtccattagttgtctattttagagagcttttaaatcaaattgagaatgaaaaaataacgagctaatcgttatatagagcgcatatcgcatataaaaattaatatattactcatttcagtacggtaataataaattattaccgtactgtttttactttatggctttagccagtttaagtcgcgttagcgtcttaaacataaaaccacccgctttgcgggtggagttcaaaggttataccaagaaaaacacctttccgttacgatatagatgttcaagctaatattcgtaactcaaataaggaaaggtgtttatgggcattaaagcacaaagctcagcgcatacaaagtggctgtgtaaataccatatcgtcttttcgccgaaatatagacggaaagtgatttttaataatattcgttcaagtgtgggagagatcctcagagacctttgtaagtataaaggtgtggaaataatcgaaggtcatctcatgccagctcatgttcatatgttggtgagtattccaccaaagctaagcgtttcaagctttatgggatatttgaagggtaaaagttcgttgatgatctttgatagacacgccaatttaaaatataaatttggcaacagaaagttttgggcggaagggttctatgtcagtacggtagggctaaatgaagcgacaattcaaaagtatatcagagagcaagaaaagtcggatttaatctcggataaattgagtagtaaagagcatgtagaccccttcaaggggtaggccaaagcagcaaagacacttagcttgaacgaagagaaagcagcgtcatttaggcgcagtcggtaacaagcccttatagggcaagagcaaaccacccgttatacgggtggttatgattttgatataaacaggggggctaagtactatttttttcaattttttctacaatcttgttgtactctttccagataacagacagtggcgaatttaaacagcaaattgagatagaaccgcctgttgctggatggtactcgtatttagattttcccctatttacacgttttggcagtatgttatccgctggattttttctttttctttctaacatcaatcataacctcactagcagattatctgatggccagatagtggaatattaatatcttgctaacctgttttttttatttcttatgtaaaaaataacaagtgaaaatcttaatatgaaatggtggctttttccaattatcacagcattaaaatttaataatctcatttgaagaaagatattgctatatgttttcttaaattcaagagatttcaacattaaattttgtcgttattttagtgtttttaatgaatgcaattattgctgtgtcgagagattaacgacattgatagattgtaaaataaacaattgattttctatctatcaaacatgcgggcagtgattaaaagaagcgcttataagcgttttatatttaattacttttgaaaaagttgatctttgtttgttatttgtttcttttttgtgtgttaattgtttcgtaagatgtgcatcttaaatacagctgatatcaacaaaacagaccatttattcgtcattaagtatgattaacaggcctaaaatagggccgttggcatgaatgtaacttagtgcaaatgttcataaacgctaaagtaaatgtaaaaatttcattaaaagttacccattgaaatagatattgtgttacattcttttcgttttactggctagtatctctgtgtctcattcgcagaattgtgttacttgttaataataaaggatattaagcacaataaattttagacggatactgattatggtcagctaatgtttgctaatagtaaggggaaaatatcttgacggatctgattaacttcattaacaacattctttgggactacgtattaatatacttgcttcttggggttggcctttacttcactatacgatttggttttatacaacttagccattttggccacatgttttcagtcctgaaacacagcaagaaatcagataaatccggcatctcatcttttcaggctttatgtaccagccttgcggcgcgcgtagggaccgggaatcttgccggagttgcgattgcactgactgctggtggccctggggctattttctggatgtgggttgttgcatttattggtatggcaacttcctttgtggaaagcacgcttgctcagttgtacaagacgaaagacgatcagggaaattatcgtggtggcccagcctactacatggagaaagggttgaagaagcggtggatgggtgtattgttttcattcttccttattatcgcgtttggtcttgtatttaatgccgttcaggcaaactcaattgcacaagcagcttcttttgccttcgatatcaatccattatatgtcggtattgcattagtcattattagtggtgtgattatttttggcggtttgcgctcaatcgcgcgggttgctgaattagttgtcccatttatggcgggtgcatatttaattctggcattctgggttgtaggccacaatattgaacgtattccggaagtatttgcattaatctttaagagtgcttttggttttcaggaagctgcggcaggagcattgggttatggtatttcccaggcaatgcttcagggcgttcagcgtggtttgttctcgaatgaagcgggaatgggttctgcaccaaacgcagcggcttctgcttctccatatccgccacatccggcctctcaggggtatgtgcagatgttgggggtatttatggatacgatcgttatctgtagtgctacagcagttattattctttcttcaggcatccttaatgagaatattactgccatcagcggcattgaattgacgcaacgtgcgctatcctccgcagttggtcattggggaacaactttcgttgccattgcaattttcttctttgcctttacatcaattattgctaactacgcttatgctgaaagtaatatgatattcctcgaacgtaaccatactgcaggtttattcattttacgtattgcagcattagccatggtgatgttcggtacaatggcggaagtgcctttagtctggaatatggcaaacgtatccatggcctgtatggctattgtgaacctgatagctattttcttgttatcaggcattgcgctgaaattggctaaagactataaccagcagagacaagcagggaagttgccaacatttgatattaatatgtatccggagctccaaaagcagattgaagaaggcatttgggataatgagccggctcagaagaatcaaaaacgtaatagctgaaattaagaccaatattcattattagtaaaataaaatgaatagacatattagccggatattccagatttaatggaagtccggcttttatgttattgtaaaaacggtataacgcatagcattccagccgataaaaagacagcatctattctagtttcatctactatatagtgacattattcaatttttcttctgttattgtataaatatgatgagaaaaatcttagtaggtatgcttattacgctattgattggttgtagtcggcaatccccattggaagaaaggaatgattatcttattgatcattcttattcgtattcgacaaaacagaatattgaatcagttaagtttctggtcgtacattacacggctttgaatgagaaacgttccttacgggctctgactggcggtaatgtcagcgtccagtatttgattcccgctcatcccaaatataaaaataatgaaccgattatttttcaattatcttctgagggagaaaaagcttggcatgccggcagaagtgaatggagggggtataaaaatttaaataattattctatcggcatagaaatagttaattgtggatttaaaaaatacttttttaaaaaagagtggtgtgaatatcatccaacacaaatagatgctttgatccgactggcaaaagatattatccgtaggcataaaattgaagctgtgaatgtggttggtcatagtgatattgctccacttcggaaagaagatcccgggcctgtttttccatggcatactctttatgaagaagggatcggggcctggcctgatgctgccacggtcagtaaatatttagctgacagagcaccagatacgcctgttcccgttatcaaaatacaaaaagcactggctgtttatgggtattctattccgcagacaggctatctggatgtgcatacgcataaaacgatccgggcatttcagatgcattttcgtccatcagatattcagggttatcccgatgcagaaacggaagcgatagcattagccttagttgaaaagtataaattaaatgaaaactaatctcgttgtagcactaaggatgatggttgagaagttagtaaggtagcggcctgatattgatgtctggccgcataacttatcttatgattagcaattgtaagacagatgtaatggaagtttaacttcaagctctatatctgtactttgacgaaaatcgtaaggtgtaatgccatattctttacggaacatataagtaaagtgggattgagagccgaagccaaaatccagcgcaatatcaaaaatgggttgggaactgttcttcagaagatgtacagcaccagccagacgacgttgacgtatgtatttacccagtgagatcccggtgacttccttgaatattttctgcatgtgccaaagcgaatagccagagtaagcagcaagttcttcaagatggatgacacgaccaaggtggttttctatccatttactcagtgcgcatacaagtgctaagtgattatcctgtggcattacaattataaattggttaaaggtgatgggaagtatacacaacttcttttcaagattttagttttatacataatcgacaatcgagagttaattttactcttatcgggcctgaatatgcattacaatcacaaggggacgaagagtgaattagtatgcatttccggtatttattctttgtgaatgatgttttaatattcatctgatttgaatgagtaaactaaatattgggtcaaaattagagtctgacacgatagcaatagtgtcagggcagtttgggtatgatagatcgcgcaaaaattgaagaaatctaaggtttcttcggccagttcaggtccaaaacgacaaataaaatagtttaaacaggttctatacccaatggatttcgggctgaatcgtagcggtaagtgagctaagccaacacagaaatggcctgaaagacgacggatataattatcgaaataagaggactagatgacggggcatatacaacagtcgacgcttaagcgtggtttaaagaacaggcatattcagcttattgcactcggtggctcagtaggaacagggttatttttgggaattgcccaaacgataaaaatggccgggccttcagtgcttctggggtatgccattagtggttttatcgcattcctgataatgcgccagttgggggaaatggttgttgcagagccagtagcaggttcttttagccactttgcttataaatattggggtaattttgccggttttctatccggttggaattactgggttatgtttatactggttggaatggcggagctcacagctgtcggtatgtatattcaatactggtggcctgagatcccaacgtgggtttcagcagcaatattttttgtggtgattaactctgtcaatttaattaatgtccggctctatggtgaggcagaattctggttctctatgattaaagtcggagccattatcggcatgatcctcttcggttcttacttgctcattagtggaacaggagggccacaggccagcgtaagtaatttatggcagtatggcggtttcatgcctaatggtgctgcgggtctgatcacagcaatggctgtaattatgttttcattcggcggattggaaactgtaggaattacggcggcagaagctgaaaatccagaaaaaaatatcccgaaggcaactaatcaggttgtgtaccgtattttactgttttatatcggttcgttgttcattctattgtctctttacccgtggataaaagttgttgaggggggaagtccatttgttctgattttccataacctggatagcttttgggttgctaatgccttgaatattgttgttttgactgcagcgttgtcggtttataacagcggcgtttattgtaacagccgaatgctgtacggcttggctaagcagggtaatgcaccacgtattctgaccaaagtgaataagcgcggtgttccggttttatcaattgcattgtcagcgttggcaacatcgataggtgtattaattaactatgttatgccgggtaaggcatttgagcttttgatggcattggtagtgacaaccttagtcattaattggattatgatttgtgtgtcacacctgaaatttcgggctgcaaagaatgccgaaggggttaagacaagtttcagagcattctggtatccatttggtaatttcctgtgtctgatatttctggcttgtattcttattatcatcctgacgatacctggtatacgtatatctgttatcctcatgccattctggattggagcattgtgggttggttatttattttccagatccaataaagtaaagacataacttgatagttttaaaatgagtacattttatcagccgggcataatgcccggctgatttttttttatggctttagccagtttaagtcgcgttagcgtcttaaacataaaaccacccgctttgcgggtggagttcaaaggttataccaagaaaaacacctttccgttacgatatagatgttcaagctaatattcgtaactcaaataaggaaaggtgtttatgggcattaaagcacaaagctcagcgcatacaaagtggctgtgtaaataccatatcgtcttttcgccgaaatatagacggaaagtgatttttaataatattcgttcaagtgtgggagagatcctcagagacctttgtaagtataaaggtgtggaaataatcgaaggtcatctcatgccagatcatgttcatatgttggtgagtattccaccaaagctaagcgtttcaagctttatgggatatttgaagggtaaaagttcgttgatgatctttgatagacacgccaatttaaaatataaatttggcaacagaaagttttgggcggaagggttctatgtcagtacggtagggctaaatgaagcgacaattcaaaaatatatcagagagcaagaaaagtcggatttaatctcggataaattgagtagtaaagagcatgtagaccccttcaaggggtaggccaaagcagcaaagacacttagcttgaacgaagagaaagcagcgtcatttaggcgcagtcggtaacaagcccttatagggcaagagcaaaccacccgttatacgggtggttatgattttttcaggctatttccggcccagaatatctttaacttccgcatctgaaagtaagcactcaccttgatggataatcattttttgggtaattgctctggagacaacatacgtgatttccagtaatacacgttcttccacggagcaaaggcctccttccgattgttccaatggatgaataagtacccgatgtctgcgcccaataaatctctcaataaatcgcatcagaccatgttgtttaaacaacgaatccaattgcagctttgcatcatagaaatccccaaccaataagcgagaagtgctgaaatttcctgtaatactcagttctttttgattattgagatttttcagggtcatttgattggttttaattttcaggtagagatcgaccatacatatccttatttgattttggcttatacacttcgtctttcaagttgcctctttgttggctgcgctcacttaccccagtcaccgtttttataaacatacggttatctatgctcccggggatgagttcccttgccgccgcgatgcattttgaaatccattgtgtatagatagggtgcagacaaaatgattaattcaatcccagttcttctttaagcggctttaaataacggcggctgacgggaatacgtgcatcattgcgtaaaactaattctgcatgaccgttttccccgaaaacaatttcccgcagatgggtcatattgaccagatactggcgatggcagcgggtcaggggagtacgggtttccagtgtacgtagagttaattccgtaaaaccctcttgcccatcggtgttcatcacatagacaccactcatgcgtgaggtgatgtataacacttcatccagttgcatcagccatatccggctgtgccctgtgcagggaatatatttcagctgctcattttctggctgtaagtctgccagatgctgtttttgatagcctgaacgcagtcgctgtaatgttttgctcaaccgctctttttccagcggctttagcagataatcaaaggcgtgttcctcaaacgcttgtattgcatattcatcaaaagccgtgagaaaaacgatataggggcggtgctccgggtcgagcatacctaccatttccagcccggtaatgcggggcatctgaatatcaaggaaaaccacatccggtttcaagcgatgaatagcaccaattgcttctactgcattggcacattcaccaatgatttgaatatccgtttcttctgccagcaggcagcgtagattttcccgggccagtggctcatcatcaacaatcaatacattcatatttatgctttcttatccgcttcttcttccagtggtaaacacaaaatgacacgggtaaactcttccggctggcaatcaacacgcacaccatagtgctcaccgtagcgaagtcgcagccgtttatctaccagactcatcccaagcccatcccccaatttttgtgggcaatacagccctgcattatcttcaatttcaaccaataacagattggtttgctggtaggctctaatcgtaattcttcctgtatccagtaactgtgatgtgccatgtttaattgcattttcgaccatcggttgtagggaaaatgcgggtaatctggcgtagcgcagtgattccgggatatctatggttatctggaggcgttcacagaagcgcgctttctcaatctgtaagtaagcattcacatgctctatctcattttgcagtgtggcaatgtcttccggacgtttcagattcttgcggaaaaatgttgaaaggtactgtacgagctggcctgcctgttggctatcacgtcgtattacggcctgcaatgtattcagggcattaaataaaaagtgaggatttacttgcgcgtgaagcagcttcacttctgattgcagcaaagattgtttattccgttcatactgcccggcaaggatttgggctgaaagcaggctggcaatcccttcccctaacgttcggttgattgaactgaataagcggtttttggcttcgtacaatttgattgtgccgatgacttgctgattctcaccccgcagaggaataaccaatgctgaacccagcttacaagtggggtttagggaacaacaataagggatttcattgccatcggcatagacgacctcattattggctattgcgcgatgtgattgctcagaggcaatgggagtacccggcagatgatggtctgagccaatcccaataaacgccagtaacttatcccgatctgtaattgccacagcaccgatttctagttcctgatagatgacttttgccacacgcatactgttaatttcattaaatcccttcagtaatatcccttcggtacacaccgcaattttcaaagcctgagcagaaaaggcgctggtatatttttcaaagatagcccgcctgtccagcaagatacggataaacatagcagcgccgatactgttggcgatgatcatcggagcggcaatattttttactaactggagtgcttcactgaaggggttagtaaacagcagaataattcccatttgggcacattctgcaaaaaaagtcacaatagccgcagtccataaattcagtaatttattgatcctgccgcgcttcattaaataaatatgaacaaggccgccaagtacaccttctatgattgttgataccatacagctgaatgcggtcatgccacccagagaatagcgatgtaatcctccggtgaatccgaccattgccccaacagtcggtccaccaagtaaaccaccgagtacggcaccgatagcgcgggtattggcgatagaatcattcacattcaggccaaaataggttcccatcacgcagaagatggaaaagatgacataacacatgagcttatgaggtaagcgaacactcacttgcagtagagggatgaacagcggtgttttactcaacagccaggcaattaccagataaatacacatctgctgaagaagtaataacacgaggttaaattcgtacatgttttttcacagtggatttgataattataaataaatttatacagttattatcaaagtttgaatttaacatcgtcaatagaatagcgggaattaacgtagttttggatggaaagaagttaatccgccctgctcagggcggatttttactccggaaatgagcagaaggattatatacagataacgtaatcggtcactgtttcgttgataacatgtgctgttccgtcatcaatattgacggcaaaatgggcatttttaccgtcttcatctattcctgatgttgaagagcgataagaacggaattgtggccatccgtacaaatcatgcatttcattcttctggtggatttggtataggttgagcagatcttcttttgtcggtaattctttatgtattttatggcaataccacacggctccccgataaatacggcgcggccagtgttcaccattttcggtatatgtagtcattccttgcatccccatagcatccagttctgcttgtagcagaggtcggctaaagacacgtccattcgcccctgttgctgtattggccatatgtccccagaaatttgcatattgagaatcagggctggttgcaacggtaaaggtgacatgcctagtttgcggtgctgaaacgccatatcctgctacttgtaacgttgttttgacacccagaccatttggatctgtgaggggaagggataatgtgccattatcaccagtgactccctgatagtgaccggcattaccattgacctgtagtgtcactgcctgatgaatattctgacgattcagtgcttcagtggcttttacctctatcggaacattccttacgggttggccgtgattgaatgtctgcacactcagagtgattgtttcgccttttttagctttgccagtattgacggcgactttcagattatctgcaatgcccttgatcttgccgccttctgttccgccataggtataattaccctgttcctggcccatactggtatcaatcgtttttgtatttccggtaatattaagcccattttgtgcctgaacaatgagtgccttgactttgcctgcatcttccagtgtcagtgtataagcggggattttacctgattcagtaattgttgagcctttagtaatatcaacatttcctttatccccccacacataacgtgacttgtctgtactttctccattgttggcattgaaggtataggacgctttaagagtatggcccatttccagttggcctgacattctgacatttttaatgatgggtttatcaggatggaagaacgtgatctcgattggtgtgaaagtcagctttttgaatttagctgtcactgtcagtacacctattttttcgccagcagtgagtaatgcttcataggtgcccggttgagtttctttgatttttccaatcgttggcgtttcacctgctccacttaattcgctgctgacgaatttgagatcttcggcagaatcaggaatcgggttgccattgccatcttttagcaccaatttaagaatggtgctggaatgaccatcagcggaaagctcgtgatctcttgctgtgaatgtcgatttattaacacttgcctctgcttgtagcacctgaacctgagtttctgcccgtttggaagcattatcgtgttcatcataagcaatcgcgcttatggtataagcattgttaccactatggtgatatttaggtagtgtcagcaggtaaagcttgtcgctctggcgttcaattttacccccattggcgagcaggttggctgcatcccactgaattgttttcaatccatatttgctgtttacactaatatgaatcggttttatttcaccggcatgaccggaaatcaggctatctaatgtcaggcggataacttcacgtttacggtattccagaacgatttggttattacgatcaacgagatcatagcggctaccctgtagagtatgactgaaaccaacggcatcaggattaatttgttttgaccacggagtaccgatttcataattcatttctaaattgaactgcgtatctccattgccggacatatcctgtttgcgatcgataccaaaagtcagtagtgggataggggtatagttaatgcctgcggtaaacgcagccgggtttttcccgcggtgatctttattgattaatccgacttcattaccgaaatattgttcatataccagcttaccaccaagctgcggcagagcggggatataaccctgtgctctcagatcgaacccattagcaggacgctcatcataatctttcaggaagcgtgattctctccagttacttaaacgtaaataaccgttcatacccagtttcagataattgcgtgtatattctgcaccgaggccaaaccgggtattatttccggtgaaatcgtgatccagaaaagcgttgtaccccaacatccagccatcaaaaaattgtcgttgcccgataccgaaattaatggtgttgcgtttatcaatacggcgcaggccaaactgagtaaaattcattttactctcgctatcatacagaggcagcagcatatcaagctggctgccatccagatgaccacgtcgatcaatattagcctgtacccgcgctgtaccgtaatgtcccagccaattctggaattgttgattggcttcgccgacagccagattacttaactgattgattgcactgttacctacgttatcgctgctcagtatttctccgatgcgagtggcggaatttgccagagcgctgcctgtatcatcggtttcgggggatcgccctgattcaacttgccctgattccatctgtcctgattcaatcggttttgatacgaattgtgccgatgaaaaataattgaatggtaaatacttattagggcgaggtttgggtacgttaatctcatcacctgcactaagttctgaaaatggcttattggaggcgtataactgatttatttctttaagttgatcaatcgtgaaactatagcgtttggcaattgtgtaaatagtttctcctggcttcagaatataagactctgtcagtattgctatcaaaggagcatattgagaagtcgtcagtgtttcagccatggcgatagtgggagcaaatgcgccagccagtggaaacgaaaactgggcaataatgtttacccaggctactcgtttcagcacggtttgctgattttttacccacggctcatcaaattttttatacataaatattagacctgtaacagtaaaagcgtcaggtgatgacggtataaaagaatggcaaagtgacattaccttatttaaggcatcacaaatgagctagcaaaaattctgttagctaattaacgctcggattatttatctggcatatataatatatgtggttttttattccagcataaatttattttttggtcaacaccactttctatattagacgtttaaaataaaaaaagagagccagaaatagaataattaagaagtaatttatacctgtttcattatttttcaacactatgattttatagattatattaattgatccatagcgtttcagggtgcttatttacatgatggaaaattatctgatgaaggaatgcgataattctaaatataatgaagtttttgacaattaaatatctattgctaattattactggtttttgtttgcattttcattttattaagtattgctactttgatttattatcgaaatgtatttagatgtaaagaaaataagagcgattcttttatttataataaaatattaattaataaattaattttaatcataaaaggtattaagtaaggcaattcgactctgaaaattgattaattctcttccataccgcccctaaaaattgattaggtatataatgttataaatgactgagcaaagtatttaacttttgtcaatgatgaagcgcacgaatttctaaaaaggatttgtgaaaatagtgtcacactaggcaactaatcgtcattcgataagaaacggatcatagagattaagggttaaaacgacagattaagaccatgtcgttgcatgggtgcagctaataaacttaatgccgtaaatctccgacgagttttgttcgggtagttgtttggagcttacaaaacataatgaagaaaagaacacttttcacaatattgctgattatttttctgactgcaatggctgtactttttcgttcacatcatcaggatttattgctacagggagaggtagacgctcctgaagtcatcattacatccaaagcatccggacgtgtagccgcgcttcacgttaggagaggtgacgatgttaaagcagggcaattgctgattagtcttgatggccctgaattggctgcaaaagttgccgccgctcaggcagcccgtgatcaggccaaagcaaaactcgatttatccatcagtggtacacgggaagaggatatccgtagtctggaagctgcatttttgcaggcagaatttggctataacaatgcaaagcgtgaatttgagcggctgagccatatttcagtcaaaggctattcatctgccagtgaactggataatgcccgaaatgcccgcgatatcgcctatcagaaaatgttggcggcgaaagcagagctggatgcgggaaaaaatggcgatcgtattgaactgaggcaacagtatcaggctgcactgaatgaagcggaagaaaaattacaggaattaaaaatccagagtaatgatttacaagtaacagcccctgttgctggtgaaatcgggccacttccggcagaagtcggtcagctttttaatgccggcagcccattggcaaccctcgtgcgtattcccgaaacctacttcgtctataacctgcgtgaagatattctggcgaaagtgcgcaaaggtgacaaagttaaactgcgtgtaccagcgctggataataaagagattgaggcagaagtgcgttatatcgcgccaatgggagattacgcgacaaaacgtgcaacccgtgcgacaggggacttcgatctgagaacatttgaagtacgtttatacccatcgcaaccgattgatggtctgcgccccggtatgagtgcgttatggctctggggtcgctaaggtggcaggctgatgaacagaaaaggtggatggtttggtgttaagtggagcagcttcggatggaatagttttaggtggcatgctcatgaatggaatatctttaagcaggcctttaataaggagctgaaggttgcatcccgtagccctgtttttcattggctgagttggctgtttccgttggtgctgtttatcttaatcagtgccaccttttcggaagggacgctgttaaacctgcctgtttcggcagtggataatgatcacagttccttatcacgatcgctgatccgtaatctgaatgcagcaccccatgccgatatcaaaacttatgatggtggtctggctgagtcattagagcgtctgggtagcgcagaggattatgctcttctctatcttccctttgatctggaaaaagatgcgctgagtgggaaacagccaacggtgaggatgtattacaatgcgttgttttatggtgcgggtcgttatgcatctgtggatttcagtgggctgatggcagaaacgaatgccaaatatcgcagtgtcatcgcatctgaaattggccgtcaactccctccgcttgccagagcgactatgtcttatgacagtctgttcaatgccagtggcagctatatttactatcagcaattcgctgcaaccatccacttattacagctttttgttgtaaccggtacgatttataccatggcgagaggtaaacacctcctgagcgagaaatcttttgtaccggctttaatagggaaactagccccgcatacagtcactttcaccctgttgttgatggtagaaatcatggtgctggtggcattttctgatgccaaagtcgcaggcaacccgctctatatgcctgtggtgggatttttctatgtgattgcagctcaaagcattggcctgttactgtttacttttactaacagtgcaataacggcttataccctgattgggatgctggtgagtatcgctatgtcgttttccggtatggtgatgcctgaattatcaatggtgtggccagcaaggcttatttcaaatctggaaccgttaacccatgccctaaatgctatgttcgatatttttttacgggaagtgtcattaaaaatcatcatttacgtttgcatgttactggcaatttaccctttggtttgtgccttactggttcgcaatcgcctgtggaaacggcttagtcagtccggggagagcctataatgcaggggaagccggaaaatgaataactggaaaatgtactggcagactttccgcacggtattgttgtcaatgttggaaaaacccatgtggctgatgttgattgtttctctgtgcattatgagtctggtttacgttaaacccacattatgggatctgcccgtcgcggtcattgatcaggataatagccatatgagccgtgcgctgatccgtcacgttgatgcgacagcaaaagtagaaaccaaaaattatgccagtctcgcggatgcccgtgctgacatgctgcatcgggaaatatttgccattatcattatcccgacagatttcgagaagcgtcttttaggcgggaaaaatgtgacagttccggtttatggtgatgcgactaaccgtctggctaacggggagattcaacaggatttgatactggcttaccaaaagttactgtcagaatacaatacaaaattacttttgaagtcggggttcagcacagaacagataaaggttctgctgcaaccgatcaaaggagaaacaatcggattattcaatccgggggtgagttatgccgccattgtttttcccggattattagtcatgcttttgcagcactccctactgattgccagcgtacgtgtaagtatagccatacgtgtaacccctaaaggcaagcccccgctgcctgtctatctgggagcgctgtccgcactgttgcctatctggttgtttttatccgtcatcttttttgtgctatggccttgggttctgggatacaggcaggatgcgccaatttatcaattgctattaatgacttttccattcctgctggcggtactggggctgggcaaactggttacagagtgcttacgcagcgtggaaatgatttatctgacactggcatttattactacaccggtgttttatatttccggcacaatctggcccatacaggcaatgcctgattgggtaagggtaatctcatccgctttaccatccacatgggcaaccaaaattatcgcagggatgaaccaaatgaatatgcctttgcaaagtatgctgggggatatcgcgatgatcttactcctaggggttatctatatgatcctggggatcttggttggaatgctacgtaatggtgaattacgggagctgagaggatttatgaaacgcctgagagggaaataataataatctcgaattatcgtcaggtagatagtgaaaatatattgatttggggcaggttccgtgtaaaggtttcaggtgctgatttactgcatctcaatgtcaatttttatgatggatttttgagatagcatcaggaaatatctcagtattttggcagaataacaaaccccttttcatgaaaaaggaactggtttgtattaggttaaatccactctccattttgatttattatagttagctgaatttatcaaaatggaacagaaagagggcgctgatcagcacgatcgcgcgttatcgtcatgttaatcagggtcgaaattccggttgatgctatggggattgatcgcttgttgcgggaatcctttgagacatcggcagaagctgagttagtccacaagctaagagaagatggcttgttgacactgggtgttgttgcgactgacgatgaaggccacgtgattggctatgttggttttacaccggttgatgtcaatggacaggatcataactgggttgggttagcgccattggcggtggccgaatcgtaccgtcgtcaggggattggcgagaagctggtatatgaaggcttggacagcctgaatgaattcggctatggggcagttgttgtacttggtgagcctgaatattatcagagatttggtttcaggcttgctgaagagtatcaactactttgccagtggcctggctgtgaacgatattttcaggtttacacactagcagatgtctcgctggatgattgccatggtctggtcacgtattcccgtcattttgctggcgtatgacatgttaccggtattctgatggcagcatgtaagttaacaaaactcagttaacagaacctatgataggtaggtaactatacagacaggctgggcagtcaccagcctttctttttgctgcttactcagttgttttacccgatattccagtctcaaagccgtattcctgtccggcactgcactatgatagaccaacgttaatggcccttttcctttcagcgcttttgctccttttccggcggtatgctgagccagacggcgagaaacatctgtcgtaattccagtatataatgaaccattccgcgtttttatcaggtaaagataccaattagtttctttaatattcattatttttcttaagttatttccaatgtattaataacaataaagattaatgcattgattagctatcatcttaatgactacctttctacaattataacttatggattatattaaattatatgtctattcactgtaggtaatcattttttcaattcaaaattattgaataagaatagcagtaattgctaattatcatttttctgataagcgtataaattgatccgcatcacaaagggtaactcctatatttacaagtagtcagaggatttaaagatgaaaaacgtgaaatttattgctgccgtgttgtcattaagtgctatttcatttggttcatttgccgcaaccgaagtcaaaagtgctgatggagagaagattggtgtggtttctgtagcaggagcggaaacgctggatagcctgactgaggcattatccaaaaaagctgataaagctggagcccaatcttttcgtattatttctgcaaccggcaaaaataaattgtatggtgttgctgaaatctataaataacttatagttatcccagactatagttatttattagataaatatcagaacacgtaactggaagttatctaacgtgttctgattaaaagacagaaatataacggtatataaatagatggaatcggataaagaaaaattaataatatctcagtatattaccaatcaacatgtcttcacactttgtacttcttcacctcaggatctctggtgtgccagttgtttctatctctttgacgctgaaaaaatggttctttggtttatgaccgaagctgatacgcgtcacggtaaaataatgcaggaaaatgccatcgttgcgggaacgatcgcagagcaaacgcacaatatttcccagatcaaagggattcagtttcgtggtgaggttgttgcgctgacgggtaaagatgaaaccattgccagagcggcttattgccaccagtttcctgttgcgataacagcaaaaacacctatctggcaattgaaccttaatgagatcaaaatggtggataattcgcttggttttggcaaaaaattatactggcagcgttaatctcagcgtagataatgaattacctgattacggcttccccgccagatcagcatcggatcctgttgttcctgttcaaatttcccgtcaactaacacattaatatggctgacaatttcctgttgaagtccacttaattcgtcgagaacatagcctgtccatagccagatatctttatccgggcactctcttttgacccgtttgaccagccggagaatcgcagctgtattatcgggatgaagcggatcaccaccggataatgacagtccttgtcgcctgatgcgatgatcattcagatcagcaatgagctgattttcaactgccatagtgaaaggacgaccggaatcagtccgccacgtcgtctggttatagcagccacgacactgatgggagcagcccgcgacaaacagagtgcagcgggttccggggccgttgaccacatcgactggataatattgatgataattcatgatattagccaatatgcccattattgagatgtttaatacggcgttttacctcttcctgtttacctgtattaaatgggcgcgcatcagggctgccaagatatccgcaaacccgtcttatcacggaaacctgggctgaatcatgattaccacaagcagggcaggtgaagcctttactggtacaggaaaactctccggtaaaaccgcattgatagcattcatcaatcggggtattggttccataataaggaacacggaaataactgtaatcccacacatcttccagtgcctttaaattatgttgtaagttgggatattcgccgtagcagataaaaccaccattcgccaacggagggtatggtgcttcaaaatccagtttatcgtaaggattgaccttcttctctacatccagatggaagctgtttgtgtaatagcctttatctgtaactccactgattacgccgaactcagcgacatcaagacgacaaaaacggtcacataaactctcgctcggcgtactgtataagctgaagccatagccagtttgctgtttccattcatcaacggctttacgcagatgtttaacgatagcgagtgctttttggcggcgctgttcattatcaaatagatgagtatggtcaccatataacgcattaatcgtttcatggataccgatataccctaacgaaatagaagcccgcccatgtttgaagatttcggcaacactgtcatcttcttttagtcttactccacaggctccttccatataaagaataggggcgacccgtgctttggtactttccagccgttcaatgcgcgtcattaatgcttttctggcaatcagcaagcgttgatctaataactgccagaagcgcatttcatcaccctttgcttcaattgcaatgcggggaagattcaggctgataacccccagattattgcggccggcatgaatttgatgaccattctcttcataaacgcccagaaaacttcggcaacccatcggggttttaaatgagccggtgactttaatcacctgatcgtaattaagaatatcgggatacatacgcttgctggcacattccagcgctaataatttgatgtcatagttgggatcaccaaaccggtgattcagcccatcacgaatggcaaaaaccagtttcgggaatactgccgttttgcggtttttacccagaccagcgaggcgattacgtaaaatagccgtctgaattaaacgggattcttttgatgttcccaacccaaatccaaatgtcacaaacggcgtttgcccattggcggtatgcagcgtattcacttcatattccagagactggaatgcatcgtaacattccttttccgtgcgggattctgcgtaagctttcttatctgcgatttgccactcttcagcaatcatcaggtgcttgtgatagctggctttaacaaagggagcaagcacttcatcaatacggtcaatggttgtgccgccataaatatgactggcgacctgagcaataatttgggctgtgacagcagttgctgtggagatagaccttggcggctcaatttccgcatttcccatcttaaagccgcgggtcagcatcccttctaaatcgaccaacatgcagttaaacatcgggaaaaacggagcataatccagatcatggtagtgaatttcgcctttctcatgtgccagaacgacatcactcggcagcatatgctgtttggcatactgtctggcaacgatccccgccagcaaatcacgctgagtagggatcactctggcatctttattcgcattttcattgagtaaaggaagatcactttgctcgatcagcccgcgtatttcctgatccagacgatcatgccatccgtgaagagtattttccccgacgttaaccagatggtcattacgctgcatcacaaccgttttcacaataggattcctcagtatgttatccaacagataaatcgtaacgactattgcagtgcctatcacaacgacagttgcataatggctagtttttaactttgtgtggataaccttgtgcataagcactatatgtagtgattattttatatttaagcacaatatgtggaatattgaagcgaatataccgctcaataaattgatctgaaacaaagaaagggaaagttgttccgcaaagagatagacacaaagagagcaaccaaccccaatattgagcctatcagggttgataacgctatgaattagctacgtactgcaatcgcttcgatttcgatttttacatcttttggcagacgagctacttcaacacatgaacgggcagggaatggcgcgttatgttcggtgaagaacgcttcataagcggcatttacaacagtgaagtcattcaggtctttaacaaacacagttgttttcacaatattggcaactttcaggccagactgctcaataatggctttaacgttttccagtgactggcgagtttgtgcggtaatatcttcagaaacagcccctgtttttggatcaacagggatttgaccggaagtaataaccatgctgcccagatcaacaccctgaacataagggccaattgcggctggtgcattttcggtatgaatggaacgtgacattaggggaactcctgtttaacgtcagaatgaaagatattgagaaggctttattatagtgtcactcagcccggcatcaactgagagatcttaatcgttgttgataacagcctgacgatcaaactctttctcacagtacttacagcgaacgatgacgtcatttgccgtttccatgacatggaagctgctttctacaggctcattatggctgatacagttaccattagggcagacaaggataccatcaatctgttctggcaggttgattggcattttcttcacgacaacataattttcaatgttattgacggttgcatgtggtgcatacatagcgagctggtttgcttgctgggctgtcaggaaggtattttcgagtttgatcagatctttcttccctaagtgattggaaggcaaattcaggccaatagtaatacgctgatcagtttctgtgagtttgaagagagacaataatttaaaaccgacctgagccggaatatggtcgataactgtgccgcatttaatggcttctacttgcagctgatggtcttgtggatgctcttgagtcatgttgtgttgtgaataccgtctggtattcttcctccggatattaggggatgcctacacatattttgtcatataagatttggcattgcatcttgtgtaaccggcacaattttaaaaggtatttaacctgttcaacagaaagaaaattaaaatttgatagcttttgactttgttgctagtctgtaaatatcttgttattttcaaataaataaaattaatgattaaagtctcttttatttaaataattaataaatcttattaaaatataactaagtgaaaacatagaagaatatgaaggttaatatgctgcattcttttactgagcagaaaattagtacaaaaaagctttttgactgggaaagcattaataaaatatttattaatgaatgtaatgagcctttagaagtcatttatgaaacggataaaataaaactgaaaccggtttatttccttgcgggtatcaatggcgctgttgaatattgtgcagtaagaaaaaatgtggctgaaaaattaatacaggcctcccaattattgcctgctcatttagggcttttagttttggatggttggcgttcacgggaaactcagcttgcattgcaggagaaaacacgggctaccattgcgcagcagtacagctacttatccattgaagaacaaaaagaattactggaacagtttgtggcaccggccccgactgagcaaaatccggtgagtccccatctgacagggggttcagtggatgtgacgctgtttgatattgtctccggtaacgcattgtttatgggcacagaatttgatgaagtagatgatctgtcttacaccgcagccttagaacaagcatcggatacaaacatgccggcagtattataccgtcggatactgcatcacgttatgcttcaggctggctttactaatctgccgactgagtggtggcattacgattatggtaatgctttatgggcattctataaaaatgatcaggctgtttatggtgcagtggaaggcatcagggaatcaggcagcacaatatagaatattatcggcctgaacagaataagaggttaaattacataatgaaaaataccttaattgacgctgataattcattaatgctatgggcttttattatgattgcggtagcggctgcaattatgctggaacaaaaatataagtgggcaactaaaataccgggtgcggttattgctctggtcatcgctattttggcttctaacttacatattattccgactgaagcacctgcttatgatgtcgtctgggaatatattgttcctttagccattccgctgctgttatttaaaaccaatttacataatctgattaccggcagctggcggttatttatattatttttgatttcctctgtcgcgacgatgattggtacagttgttgcctttcatttactcaggggatatatccctgagctggataaaatcagtgggatgatgtccgcatcttatacggggggtggggttaactttgccgcaatggcagccaaattagcaccatctgaaagtatgacggcatctactattgtcgctgatcatatgatgatggcggcttattttattatcctgatggttatatccggctggtcagtggcaaggaaattctggggaagcccttattctgatgcgattgacaataatccggaactggataaatcgcagactttagctgctgcttactggaaaccgaaaaatattgctctgaaagatatcgccttggcactggcatggtcaatttttatcgtagcgctgtcattccatctttcatcatggttaaaggcactgttcgggcagcctgacagcatctatcaggagctgattttcagtttaatatcagataaatacctgcttcttactacagtgacatttattctggtatcgatattcaaaaaaaccttcagcaatcttaatggcacgcaggaattaggcacttacgctatttacatgttttttgttgttatcggcataccggcatctgtccacgctattatcagtaatgcgccattgctgtttgtctttgtttttattattgccatgattaacctgttgatcactttctcagcagggaaagtatttaaattcagtctggaagaaaatattcttgcctgtaatgccaatattggcgggccaaccacagcggcagcaatggcaatcagccgtggctggaattccctagtcgggccgattatggtcattggtacagttggttatgtaattggtaattatgttggcacgtttgtttactttatggtggagaatatgtgataaccgatgaaattcagtccgtcaggaaagtatcatcttcctgagcatacagttcacaataagactatgtgcaagagagaccgggatcatatacattttcccaaagaaattatgggtaataacggatgctgtgacagtgactttatagccttttccctgattattacttgataaaacattcagggagactaaaacagttaagtgtatatcttccgatagcaggcataattcatcatcactgatatggataatcttgaaaaaatcaatagagcttccttcacgcacgttttcttctaaatgaccgccagagaacccattgattttttcaacacccgcgaggcttgatattttatctcttattgcaaaagacaaacgtatccataatggtgttttctttgtcatttcattataaacagtcagggcagtggctttatttttaataaaagtattttgctgactgtaatagtctaatttatcttttttatttaaaagcaaaaaaccaaattcatcacgatagtacatatgacaccacgctattatctttcctaatatacacttcgtctttcaagtgtctctttgataaagtataaaaaacgcccacaattgaattaaaaatgaacaatactttatcttgccaacgtcttatcattgcatttattttcaccaactcaaatatgccatctgacaatgtgatatccatcacatggcaggtcactgtatcaacaggaagataattcggttttctcgttgtataggaacggaataagtatcacaataaatctgttcggcgttcctgattcatctgccaatccgtggccaattctttgaccaccaggttaaaaatagagattgttatgaaattcaaatcaaaaataaaaccctatcacgctgcggcgggaggctgggggtcattggaggcaacaacacgttttgtctttgatagtaaacaagtattaaagaacatggttaatctgatgcgcatgaacaaacccagaggctttgattgcccgggatgtgcatggggtgatgataacaaaagccttttcagcttttgtgaaaatggcgcgaaagcagttacctgggaagcaacccggcggcatgtagaccgggagttttttgccacacatagtgtcagcaaactctacgaacaaagcgattactttctagaatatcaagggcgcgttattgaaccgatgcgctataaccatgagaccgatcactatgagcctattagctgggagcaggctttttctttgatcgccagacacattaatgggatggaaaacccgaaccagttggaactgtatacttccggtcgggccagtaatgaagcctcatggctgtatcagctatttggccgggtactggggactaataactttcctgattgctcaaatatgtgtcatgaagccagcggttacgggctgctgaaaagtctgggagtgggtaaaggaacgattcgtctgaatgattttgatcatgcagatgccatttttgtctttgggcagaatcccggaacaaatcacccacggatgctgcatagcctgcggcacgcagcagaacacggagctagaattgtcacctttaatacattgcgtgaacgtggcctagagcgctttgctgatccacaaaaacccctcgaagttgttactccaatggcaggcaatatcagccaccgttattatcagcctaaattaggcggagatatggctgctgtgcgggggatggtcaaagcgttgctggaagttcataactctcgtatagctgccggagcagcgggtatttttgctcaagactttatttcggctcataccgaaggtgtggaggcttatttacaggaagtggctgctactgaatgggtatttatagaggaacaatcaggtctgacgcagcaacagctacgcgaggctgccgatatttaccagcacgctgaacgtgtgatttgcacctgggcaatgggtattactcagcataaacactctattgatacagtccgtgagatcacaaacctgcaattactgtttgggcagttaggtaaacccggtgctggtgtatgcccggtgcgtggtcacagtaacgtacagggaaaccggacgatggggattaatgagcaaccgtctcaggctttccttgatagtctggcaaatcactttggttttgaacctccccgtgctcatggtcataatgtggtgcaagcgctggaggcaatgttacgtgatgaagtgaaggtactgattgcgctgggtggaaatctcgctgctgctgcgccggacagcccacgtacagaagaagcactccggcattgtgatttgactgttcatatcagtacgaaattaaatcgcagtcatcttgttaccggtaaaaaagatgctcttatcctaccggcactggggcgtacagaacaggatattcagctcagtggtgcgcagtttgttacggtagaagattcttttagcatggtgcacgcttccgaaggaataaataaaccactatctgatacacagcgttctgaaactgcgattgttgcgggcatggctgatgctgttttaggcaataccccaaccattaactggctggaattagccggagattacaacaaaatccgtgatcacattagcgcaactattcccggttttgctgactttaataaaaaatgtgaacatccgggcggcttctatcttggtaatgcagcagcggaactgcgttttcagaccccgagtaaaaaagctgaatttagccatgccccactgccagacacactgtttccccaaattgctggagaagacgttccctttgctttgcaaaccttgcgctcccatgatcaatacaacacaaccatctatggtttagatgaccgctatcgtggcgtttatggtcaacgggaagtcttatttatgaacccggaagatattgcccagtcgggctatcaggaaggagatctggttgatatcgagacaatctggcacgacggtattgaacgcaaagtatgtggatttaaattagttccttacactattccgcgtggtaaccttgccgcttattaccctgaaaccaatccgttagtaccgatggacagctttggtcatggtacaggtacacccacatccaaatctgttccggtgaagttatcgctgactgcactgaaggatgcagaatctcagcgtctcatataatacattgattcaggctcgttttttgggaaagacattaaaaccgagcctgctgttcgcctttaatcaaatgaaggtgaataatcagagcaaattgaatttttcattaggttgcaataaagccggtaatgacgtctgatcattcatttccatcagatggcgttcaatgacggtacaaattgcattgaggggtaaatcattaggtgaagttccgaatggatcttctaactcttcagccagcgcatcccatgataaaaaagcataggaaataaacactgaaacaaacggtgtcatacagtgcaaatcggtaaccagagcaaaaggcagtagggtacaaaaaagataaaccgttcgctggagtatcagcgtataggcgaaaggcacgggagtactggcgatacgctcacagccacccagaatatgggaaagctcattgaggttcttatccatcatttcataggtgatatcacttaataccccccctttcctccatgcaccgaggagaaggctcattttcagtaataaccgattagttggcatcgggctgcgaataatttcagcatatatttctgtgggcagaaggcgatataaatcttcttttggatctgtgccacgtaactgatgttttaaacaccagctaaacgcgataagcaaaacagaaaattgctgatgcaaatgagtttcatctggctggatactcttaatctggcgtaacaacgagcgctgagtaaccaataacgatccccagagtgctctggcttcgacaaaacggctgtaactggtgttattacgaaagccgagaaaaatggcgatagcgatccccagcaggctgaacggggcgacggtcaaatgaatgccaaggtgttcataccactgataactcacaactgcgatgatagacatgagtatattcagcattaaacggaaggtaatttttgataagactgagccatgccagtcaaatagacgaaagaaccagtgttggttaagacggatgatcatggtgaatacaaactgaccctggttctaaaattg

SEQ ID NO: 420 - DNA, 33524 bp, Xenorhabdus sp.
  CDS (15882)..(16319)
tcatttggatggattcttgctgctgcaaccggatcaatctcctgcaattgctgatgcaatgactcccacccgtgttcctctgcctcctgctcaatgaccgccctgacttcagggtctgctgaaggtagtggtgataacccttccagtaatgctttgaaatatagcatggttccgccgaccaggagcggaattctccctgcagccgtaatttctgccatttgttccagcgcatcgcgacggaaatcagcagcagaatacacgtcggcaggatccagaatatcaatcaaacggtgcggagcctgagcctgctcttctgcagacggtttcgcagtaccaatatccatgccacgataaaccagtgcagaatcaacgctaatcagttcaaccggaagatgctgacgcaaagcgattgataatgccgtttttcctgaggctgtcggccccataataaaaatggctgtgggcaaatgttgagtttttaaatcactcatgattaaaaagtgccaccactgcttgtaaatcaattaattgtaataaaccctctggcggagatcccactaattgagggcaaagacgttcaacatcagctaaaagctgaacagcctgtgcaatattccacgtttcatgttcactgcccaaatggcgggcaagccagattgccacctgctgtactgaaactgatgactgttccatcagataacccaacaacgccggaaaaagttttggcaggttttgttggcgcagaggcaacgataccgcatgaatggtcacttttccatgtgcgacagtcgattcaataccaaaagtcttcaatagctcactattctgtcgcaaaacattgacctctgtctcactgagagacaacttaagtgggataagaagtggctgtggtttaagcccctgctcacccggcgttaattgagcctgccgcaaccagcgttcagcaacaggcagtgacaataatccaatacccgaggccgattcaagcaatgcatagtggggagcgtagatactcaatactttaccgaaactataactactattttttccctgtacaggagttgaacgagcaggcattaatggtgatttttctgtgacagaagccgacttttcggaagtttttctttctgcgtccgaccgttcaggaaaaagtggctgcttttcttctggcgcaaactgcatcaatttttgatacaactcgccttgttttttctggtaactttccccctgataaggctgtctgataccactatgtcctgcctgatgacctgaagatggtgtttcagacgcggtacggggagaggatgacgttttttgcgttgacccggccgaagctgtttgtttttgtcggagaaaatggttttcccccgcagaaggccggttttccggtatccagtctgttgtctcttcctgacaatctagccccagttcagcgccgttgctgcgctgtttcagcaccgcagcaacaccctgataaataaaatcatgtaccagacgcgcctgatgaaaacgtacttcatgtttagctgggtgtacattcacatcaacctgatgcgggtctatctctaaatacagaacataagccggttgctgttcgccttgcagcaaatcctgataagcctgacggatagcatgattaatcagccgatcccgcatcatgcgcccattcacatagcaatactgaatatctgacgcggtatgagaacttttgggatcaacaacccagcccttgatagacaacatatcatgctgccatgacagtgccagcgcctgctgcataaatgccgtaccacaaatcgctgccagcctccgttcatgctgggattcatctttagccggacgatactgacgcacgagttttccattgtgattcagattgatcgccacatccagacgagcaagggcgattctgcgcacgacctcatcaatatgaccgaactcagttttttctgttctcagaaacttacgtcgggcaggagtattgtaaaacaggtccaaaacctcaaccgttgttccgacagggtgggcagcaggttttaccgtcacttccatatcacggccttcggcataagcctgccatgcttccgcctgcccctcagggcgggaagtcagggtcaaccgtgaaacagagctgatactggcaagcgcttcaccgcgaaatcccatactgacaatggcttccaaatcatccagagaggctattttactggtcgcatgacgggccagcgctaatgtgagatcctgtcggctaattccacagccattatcacgtatgcggattaattttgcgccaccacgttcaatatcgatatcaatacgggtagtgccggcatcaaggctattttccaccagctctttcactaccgatgccgggcgttcaaccacttcaccagcagcaatctggtttgctaattgtgggggtaatatcctgatagccatattcgaccttacctactttttcttggtaatttgcgatttttcttaaatcaccgggtttattacgtaccgtttaaaattattttggtgctgtctgcaacggattagcctgaaaatagtgacgcaatccaagatgaatcgcctgcgccagcttttcctgatattgattggagcctaacagctcttcttctgatgtgttactgataaatcctgtctccaccagaatggaaggaatatccggtgagcgcaaaacccctaagctggcatgttccggcgtgcgcttatgcagagaaccaacctgagataactgttgtagcaccttaaccgccacgtcataacctacccgctgtgaatgcccgaattgtaaatccagtactgcctgactcaaaaacggatctgtaccattagccagagcatctcccgcgccccccaataattcagactgtttctcatgttgctccagccagtttcccagctcgctgtttgcacgacgattagacaatacccatacagaagctcctctggcactgcgattaggagcagcatccgcatgaatggaaaccagcatatttgccttatgcttacgggcaacctcagagcgtccggctaccgagataaaataatctccgttgcgtgtcagaacgggtttaaacatcgggtcattacgcaaaagttcttccagcctgcgcgccacactgatggttacatttttttcccgtaatcctcgcggcccgatggctcccggatcctgtcctccatgcccggcatcgatagcaatcacaatcggatatttcccctgagcagttttatttatctgcttttttacaaccggggcattatgcgcagacacaggttttgtttcctgcatgacagaagtgacttcagccgtcttatttgttagtgactgcttactcttgtgtggagttgaaacctcactagatgcggtgttctctttaaatattgaaggactatttacagccccctcggccttcagagtgaaaataatctgatattgattaccggattgctttacaacggaagtggccgttgccttctgagccagttccagtacaacccgcttatgttgcgcatcaggcggctggctcgttcggactatcttcaccagattctgaccagataaacgcatcggcaatcctgtgataccggctgactgacgaatatccacaaccagcctttcaggattatgaagaggaaaaaagcgatactcgggatgcccgccagtgaaccccagcgtaacagtggcttcagatgaactgttacttacatgcacatttgatagtgttgatgctaccgccgttgtcataacccattggctcaaaacaacaaaaagcataaaaaacatcagccaatggggttgccatttttttatcgtcttcacacagaaggcattcatcatggtcagggattccttcataaggatttcagattatccagtaaactttcaccatattcagataacgccacaaaatgagcctgccgcccttcattgttataggctaaatgcaactcaatatcagcgttgggtaaaaaccctgctccttgttgcggccattccaccagacaaatggcatcctgatgaaaataatcgcggatccccataaattccagttcttcaggatcggccagacgatacaaatcaaaatgataaacagggcgtggctgtagagcataaggttcaactagtgtataagtcggacttttcacatgcccctgatgacccagcgcctgtagaaaaccacggctaaacgttgtttttccggcaccaagatcgccatatagataaataacatagccgcgttcgcaggctgctgccactgaattgcccaatgcaacggtggcattttcattcggaagtgataaaacaagttctttcatagaaaattatctattgttttattgaattaaagcctattggaatatacccatcgtttcccagaccatcgtctgaaacccataggatatatgaaagacatattagttagatagtttaaccaataaccataacataactcagctattatcatttactatcttctacccggaaacaaagcaaccagaaagacgaagggcaaaacctgtgttaacctatccgccctttacagcagtcactcaatatccaatggcaatccctctcgacctgaaccttctggcagcaaacatcaaacaatggggcctttctctcggttttcagcaagttggtatctgtgataccgatttatccacagaagagccgagactacaggagtggctcgataagcaataccagggcgaaatggactggatggcacgccacggcatgatgcgagcacgtcctcatgaattgttacccggtactttgcgggttatcagcgtgcgcatgaattacctgccggccaaagccgcttttgccagcaccctgaataatcctgagcaggggtatgttagtcgttatgcactgggcagagattatcataaactgctacgccagcggcttaaaaagctgggtgagcaaattcaggaatattgctccgcccataaatatcagggaatactgaatttccggcctttcgttgattccgctccgattatggagcgcccgcttgccgctaaagccggaattggctgggttggtaaacactcacttatattaaacagagagtcaggctcttggttctttctcggcgaattactggttaaccttcccctccctgttgactccccccaggaagagcaatgcgggcgttgtgttgcctgtatgaccacgtgtccgacaggtgccattgtcgagccttataccattgatgcccgccgctgcatttcatatctgacaattgaacttgagggtgtgatcccggaagagtttcgtccattaatgggcaaccggatttatggctgtgacgactgtcagcttatctgcccttggaatcgtttttcacaattaacagaagaagccgattttagccctcgcgcagcactacatactcctgaactactcgatttgttcaattggagcgaagaaaagtttctgcgcataacagaaggttcagcaatacgtcgtattggctatttacgctggctgcgtaatatttcagttgcattgggtaatgcgccataccgtgatgaaatcgtactggttttagaaaaaagaattgggctaagtgaggtgttagatgaacatatccactgggctattgcccaacaactatcccgccgaagtattgatgcaattaacgttcaaacatcacaacaaaaacggttaatacgggcaattaccaaagggttgccccgagatgcttaatatacaatcagtctgatttttgcttaaaaaaagcttctgtttccttgtgaataaaataaaaatgcttttctactcaaagcgcaaaggaaagataaatatcaattaagatactttaaataaaagttaattattcaaatttatcaattagttaattgatatatcttatttaagataataaattaaaaaagttagacgcgaacatatcgcctgtggataactctgtgtaacaagcaaatcaatactggtcaactcaaaatggttgttatgttaaattctgtggataaaaaatagaatttgtacttcgctggaaagcatcagggatcagcagtaaaaatgggaacacttcatccattctagacactagtggagaaattttcctctgcctatccaaaaatgaggcggcattatggacccgttaaagcaggatggcaagcgctttcagcaaattatttttgatgggaataaggtggcaaataattgctactattgccccacagcgtagccacaacgggggcaagtatggcaacaaaacgtgaattaaagcgcttttatcttttccactaattctcttgataacccccagtcgtattgattgtaaagccgtcccagtgtctgatgatgtgctccggcgtaaaacagttcatattggtgatgtcttgaggcaaattcagaaccaatagcatcccagaccagtttcatgaacttgaccttctcagcaggggaaacgatagatgagtattgtgttttctcaataatactcaaaatttcagaattttctaaatcagactgacttgatggcatcatcaaaattccgccacccgccaactttctgatcgtctccagtacatttggatatgtggactgcccgatgacccgatatgtataaagcaacgttttgtcaggtagataaaatccattctcaatttttggacaatggagcacacttttaaataacccttcaatattcatggcataggaagcaagctgtgccagtgattcttttacgggtggatattcgctgacaccattattttcagccatttcctgagccataccagccagaaaatgtagttttaccgcgtaacgggcaatactctgaatatccatcaggagttccgttgcggttgaatctacctgcttaaaacacatctcgatatcttcgcagacgaataccctttcccagggaaccagaacatcatcgaaatagatggtggaatcgttctcatcaaaacgggatgatagcggataatcagcggggttagctccctgctcgtaagaacgtctggatataatttttatgcccttggtattgatcggcatagcaaaagagagcgcatagcgttcatcaacgccttttttcatcggtttatgcgaaccaactaatatttcatctgctaatgctgcgccggtagcaaccatttttgctccccgaaccacaatacctttagcatttttttccacaaccccaagggtatggtaaatattcttttcatgcgcacccggtgtttttgagcgatcgccctgtgggttaatcagcgcataggccagataaagatcattttcactcacataggcaaaataattccgtaaagcatcagcgcgttcctgagaataagattcgaacaactcaatatgcgtgaccattccggtaagcactgctgctgcattatctgggcttctgccaagccagccgacagtctgcttcgcccactcatatgcagcctgaccacgtgcaatcagcttctcgggggtggaaggtaactgccagtacaaactcatctgctcgtcggtttctgtcctgaaagtcattgtatctgcatgttggattttataatcatacaggcttgctacagatctaatcgcattcctgaatgcaggatgatccacatgatctgtaactttttctccattaataaaaatggtgcgtccatcacgcaaattttctatatattgctttccggttcttatcatactttccatgctcctatcgataatgataattttaaaggtcaagcagagaaatattttcagttagcactagatatcaaatatacaaagaaaactgtccacaactggaaatagtataattaccatagttctcattaaaatacgccatagaacaacaaactataaactgcaataatacagaccgtgattactctttctggcaaaaaatatactttcaaagaaatggaatataattattctaattaaccagaaaagccatatcaaattacagcaccttcgtgatcattaatatatagaagaggtttttaaacaaaaacagccaattaaatcatctatattcttcagcagttattaatattaagtgactggataacggaatgctggaagcaggttgagaatatataataatattcgatacacaccctatactaatagactgttccttttaaaagaacgtattaattttcattcctttttataatatattcactatagaataattaaatataaccttatataaaaataccatatcaatcaactctaaatgaggttgttacctatgattattaatgataagtcaaatgtatcacaggttgttaatacaattgatgatttatcactcatacatgaatgttatcattgcatactgggaatgaaacgaaacgaaaaactcacaaatataaattggtttcactcaagtgatatctctctttcaatattacaaatacatatagttgacttacttctctcaatggagaaaagtaagtataaacaggctaaatcactcatcgatatactagaaaaaataagtaaaaaagaatcggataaacgcgctgatttaatcaacttcgggataatttctttaattaatgaaaattattatcaggccagaaattatttctataaatgcttactaaaaaaccctaaagatatattcagtttttatacatgtcatatgattgaattcaacaatggtatgaccggaaccatgcttgaaacactcagtcttgttaacaaacactgggggattaacgatgagttttatagctatttcaaaggtattaaggccttcattctgaatgaaaacgggtatcatgatgagtcttatgacagtgcagccagttcactgaaaataaatagtttcgatatttatgcgattcatgccatctgccactatttttatgataagaaattatttcatgagggaaaggagtggatggatgaaaggaaggacatttggtataacaactatggcatgaggatccacctgttctggcactatgcgatgtttctcatggaaattaacgaaattgatcaggcattagacatatatcatcagattcgtcataaaaatgacaggcatggacttgaagatttagacgccacttctttattatttaaaatgaaattcacgcatggaagggacgaccaatatatacaaaaacatgcaaatttactttttgagtcatggaataataaagatgaacttggtttttatttcttcaatgatttccatgcagcgttagtctttggcattaataagcgattcgatatgatagatttcttgattgaaaaaacagagaaaagtaacccgataggctactataatacaaaaataaacatccttgaatcgataagaaattatagtcaggaaaattataaaaatgtagtcttacttctgcaagaacctatgaactatcaattcatgggaggaagccgaattcaacgaagtattatcaatgagatatttaatgatgctaaattaaaactgggaataaaaaataaatttcaaaataccttgctgctctctgaaatataatcacatttatttatgtgattacggcatttactaaatgcatcttagccatataattaattatatggctaagttaatttatctgaccagtcaaaataatattaaacgttaaaaagatagattacttatcattaaattacattaacgcctaataagcctcaccagagatagtctttcctctttgttttttatgatgatattgctatgctgagttgactaacgtcaataacataatgtaattgatataaaatcagacaagaacatagttcattatcatcatttactaacgaaaatattaagtgagaaaacatcacaaggcgataataagtatgacaacaaaaccagatgattattcaagctacattaagttgactattgtttccattatatggggcggaacgttcatagcaggaaggtttatctcttctgataccagttcgttattatcagctacggttaggtttatatttgcagcatttgtgctaatagtgattatcgctttttctaaaaaaggatttatcaaaatcaataaatcacaaatggcaaatattgtcatgctgggtttctttggtatttatgtctataacctttgctttttttatggcctgaaatatatcgatgcatccagagcttctctgattgtcgcaataaatcccgcagtgatagcaacagtctcgtattttttgtttaaggaaaaaatgtccaccataaaaactatcgggatttcattctgtttgtttggtgccgggattgtcattatcggaaacaacttatcatcattattgagtaacaaaggtaatatgattggtgacatctctattttaggatgtgtcatcagctgggtgatttatagtgttttcggcaggaaaacaatcaatgaaattggtgcattatatactgtcgcttactccgtcattgtgggtgcaataatgttaacaataacagcgttcgtgacggatgattttaactttactgcattagtttctttatccatgagcgatttgataagtttgacatatttaggtgtcatcggatctgctattgcgtatgttttatactatgatggcattggtaagattggcgccacaagagcaggtgtttttattgcattaaatccactgacagcgatattgggcggagtactctttttacaggaaacgtttactgtatctatatgtattggtggaattttcattattgcaggaatttttatgaccaataaaaagataacaaaataatatacggctaagaaaccatattgggatatataccaacggatttcgatacaacctgcaaagaagcggctcggaagacggtaggtagcaaaatttaagataatatatgaatcagattattaccatcttatggccattatttgcactgatactattaggctttattctaaagcgtaatacctcatttaatcctttattctggcaaggagcagagaaacttaattattttctgctttttcctgctttattaatcaatagcctggcaacgacgtctttagataatcctcagctaccacagctattttgggccattctcgctgtaattagcacaggtttaataacattaatcgttattaagtttttactcaaatggccagcgcaacgttttggtgtttatgtacaggggttattgcgtttcaatacttatctcggattagccattacggtagatattttcggctctcatgggatcgctgtagcgtcgctgatactcgcgatcttggttcctctttgcaatgcaatttctgtgtttgcactaacaccagatatcaagacgttatcaattaagcagtttgtcatgataatcactaaaaaccctctgatattagcctgtttcattgggataaccctcaatctgactaatattggcttgccttacggctcagggcaatttttaaaaattctggcaggggcgagtcttcctctggggttaatttgcatcggcgcatcgttgcagccatcaatgctaagaacagagaaaaaaccaattatcattaacagcctgtccagattattactgatgcctttggtcgccggtattattggctgtttatttaagcttgatgtgttggaaatcaacttactgattctctttttcgccatacctacggcaccgacagcttatattttaacccgccagttaaatggagacagtcagttaatgtcagcgattatcacgttgcaaacaatgcttgcagtaattacattacctattgtattaggtttgagattcgactaattgatcgattgactagtttacagaatggaaatttgatttggagcgggaaacgagactcgaactcgcgaccccaaccttggcaaggttgtgctctaccaactgagctattcccgcattattgatggtgaaccagaaatgctttaacttgagtttgaattacggtaaacacccgtgactatcaacttcctgcatctcaggaacgcgcgctattatgaacgcctcagataaagatggcaagccatttacccatacatcaacactaaccgctcaaaagacattcaaatctgtatataccgcatactttgcatatgtttatagaacgctgccattgcaatatggtacattatgttatctaaaaattaacataatatatacaattaacctctaataagatttgtacttgtcggaataatttgctggaaatagattagatccatttttagtcgtatctcaaacggtaatgctcttaaagtaaaggccgaattatatgactctatactctccacctaaatttgttactggcaatgacgctcttgtcgatcttcttctcgctcaggcagagctggataaaagccataatctcaatacagcaggatttgtttcagggtatcggggttcaccattagcccgcttggatcaggcattatggcaaaacgaaaaaaaactggctcaggctaatatacgttttcaccctgcaatcaatgaagatcttgcagcaactgcgatttatgggactcaaaaagttgaatctgaccccgaccgcaatgttaccggtgtttttagtatgtggtacggcaaagggccgggggttgatcgcgccggagatacgctcaagcatggcaatgcctatggtacttcacccaatggcggagtactggttattttgggcgatgatcacggatgcgtatcttcttctatgtcacaccaatctgatctctcgctgatatcatggggtatgccggtcttacatcccgcttcagtgtctgactaccatgatgtgggattatggggttgggcagcctcccgtgtcagcggaacatgggttgggttcaaagcaatcagtgaagtcgtggaaagcagtactatcaggagagagaaaactcttcctgagtataagataccggaaatagatcccgggccgagtgggttacactggcgctggccggaccttcccagccctttgatagaacaacggctggtctataaactgaaagctgttcaggacttcgccaggcttaatccgatagaccagctcatcgcaccatgccaacatccgcgagccttattagttaccgttggtaaagctcatcaggatgttctggaagcgctgcgcatcggaggcctgtcacctgctgagctgacaaaaaacggcgttgctcttctccatattcgactggtttatcctttatcaccacttctcagcgagatggcatcacaggtttctgatatttttgtcattgaagaaaaaaacgctgttgttgaactgcatctcgcgcagcatctcattaatttgccaagacaaattaatctgattgggaaacacgatcatctcggcaacaaactagtctctacagatatggagttacgcccttccctgcttgctcctcttctggcagattggctaaaaaaattcgacttatttctttctgtccctttggaatggactgtccagacaacattacacgatatcacgcttcccaaacggacaccttatttctgcgctggctgcccccacagcacttcaacccgtctgcccgaaggtagtcaggcacaaatcggtatcggatgccatgtaatggcagcatggatggatcgtagtacgggttatggcctgaccgcgatggggtcagaaggagttgactggataggtcattccgcttttatcaatcgctcccatgtatttcagaatctgggagacggaacttatttccattcagggcatttagccattcgtcagtccatcgctgctgacagcaacatcacctataaactgttatttaatgacgccgttgcaatgacaggcggacaggcacttgatggcaatataacgatccagcaaattgcctctttaatactggctgaaggggcgaaagaagttgtagtcgtcaccgatgacccggataaatataaaggccagaatagcctccctgccgaagtcaaaatttatcagtcggattatctcgaagatgtacagaaacgtctgcgggatatcaaaggcgtgacagtcatcatctatgagcaggtctgtgcaacagaattacgtcgtaaaagaaaaagagggttaatcccacaggcaaaaaggcgggcggtgattaatgaagccgtttgtgaaggctgcggtgattgccaaattcaatccaattgtcttgctgttgttccgattgaaacaccgctgggcactaaacgtgcgatagatcaccatgtctgtaattcagatctatcctgcctgaaaggcttctgccccagttttattactatcgaaaacgccaatccagttcaggatcccggcacaataatgtcgcaggaagaaattgataacctgctgattaaactccctaaaccaacgataaaaatggcagatgctccctttgaaattttattagcgggggtcggaggaaacggcatcattactactggtcatatgcttggtcttgctgccgaaatagaaaaatatgctgttaatctgcttgattttacaggcttcgctcaaaaagggggtgaagcaatgacccatattcgattgagtcagaatgccgaacaattgcatcaggtcagaattgatcgaggacgtgcagatcttgctattgcggctgatttagtcactgtcacagggcaaaactcactggaagtaatgtcaaaatcaaaaaccagttgtgtactgaatacccatgagacgcaaatcggtgccatgctgagaaacccgacactcaatttagatcaaagcagaatacaggatactctccgccaacactgccggacattacaatccattgatgccgagcagattgctgccgaattggttggggacagaaatcaaactaacattgttttaatcggctatgcttggcagcttggtaaaatcccaatcagtctacattctatcgagcaggccatccagaaaagtggcataaaaaatcatgtcatagagaatgcgcgacgcgctttacatatcggcagaattgcggccgtacaaccagatatcctgaataattctctacatgttgaaccgaaacaaaccattaagacactggatgacctgattttacaccgataccagcttctggttgagtatcagaatgaaaaatatgcactgcgttatctcagccgtgttgctcaagtccaacaggttacacagcaaattaatgccgaagtactaacgaaatctatcgcagaaaacttattcaaactgatggcctataaagacgagtatgaagttgcccgcctttacgtcaaaaccgggttcttggataagctccgttcacagtttgataaaacggataagatccgctttcacctcagtgcaccatttttcaatcgtaaagatcccagaaccggtgaaagaggaaaacgggagtatggctcctggataattcctgtttttcgttttctcgctgcctgtaaaccattgcgcggtactatttttgatatctttggttatcaggaagagcggaaacaagagagggatttactctccgaatatgaacaattaattgatttactcatagaaaaattaaatagcaataacatggagatttgtcagaagctcgctgttttacccgatcaaatccggggttttgggcatgtgaagcaaaaaacgataaaaaacatgcaggaacgcagagaaatactgctaaaagaacttactgaaagcacttattgaaatacctattcaaaacagatggatatcactggctacggtgatatccatctgttttatttatggctttagccagtttaagtcgcgttagcgtcttaaacataaaaccacccgctttgcgggtggagttcaaaggttataccaagaaaaacacctttccgttacgatatagatgttcaagctaatattcgtaactcaaataaggaaaggtgtttatgggcattaaagcacaaagctcagcgcatacaaagtggctgtgtaaataccatatcgtcttttcgccgaaatatagacggaaagtgatttttaataatattcgttcaagtgtgggagagatcctcagagacctttgtaagtataaaggtgtggaaataatcgaaggtcatctcatgccagatcatgttcatatgttggtgagtattccaccaaagctaagcgtttcaagctttatgggatatttgaagggtaaaagttcgttgatgatctttgatagacacgccaatttaaaatataaatttggcaacagaaagttttgggcggaagggttctatgtcagtacggtagggctaaatgaagcgacaattcaaaagtatatcagagagcaagaaaagtcggatttaatctcggataaattgagtagtaaagagcatgtagaccccttcaaggggtaggccaaagcagcaaagacacttagcttgaacgaagagaaagcagcgtcatttaggcgcagtcggtaacaagcccttatagggcaagagcaaaccacccgttatacgggtggttatgattgtatttaaagaaaataaaaaatatttccctttccctaaatctcctttgcttttctgatactcgattcttttgaaatagattgtttttattagtttgcaattttattaactttttgtttttaaaattgttttaatctcagtgttgtatttcaacgacaaacgataccctttgctgtctctaatttgagacatataacttgttgattatatttgagtgtaatttagatgctgaattgttgtctcaaatgagagacggtatttggcgtattttctagaaagctaacctattcatttgatctcttatgctgttttttcattgagtggactttagatttagactatagagttatttatgtgcccgtaattgggtgaggagaaaatctggcatggaaaatgcattagtaaaatcgtagatgctcatcccactccttatgacagcatagcttcataaacctcgggatgatgtagagctgatgctggtgcctatggtccatgttatagatgagtaagcaattgtcttttcatcacgaaccggacataacgttgagtgaggcactatccgtctgtagacctgattgtatttatgcacctgtcttttatcgtgacaggtgttttttttgcctgttattttctctttgtcatcttgatccgtatttttgccatgattaacggtgatatccctgtctgagttgttaatcatgacaaatttctaaaggttacgcttcttctgaggtactttctcgtttcagtgtcagcataaagcctttagtacgtatttgagcggcttcttcacgtttatgcagcctatccagcgcatcagcaagccaggcgtaatcatgggcatcagggcgctgtgcaagggctgccttaaatgctgtttctgcttttgcccactcgccgtgacgtaatgctacttgccccaatgtactgttaagcagaggtgtttcaccatgttgcttcagtaaatgtgacagtgatttttgcacgacctcggaattgcccgcttttaagtgaggaagcagcagtaacagccggtcatcgtattgttgctttaatccgtcgagaataattcgctgtgcagtttcatgatcattacactcgatcagatgttcagccatcgcaacctgtagcgctgtttcattgcggatcttgcggtgttgatctttccaccatgcttttaatccggcactgcctttttctgccatgacctgattcatcagcccgatatacgcttgctgatgcaattgagacatttgctcttcgtcatgcaggcccacttttttgatcgcaggtaaaatatcaatcagcgactgataggcacctgagcgcatatacgcctgttcagcgagccgtaacacttccggatgtctcggtgctgtattcagtaacttatctacactgttacgggctgcatgggtttccccttgtgctaactggatacgtgtgcgggtaatatcgacaggcagttggtctttatccgcaacttcggcggcgcgctcgatatattgattggtgcggaaataatcccctcgttgctgcgccgcttccgcagcaagcaggtagttaacgacagggtcttctgcatgatcagcattacgtgtcattaaatgttcaacctgtttgaagtcaccttcagccagcttgagtaatgcttgtctggtttgtaaacgggcacgcttacgcttatacccgccaaaaatccagctatgggtaaaagtgccggtgcgttttaatctgcggtaacaccagccgataaaaatcagcaggaattgcagcagaaggaacataatcactaaaccggtcacgctggtagtgatatcgtaattatcggtctggataagaacgtatccctgatgtcctgacaggaaagggccaagaacaacaccgataataaggatgacaaacaataataatattttcagcatcttcaaccctcctgaacaggtgtttccgcctgagctggggcattttcagactttggctgatgctgggcttccggcagaggttgagaagccggctgatagatacgcttacgtactaaatcggccagaatgggctggctgcttaattgttcaggcatttcaatggaaagaggctgtttttccagcgttttcaattcttccagaaaggtaatggtgtctggcaatgaggtatcaaaataagcgttcacccaggttgaaacagattctagtgagtcccgataagtatcaatttgtcggcggggaacagcctgggctgcaattaacagtttagagcgaatattttctcgtaggtagatttcctgctttggtgctaataaaggctctttggagccatcacgcggtctgatagtgatgaagttatccataaaactgtgccagcttttgctcagattctgacgccagtcagagagtgaggcactgatctctttaccatcttcatccatgggtttcccctgttccactttatcaaccagcggtaagttatctacctgatttgataagttattcagggttagaatgataccatccagatcgacttgtttaattttggacagcgtatccatatctgtcttaatcgctgaacgggcaggcattaagctggcgtcattcatatccgcaagactgttgtcagcgtcttttagtagtgcaagggcggtggcaatatcctgatcaccccatatcttgcggctggccattttcacgagaaaatttgcctgtgccagacgccagttctcaacgtcagaattcgtaacagcagaaactcgatcccgaagttctgccatgttgctgtctacttgctcgatttgctgctggtttttcgtctcttctttctgcaagccctgttttaactgttcaattttgctgtcagcatcctgcttatcgacagattgctgttgtatgagggaagcaacctgagtttgcagattgaggtttgcagctcttaatgcctcgttctgttgtttattgtgataataaagatagagcccaccggcgcctactgccaaggcaatggcaattgagagagtactgcccacccatccataatttctggatttgcgaggagccttttcaggctgctgagggtgttgtatctcaaccgcatcagtggatttcttttgttccgtcataatggacatcccatattggtttattccagcgcctgcattaaggcgtcattatctgcactcttggctacttttattacatgccagcccagtgtccgggcaatactggcgaggcggtcactgaccacaatcagtcggcaatttaataaccacgctttgctattactactatcattagcgttaccttcagcgctatcaccttcaataactaagttatataacagtcgtaacatttcgccactggtaacaacgatggtttttataccacaccgctgccagtaatgactgaactcagctgaatgatatttgacagctcgacgtgcatagcattcacagtagtcgacttctgctcctcttgcccgcagggttgaagcaatcatttcacggccaccattaccccggagtaataaaacttttttattctccacctgctgcaaggaggggagttgcagtaaatcttcactggtttctccctggtctggccagagaatgcttttccctgttttttgatgaaaaaacagggaagttgatttaccgataccataataagatagtctgtcagaccatgacaggctatcttgtccaagctgctcacaggcataatgaacggcatttttggagagcagaaagacaaaatcacctgccgttagcctttgcagtttctgagacagcaacggcaaatcggcccccggatgaattgaaataagtggcgcactgaatgccgttttaccagcagcttttaaccgcttaaccaattcttctcctgcgggggcagggcgggtgattaagatactcatgcaggtagatctctctgataaacgtcagccagaatctggcgggcacctttctccaataattcttcggccagtgaaatacccgcctgacaagcttcttcggatgatattgctttatcactgctgatagtgctttgactacagctcgttttttcactacagctcgttttttcactacaaatagttctttcgccccggatgatgttactgccatcaggtgcgccaacaagcgctcgtaaccagatattatcgccctgccagatggcataactaccaataggaacctggcagcccccttccagacgggtattcatggctcgttcagcgaggacacaaatttccgtgtttttatgatttaaaggtgcaagtaactcacgggtctgcatgtcatccagacggcactcgataccaacggcaccttgtccgacagcaggaagcagtaattccggcgcgagtggcatccggatgcgatcttccagccctaatctcttcagcccggcagccgcaaggataattgcatcataatcaccgttgtccagtttgcttaaacgggtgccaacgttgccacgtaagtcgcggatcacaaggtcaggacgaagctggcgcagctgacactggcggcgcaaactggatgttccgacgatactgccggttgggaggtcattgagcgaggcgtattctactgaaacaaaagcatctcgtggatcttccctttcacagattgtgaccaatcccaaaccatcaggaaattcgactgggacatctttcatggaatgaacggcaatatcagcgcgattttcaagcattgccagttccagctcttttacaaataaccctttgccaccaactttggcgagaggggtatcaagaatgatatctccacgggtagtcataggaattaattcaacctgcaaatcaggatgaaaatgttttagttgtttttgaacatatcgagcttgccacatagccagagggctttggcgagtcgcaatgcgaatggttttcattgtcatggataatagtattggataattgtattaattaacggcaattggaggttgttaacctcagaagtgaaaagtagaaccgtaaaaatagatctcttttaacacttcgataatgttttttccagttaagaaaaactcgaatagtatataaatatacagtcttaattggtaaaaataattttaaatattaaaataatattttaactaaatagagaaaataaacaaaaagattgatttaaaatcaaattcctatttgtcatttatctgttgtgaaaaaatataaagatgtttatcaattaaaattaatcaaatggttatctaaaattcactgtttacaatatgttatctgagcaatatagaaattagatgaatataaaatctatttcaaaaaacatattttagtctcaaatttgtgattaacttaatattttacaaagggttaattgattatttggggttgtagggcaggcgaaaaagtggtattgcgggctttacgctttagctgcaaggtgttaaattgatcacgtttccgacaaataagttagtaaagaaatctaaaaataatttttgtaaattgcacgttaacaggaataaagcgttaacgggcgctgggccttagtggaaactggcgattgtaagcactgaaactgaagcaggcaaaacacttgtatctttatattgaaacgctgaagcagcggctggatgcaattaatcagcttaggttagagcgtgcgactgactcgatgagtgccacgtttaagcaggtttataatttaattccagtattattacattatcatcacccaatgatgccgggttatatcgaaaacgacgttcctcatggcgtttgtttttttaaacctgatgaaacccagctattttggattaaagatatggaataccagccagctggtattgtatctcattcctctaatggtgaattgccaattgcgggtatttactcgatgggcagcacctcttctatcgggcaaagctgctcttctgacttagatatttgggtttgccatcaatcatggctggataatagcgaaaaagattcattggaacaaaaatgcagtttaatacaacagtgggccgcttcactgggtattgaggttacattttttctgatagatgagaatcgttttcgtcataataccagtggcagcctgaatggcgaagattgtggttcaactcagtatatccttctactggatgagttttatcgcactgcggttcggatggcaggtaaacgcctgctatgggcgatggtccctgtagaagaagaagcgaattacgatgattatgtcacctctttatatgctcagggggttttaacacctaatgagtggctggatcttggaggattggcggagttatcggcagaagaatattttggagccagtttatggcaactttataaaagtgttgattctccttataaagccgtattgaaaagcctgttgctggaagcctattcctgggaatatcccaacagtgaattgctggcgacagaaatgaagcaacatttccatgaaggcttgattgtctcttatggtcttgatgcttattgcatgatgcttgatcgtgttacccattacctgacggtgactaacgatatgacgcgtctggatttagcccggcgctgcttttatctgaaagtttgtgaaaaaactgagagtagtgacggtgctcagggatgcactggatggcggcggcaggttattgctcagttagtacaggaatggggatgggatactgagaaactggcgatactgaataaccgcaattcatggaaaattgagcaggtacgtacagcacataatgagttgctggataccatgatgcagagttatcgcaacctgatccgttttgcccggcgtaacaatttaagtgtgagtgctagcccgcaggacatcggcgtattgactcgtaagttgtatgctgcgtttgaagcactgcccggcaaaatcacattagttaacccacaaatttcaccggatctgtcagaacaggatctgacctttatttatgttcccccggggcgggcaaatcgcagtggctggtatctctacaaccgtgccccgacaatagaatctatcattggtcatcagccgctggaatataatcgttatttaaataagctggtgtcatggacctatttcaacgggttgctgacggaaaaaacccgtcttcatattcgcaatggtgattctcaggcagacaaaaagaatttggctgatttagtcaacgatatttccactcatttcccgattcgtttgcctgctccgacaccaaaagcactatacagtccctgtgagatccgccatctggcaattattgttaatttagaaactgatccaacgacccggttttccgatcagattgtgcattttgatttcagaaaattagatatcctgagttttggtgaatcacagcagtgtatggtgagcagcattgatctgctttatcgtaattcatggaatgaagtgagaacgctgcattttaatggtgaacaatccatgctggaagcgctgaaaaccattctgggcaaaatgcatcgtgacgccgcacctccagcgagcgttgaagtcttttgttacagtcggcacttgcgtgggttgatttgtacccgtgtcaggcaattggtttcagaatgtatcgaattacgcctttccagtaaccgtcaggatcttgatcgctgcaaggtattacgtatttccggtcaaacctgggggctgttttttgaacggttgaatgtttcagtacaaaaactggaaaatgcggttgagttttacaatgcaatttcaaataccaagctgcatggtttaccgattagagttgataataaagataaacagctgccttctattattgacggatttgcctgtgagggaataattcagtttttctttgagaatattgagggcactcagggtttcaacatttatattcttgatgaatcaaacaaggtagagatttaccctcattgtgaaggaagtaaagaagagctggtacgtgatgtcagccgtttttattcttcatcccatgatcgattcacttatggttccagtttcatcaattttaacctgccacagttctatcagatcataaagaagggtgaacgcactcatgtagctccatttatggatgggcagtcactgctggatcatgagacagagagtgttaccgtgctggagacgggtgaagcaatgagggcgaatagtcagtaccattcttgccactattgaactcagtgagccatcgctggaatagccgcgcgtttgtcatacatatttgtcataaaagtgccgtattttcgatacggcacaaatgctgataattgcagctttatataaaagcgagctagatagcaacgagctaaaacaggaaaggctcgccactctgctcggtgattgcttgtcccaacatataaagaaagtcgttgccactacggtcgcaaatccactggttatcgcgataatcaaaatgataaccgccatttttagttgccagccagatttgatgaaaaggttcctgtcgattgataatgattttgctaccattatcaaaactcagcgtcatgacaccgccattggtttcacagtcaatatctgcatgaccttcataattatccagttgttcttcaatgtgtgacatcaattgatcggccaattgatgaaattcgctatcgttcatattcatttcctatttgcttttcagggcctaactgcgattatagagagtattggcgtatgaatcacaggcattaattatgatgaacaaacaattccgttggtcacttgctatcataacattactctctgttacaggttgtggcctgaaaggtcctctctacttccctccggcggagccagcggcacctcaggtttcagttaatacggcacagcctgcgggtcatgtttctcaggacagcacgtctaataaaaacgatacttctaaaaacaatatctcagcgagtgcccagtaagcgtgagctggtgatgggctttcattggagtggtatatgcaattctccaaaatgcatggtcttggcaatgatttcatggttgttgatgcagtaacccagaatgtttatttttcaccggaattaatctgccggttgtcagataggcatactggcgtaggatttgaccaactgttggttgttgaagcaccctatgatcctgatttagattttcattatcgtatttttaacgtggatggcagtgaagtatctcaatgtggcaatggagcacgttgttttgcccgttttgttcgtttacggggattgacgaataagcgtgatattaaagtcagtacacaggcaggccaaatggtcttgagcatcaatcatgatgatcaggtctgtgtcaatatgggggaacctgtctttgaaccccagtctgttccctttcgcgcgaataaagccgagaaaacttatatcatccgggtcatggagcgcactgtgctctgtggtgttgtctcaatggggaatccccactgtgttattcaggttgataatgtggacacggcagatgttgaggtactcggtcctgttctggaacgtcatgaacgttttcctgagagagtaaacgttggttttatgcaggtcgtaagtcgtaaccatattcgtttacgtgtatttgaacggggtgccggagaaacccgggcatgcggcagtggtgcgtgtgcggctgttgcgattggtattcagcaaggtctgctggataaacaggttcgtgttgatttgcccggtggttctttgcaaattcgttgggatgggccggggcagccactttataagactgggcctgcaactcacgtttatgacggtacaattcacttgtaactgtgaaatataaggcattggaaaatgggtaaagaaaacgaaccattacatactgaaagcatgttggatgatcagatggtggtggattatctgctggataaccccaatttttttatccgtaatgctaatgcagttgacaggatacaggttcctcatccggtgcgtgaatgtgtttctctgatggaatggcatatgaaccgtcagagaaaacggatcggttatctggaagacgatctagtacatctggtggagcaggcaaaacagaatgagatcctgtttaaccgcctgctgcaattgcttgctgaactttctgctgccgaaagtttgcagggttttctttcccgtttgagtgcctgggctaaaacactgggtctgagtaactgctatatccggctgttttctgataagtggttgcttggcgctcctctgaatgcgccggatttggcgatatcccgtaatgcttttgagtctgtccgtattcagcgattcggcgatagtaatcattatcttgggcggttacatggcccggaaattttactgctgatgcctcaggcccgtcatgtcggttctgtcgcagtatctcttttaggaatgcggggagagctgggcatggtgatcttcaatagtcatgacaagcaacattattacgagggcatgggaacggatttgttggatcagttagcgaaactattaccggggttgctatcccgttgggtcgagcgagcatgagccagcccattgattcactccttgagccagtagaggcttttctgcatcacctgcgggttgagcgccgtttaagcccgatgacaataatcaactatcgccgacatttgacggtgctggccgaaatgtcactggaaatgggcataaccgagtggcaggcacttgatgtcaccaaagtcagaatgttcgctgcccgtagtcgtcgggctggattacagtctgccagccttgccctgcgtctttcttccctgcgcagtttccttgactggatggtaacgcaggaaaaaatggaagctaacccggcgaaagttgtcagcgcgccacgtaaaaaacagcatctacctaagaacatggatgtcgatgaggtaaatcagctcctcaatattgatctgaatgatccgttgtccgtgcgtgacagaacaatgatggaagtcatgtatggtgccggcttacgtttgtcagagctggttgggctggattgccggcatctggatttggaaagcggcgaagtctgggtatatggtaaaggcagtaaggagcggaaagtccctgtcggcagaattgcactggaatggctgcaacgctggctagtaatgcgggaattgtttgaaccggaagataatgctgttttcatttctacccaaagtggtaaacggatgtctacacgtaatgtgcaaaagcgatttgaacaatggggaattcgtcagggagtaaacagccatattcatccccataaactgcgtcattcgtttgcgacacatattctggaatccagtggtgatctccgggcagtgcaggagctattgggccatgcaaatttatcgactacccaaatatacacccatctggattttcaacacttagccaaagtttatgatgtggctcaccccagagcaaaaagagggaaatcataatgcgtttttatcggcctctcacgccgtttgcggcgatgacattcgatctggatgatacactttacgataatcatcccgtcatcgacagaaccgaaaaagaagtattgtgttttatcaggcagtacgatagcaaattcagccattttggacgtgaagatctgtatgtataccgtcaggcggtgcttgagatggagcctgaaatataccacgatgtgacattatggcggcgacaatccgccgagctgatgttcagctaccacggctttaaccgtgaagaagcagtacgtggtgcggatgagattatgtcctgtttcacttattggcgtaatcagattacagtaccgaaatccacgcataacaccttatcggtactggcagaaaaaataccgctggtggcgatcaccaatggtaatgcagaacccgctgaatgtggtctggccccttatttcaaatttgtacttaaagccggcgtggacgggcgttccaaaccttatccggatatgtatcatctggcggctgaacggctggcattgccggcaaatcaaatcctgcatgttggtgataatttgcagacagatgttgaaggcgccattctcagcggtatgcaggcttgctggatcaatattgaaaataaaaatctcatgcaggaaccggaagggcgactggttccacatgttgagatttctgacttggattctctgatcgcactgatataatttcagactgcaaatctatatatacccaatggatttcgagttgcatcgcggcggcaaaggagagagtccccaggaacatagataactatgtgactggggtgaacgagtgcagccaacaaagaggcagcttgaaagacgaagggtatagaaaaacagtgacagcggtcattgctaacaactgatggtaattatggacgtctcttatctgctcgaaagcctgaataataaacaacgtgaagccgttgcagcaccccgtaccaatatgctggtactggctggagccggtagtggtaaaacccgtgtattggtacatcggatcgcctggttactatcagttgaacatgcctcacctttttccattatggcggtgacatttaccaataaagctgcagcggaaatgcgccatcgtattgaaaacctgatcggcaccagtcagggtggcatgtggattggaacattccatagtctggcccatcgtttactgcgggcccatcatttagatgccaatctgccgcaggattttcagattcttgacagtgacgatcagctgcgtctgatcaagcggatcattaaggcgatgaatctggatgacaaacagtggccagcacgtcagggcatgtggtacatcaacggtaagaaagatgaaggtttgcgccctcgccatattgaaagctacggcaatccggtagaagttacatggctgaaaatctaccaggcttatcaggaagcctgcgatcgggccggactcgtggatttcgctgaactgctattacgcgctcatgagctgtggctgaataaaccgcaaatattgcaacattatcgcgatcgttttactaatattctggtagacgaatttcaggataccaacagtattcaatacgcatggatccgcctgttagcaggggattcaggcagagttatgattgtgggtgatgatgatcagtctatttatggctggagaggagcgcaggtagaaaacatccagcgtttcctgaaggatttccccgcggcacaaactattcgtctggaacaaaattaccgttctaccagtaacatacttaaagccgccaatgccctgattgcacataacagtgatcgtctgggcaaaaatctgtggacagaaggcagtgaaggagaacctatctcactttactcggcttttaatgagctagatgaggcacgttatgtggtcagtcgcctgaagaactggctggataacggaggagctttgaaagagtgcgcgatcctgtatcgcagtaatgcccagtcccgtgtattggaagaagcattgttacaggcttccatgccttaccggatctatggtggccagcgcttcttcgaacggcaggaaatcaaagatgcgttgtcttatctacgtttagtggcaaaccgtaatgatgatgcggcttttgagagagtagtgaatacaccgacccggggaattggggacagaacccttgatgttgtgcgccagatggcgcgtgatcagcagaagacactctgggaaagcagccagttgttgattcaggaaaaggtactggcaggtcgggcagcatcagctttacaacgttttatcgaattaattaacgcgctggaaacggaaacacaggaaatgtcgctgcatgtgcagactgatcgggttatccgggattctggcctgtgggcgatgtaccaacaggaaaaaggtgagaaagcacaggcgcgtatcgaaaaccttgaggagctggttactgcgacccgccagttcagctatcaggatgaagacgaagatatgatgccgttgcaggcttttctgtcccatgctgcgcttgaagctggggaagggcaggcagatgcctatcaggattctgtccagctgatgaccctgcattcggcaaaaggtctcgaattcaggcaggtctttattgttggcatggaagaggggatgtttccaagccaaatgtccattgatgaaggagggcgtctggaagaagagcgccgtctggcttatgtcggtgtgacaagggcaatggaaaaactgacgctgacttatgctgaaagccgccgtttatatggtaaagaggtgtaccatcgcccatcccgttttgtcggtgagttaccggcagaatgtgtcactgaagttcgtctgagggcaacagtatcccgaccggtgagccataaacgactgggaacaccactcagcgccaatgatagtggctacgctttagggcaacgagtccgccatcctaaattcggtgaaggaacgattgttaatattgaaggcagtggggagcattgccgtttgcagatcgcgtttcagggtgaaggcatcaagtggctggtcgccgcttatgccagacttgaaaccggccaataataatccggtcgaatgttgacaggtagaccctatggatttcagaaaagaggtagtttgaaatacgacgggtataagcgtaacattcgcgccttacgatgaacgtagggagtataaggagacttatggtacatgctgaacgcatttaaattagagaataatcgcctgctccgtcttgaacttgaagaaggtgatacattatccgactccatgtgggtagatttggttgggctgggagatgatgatcgacttcgggttcagaacgaattaggacaaatcctggcgacccgcactgagctggatgatatcgaggcttcggcgcgtttttttgaagatgaagatggcttgcacgtccactcattcttctattttgaagacgccgaagaccatgctggcaactcgacagtcgcatttaccattcgtgacggtcgtctctacacattgcgagagcgtgaactccctgcattccgattataccgaatgcgtgcccgcaaccagattatggttgacggaaatgcttatgaactcctgctggacttattcgaaaccaagatcgaacagctggcagatgtcattgaaaatatctacagtgtgctggaatccctgagccgggtcattatgaacggtaaacaaggggatgaatttgattcagccctgtctaaccttgctgagcaggaagacattggctggaaagtgcgcctttgtctgatggatagccagcgcgctcttaatttccttgtgcgccgtgcccgtttgcctgctaaccagttagaacaggcgcgtgaaatcctgcgtgatattgaatccctgttgccacataacgaatccctgttccagaaagttaacttcctgatgcaggcggcgatgggctttattaacatcgaacagagccggattatcaagatattctccgttgtttctgttgtgttcctgcccccgacgctggtggcttccagctacggtatgaacttcgaatttatgccggagttacactggacattcggttatccggcagctattggagtgatgattgctgcgggactggcaccttacctctactttaagcggaaaaactggctgtaacctttccggtttccactctttaagtcgctcttttggcggcttctactgcctccagttacatagtcagctatgtttctgggggagtttatctttatactatgactcgaagtttattgaagaagagcaagaagaactgacccgatttaccaagacggctttgggccagtttagtaataatgccgatttacttccgcaatcgccgttgggtataaagcgcatccagcgtaaacacaatcaaagcagcccagataaaaccaaatgtgatcaaacgctctgagccaatcttctcaccgtaaaccagtgttgccagcagaaacatcaatgttggtgcgatatactggaaaaaacctagcgtggataagcgcagatgagcagccgcagcggtgaaaaacaacaatgggattgtcgtaatgatccccgcagcaaccaacaatagattcagggatatcgtgttattcaacatattactggttggggtatgagtgaaaaacagcaggtaagtcagtgcgaccgggagtacccaaatagtttcaatcaacatgccggtttgtgcgtccacgcccagctttttacggatcaggccatacagggcaaatgttgtggccagatacaggccaatcacaggcacagagccaaattgccatagctgaataaagacaccggtgaatgccagccctaccgcaatccactgcatacgacggaaacgctcaccgaggaatatcattgcaaacagcacactgaccagtggattgataaaataaccaagacttgcttccagcatgtgattattgttgactgcccagatataaaccagccagttactggcaatagtaaaggcggtgatacctaataccagcagattctttggttgctttattacagtcaaaacctgacgccagtgacgagtgattgtcagcatcagtaccataaagaaaaccgaccagataacacgatgcgatacgatttcatcgggtggcacgtactgtatttctttgaaatagatgggagccaacccccaaatcaaataagcacctaaggcatataaaatacctttggctgtctgtggttcgttcataatatccttgaatgttcagagagtgttcagaaaaaaatgagaagagcttattagatgttagcccatagagccatacaatgtgtcactgggttaagcaatttacaaggggttaatagcatgaatgataaataaaaaattacaccccgtataatcagtgtttaactctgattttatttgattatttaggatgataatccaatgtagtgtagtgaactgacttttttaatcaatctctagcatagtaggtagaatataagaactagcaaggtggtcattaaagtttacatctttacactattaaattacctgaaccctgttactgttttaattggcaagccaaatttatcagggcagtctaaccctcgcactttgacagcaaaatcattatttcttaattgattacataactgtgcaatatctttcggggtccagtagatattttttccgtatcctatttgctga

SEQ ID NO: 421 - DNA, 35411 bp, Xenorhabdus sp.
  CDS (15546)..(16115)
caatcactagaagtgcaggtgaaggcacttaaagcggaaggggtcagagcagaccgtatatttacggataaggtgaccggcagtagcctggatcgagaaggtctccaaatgcttcggctaaagattgaagaaggggatgttattctggtgaaaaagctggatcggcttggtcgtgatactgccgatatgattcagctgatcaaagaatttgatgagaggggagtcgccatacgttttctggatgatgggatcagcacagaagggacaatgggcaagatggtggtcaccattttatctgcggttgctcaggcagaacgccaacgaatactggagcgaacaaacgaaggccgtctggaggctaaagctaaaggggttaaatttggccgtaaacccacaatagacaaagctcaagttcgccatcttcatgaacaaggtatcggagcaacaaacatatcgagacaattaaaaatagcgcgtgctacagtctataaaatcctcgctacggtgtaacggtactcagaatcgtcacttttgggggttcttcggcggaacccgaaattagggggctaaagaaaacccatgccataatcagcatgggctatctctttaattatggttgaaattgaaaatatccagacgttgtatttatataaacaaaatcaggagaagttgcatcatcatgtaaatgagatttaatcttaaacgaagaaaagaatatatgacaaaatcacgctcattatttccctatttagaggaagtaatgagcgtgattcatttgttgatggaggatacgcacaatgaaaatatcgttttctcggatcttataaaaaatcgtatgtttgtgaaactcaatgcgcataacgtcaggaacaacatcgtattccctccccatatgcggcattctggctaatgtatcgaagaactcttctaatgcctccgtatattggtcagcctgagcttcaccaaattgccagaacgtatagtcataaattccggcaaaatcttcggctgcctgttttgagagtctatacattgtgtttacgcttcctctgctcggcaatatcccgtaaggttaatgcactttcaccactttccagacccgcaataaccgccttgcgtatcacttcatcatgcgcttcctgttgttcaagcagacgcaatgcggaacgcatcacttcactggcgtttccatagcgaccgctttcaatcatacgctgaacaaatccgtcgagctgatcgcccatactaatcgttgtaatctttctcatatcgcctccgttgtattaactattaatacaattatcgcatgttgtggtcgtaaatcaagcaatctcagttattgcgtttagagaatatgctgcaacttctgtataccagattttatgctgcgcaatatcacgggctaccttattccccaaaatatgccgcgtgtaagacatcacccattggtgtgcctggctgagtggttcgtgaccacgcttttgctgcaggaaaaatttgtatccattttgacaatgtttcgcggccttgtatcgtgcggggttctggcagggaaatatccacataggagagaataccctccgcgcctgcaaattgctccggttgtgcctctattccgttgggattaccaaagaaggaggatatcaagcggctaaatgtgaatgatcctttcagttcgagcacatcaaatcgtgcttcgtagaactgcgcacggtcaaataagccgttgagtaagatttctgtaccctgacattggtaaaattcagcatcatagaactgacccacgaacgtggttttattaaagatacaatttacgaataccgtttcattgtatatgccgtccaatgtcgcgcccgtaaaatcttcatcaacaatcacatggcgtgagtaatccttatttaagcgccgtttgtcagccgcttccatccgataaacttcccgcgatggtcgtacttttttggggggaattttattatccgatcccgtcatactgctcgcgtctgataaactcacgggatattgcggacacatggtcgcaatggccgattgccttaactggtcaatgacttcgggttttgcgcctttgcgtttagcctgcacaattttgcaccatatggtgtccagctcgccgtttttgatgatttcatccaataagctcatcgccgcataatactggggagcatcaggattgtgtttaaaatatcctgttagcaatgcggcacgcagcaggcgtggtacagtcatacctacctgtttatccaatttcggccccagatagtttgttgctacggttgtccgttggacgccaaataaacgcgcaataccgacggtattcagatccagtattttcatccatgcccgaatatccgacacacgtggacacgcgggattcttcggcccccaacgtaatagttcccgcgtttcagccagattaccctgcatataaaaccacaccgtttcttttagctgcgcctgcatagcctctgtggtttcttttaaataactgttctctacgaaccttgccccttgtgacattagtcccccttttagacccttatgtcttatcactgttctggaattttatgcctcaaccatccaaaatccggttatttcgtcgttggccattgttgcgcagcatgaagaacgcgtaaaaccatcaatatatcccgtttaacacggtatactagaatataatgtggcctcaccacgatttcccgtgttccttttaccctgccgggtttatacatctcaggttgcaaacaagctcgttctgcggatgcttcaaattcatcatcaagcgcaatcgccgcctgtggattatcctgagcgatatactccataatctgctccctgtcagccaaagccataggtttccactcaagacgcatcatatcctcttacgtagattgtcttttagggacgcaaaatgacgtttggcgtcttcatgtactatcgctgggcgcggatcgtcaagagatgtttgtacctgtgttctgaaccattcatcataggccgccgcttcatgcgcccgttttaacgccacggctctatctggacgcgcattcttgctctggtgttccgaactatagttggacgcatcaacattaaactgtgcaatgcctacgtttttcaggtaattaactaatgtttccaattttttaaacagccgtacctgacgactgcgttgagcggctaacgaacactctgtcatgccgtatttcactgtcactacccagccaccaagcgtactcacaacctgagcttcactaaccacacccgcttcaactaaacggtatagcgtggaatgatctatagtttctattgccataagttacctctaggaatcgctgtgcaagttacaaaaagaagtattgcaactaattgtaatttgcacaatgaaaaataaaaaaattttagataattctgactaaggcttttcgatactcatttctttaaagcgcataatacgccttcaacaacaaaaagtacgacggtaaacttcattgttttaggccaatcgaacacaatatgctccactaccgtatcacttattgtaatgcctacgtgctcataatatttttttacggcagccgatgctgcatcctgcgcatccatactacctcggagataaataacactttgcgcatcacggctgcgtaattcgatacgcgccagttgtgtctctgtcgcaggcagaaattcgccttctagcacaaatactttagggaaagttccttctttagataaatccagtaaaacatattccggtttcatctgttcagtcagttctgacatattcatcttaaaatttcctcttgttttgatttacctttcgtatcatcagaccagatcacttactcagtttttttagttcagcatcctgatttaaatctgttatcgtagcctcgatattaaaacagagcgtttccataccgcgttttaattcctgataatcccatacgaggctttgaataacgttatctctgcgtgttatgccttcttcatatcgcgtaagcagtgttgtcggaggtgcgccatctaataacagcatatgacgtgtaagtgcctcacagataaacatggctttatcgatatttttcacacgtaggaatgattctaattcgatgataagcgtttcatggagttgtacatgtagttcattggatttcatggatttaatccttttgatagttaatagacggaattgatttttccaagaaatagagatatgtcaattgacaagattgttatttcatttttgcataaaaatcacgtgataaattagagtgtactattaaatttttgctaccactttttatataattatttaataaaatcaatttattgcgtaggtatttttaagcgttgcagcatttttttctcgtttttaatcaagatgttaaatagaaaaattgcacacaatatgacacttgctaaaaactaacaaaagatctcgctaacaatagaaataaaaagaatgggagaaagcatagaagagaatttattaggctcgaagatctcgatagatcttttttgcaaaaaacagtaaaaaatagcacgatatttagagaactaaataatacgtttatttatatatttatatatttattattaattaataatattatatacatacttcttttttctttcctcatgccatttattttgcgattttttctaataaaaatagctgtatctctgacacagagagagataatacatgacataaggtgcgccgatacgtttagcaaacgtctatacaaattttatttcctgcgcacacttaaataacaacaggttacaaacgacatcacatcaaagtacaaaatagctgtattatgtctaatcagtaactgattgataaagaaaggaataatttataatgattgttaatgctatgtatcaatttgttaaataaatatttcgcttgcttctggctcccacagagcggcttgctacttgaaatgtacagaaagaatcgttctataaataatgtacagcgcatttctgcacacggcgggaatacaggtatgtcatataggctgcttgctctgtgacgcgcacacagagaatgaataaaaaaaaattatgtgtattagcataacttaataatacagttgaatattaattcactaaaagtgacttaatattcattttgacggtgtatgaaaaacatctgattctcttcggcgaaataacggcaccttacgtatgtgatcgcaaaaaaagaaaaacatctcattaaccaattgaaatgttttcgtttttggaatttatctttctgaataatgagatcatttttcctcatacagattgttataaaaacgacatgtgtgattaaatacagtattcttatttttgttattagtatcgagaaattgacataggttaattaatgacctatattgattgcatatcaggcaatatagccacttacagagagaggatttattatgttgacgaataccgttaagacgcaaaagaaaagcgcggcaaacgcgactattgcagccgctgcgattgcggatatgaaaaaagtgaaagagacagtagcaaaacatgatcagtacaaactaaatggtttagacgcgcgtaaaacgttaattaatgaagtatatcgcgtagcaaaagcagatcataaattaaaagcggaagtttttattttctatgtaactcaaatagttaaaaaaggatcagtgttagaaactgttttaccctttttcaaacaagaaattaaagatatgtttgataggggcgagctgaaagcaactgcgattgatagtaatacagacgaatgcgtcaatgcagacgtggtatttaataatttaaggcgtttatttaatgcggcaaaaagtcgctatgataacgcgaaaaatggcgggaaaggggcagatacacgcgacgacgaaatcaaggctaaatcattcctcgcagtaacaaaaatgtgtgatatagcggagggatttactatgttgccacaagcacgacaatataagctgataaaatcgcttttcttacagcttgatcctaccaatcgtttagatttgttactagaactggacgcaatgaaagaacaacccattccagaaattgacgagataaaataaaaatcagtgatctatattatatgcctcgtgctatgcggggcttttttatgtctgctattctgaacttaaaaggcaaaatactatcattatttcttagatgatttgataaaacatttatgataggacttttaagagggaaattctgtaaacatcaaaaagtatactttttgatagattaaaaatgtatcagttattaactgcctcgcgtttagcggggcttttttgtgtctaattgactgaatagaaaagggaacttttaattatgatatagacaataaagcctgtcacactgcgctttactgtcattatataattaaaattatgttaataatcaataagttaatttgcgttctatctggtgaaagaagtacgttttagccgctagggaagtcccccttatgggaaattcggtggccatgacgcatggcggccggtggggcaacctcacaagattctcatcgttttttaaaatataccaatgcccctatgtcaaaagagacccctccccccttatttataataaaaaaaccaacgtgtccgaggagaatgtcggctactatacttgttccagtaataaacgtattaaggaatagagatgagacacaatattgttgaaaccattctggccgacatggaaaaagcattatcctctgtaccaaaaataacgtactcccccctttctctccccatagaaatgtatgagggaacactggggctggaactttattattcgcttgataaggtgaaacacctgacagataacgactgggataaacttattttggaagcccgtaaaaaggatattgttgttataggaaataaagatgacacgagacaatgtattcagttttgtcgtggcgaatttcagaccacaatgcaggatatttattttgaagcattagacatgacgccttatgacgagggtgatcaaatgtttcatgagtggttaaaactcaacatatcagcaactgatttaggaaaattattaggcgtcagtgtgttctatgcctgttgtgcacctgggggtgctcatgcgggagcagaaataccccaacatatcgtggagcaggcaaaacaggcttatttgatcataacgtttagataccatcttcgggtgataaacgagcgagaatatgaacataaggttcctcatgatcaaattcatggccgctgttctgatgattaatgtaatggtacgttattgtgctacttaagagaaggattcagaaataaactatcaccaatttaagctggtgatagtttatttgattagtatataaattatccatcatgtccatcatgtccatcatgtccatcatgcccaccatttgggccaccgtgacctccatgacctccatgaccgccttgacctccattacctccgtcaccgccatttcctgagccacttccgtttcctccattcccgccattgcctccattagctccaccattgccgccatttccgccattaccgttgcttccgtttcctgcattcccgccattcccgccatttcctgaaccactcccgtttcctccatcccccccatttccgtgttctgctgcgtgaactgttggggaaaagatgatggaagaggtacaaatcagtgaagaacagataaacatagataaaggtagtagacataataaaaatgattttttctttatcataattagctccttaaattacagtactatggttcccatcgtgaccaccattaccaccgtgccccccctgaccgccggaagaattgttaccacttcctccggggccgccgtttccaccattacctccaggattattggctccattgccatttcctccgtttcctccatctccaccattagaattatcacctgtaccagcattaccgccatttccgccattccctccagaatctccgtcaccaccattcccaccgtttcctccatttgcaatgagaacataaccgttattatgagacgaactctttacgaatgaattggttgaagctgatactgaggcgactgttaatgagcatataaagacgaataataatttgagatggttcatagtgctctccttctattcaattactatcaccgctaccaccatcacctccgttacctccggcacctccattagctcctccatttccaccatttccgccattcccaccgcctgcagcaccattgccgccatttccgccactcccaccgtcttccgctccattgccgccatttccgccattaatacaattactccctggtattccattctggccgttttgaccggttcctccatttaaatcatcacaattagtagggttcgtatttttggctatttttgttttcatagtggaagtggaattatttgtgggttcagcctgtaaggatagaaaaggaaaactcaatatagaaacagcgataattaatttatatggtttcattttatttatctccaaaaagtattaaaaatgtgaaataacgcatctggttaaattataaaaaattaagcagatacgttatttttttttatttaaatattatggccgccatttccaccgccatttccattccctgttccatttccattcccacttccatttccatttccactgccatttccactattacctccatcgcctccggtgccaccagggccaccaggggaattatcgccagctccacctggcccaccattcccaccattacctccgggatttccgccattaccattgacaagtatataaggtaacttggtatattcatgttgaacaactagcttattaataggatatttatatgatgtttcaattgtttttgctactgatattgttggaattaatgttaatagataagctgcgattattattttgaaattagagtaagttattttcataataaatccttactatccaatttaataatggatattttttattttataatgaaataatttaaaattaattaactattatttaatagcctatttaggctaataacaatattattatttttttttaaacaaagcataaacaagataaaaacaaaacatattttatttttccaaattaaagatcaacgtctgtaactgctctaggttcgaattgatggggaggctatggcggtctttggcaagattcgccatgaatacgctgcgttaaaacgcgtcaataatgaactgaataattctgaaaaataatacaaatgtgaagtaaaaaatttgctatgaacggtcgccaccctatcgtggcgaacagtcacttattttcgttttcttttaaccaatcatcgacaagtttattgattaagtcagtgatggatgtgccattttttacgcaagcggccttaaagcgtttatgtttttcttccccaaaattgacgtttacacgcttagtttttacttctggcggcggtgaagtacccatcacatgttctagatctcgattttcaccaaaggtcatttttttagtgctactatgagctttttcgagtgccatttttatttctcccaaagaatcagctcataacatcatatgagtaaatgagtaattactcaaataatttagttatttctttggtcagaacctcgatttcaccttttgccgcgccatcatttaattcaaatacactctcaccatctaatattgatttgacataagattgacggtttgtgattgctgtacgaagaagttcgacaccggtctcttttatactttctttcagtattttaagcattaaggcgtgttctaccttacgtgttatcaggaaacgagcgtcaactttacgactatacgcttgtgcttccagtacagtcacgacactacccgcagcagcaaaatctaatggacttggtgtgacaggaataatgacaagatcgcttaccataacagccgcagacgtgataacggataatgaacctgcaccatcaacaataacaaagtcatattcggctaaatcttttctgatgctgtagacatccttttcagaagccgccgtgaatacatcgaatgcagctttatctgatttgctccagtgcgttaggctcatttgtggatcagtatcgacaaccgcaatattgaatcctgcgcgagttagagcggtacagatgttaatgacagctgttgttttacctgagccacctttcggatttagaaaagaaagtactttcatatttatatcctcaaatgtgtttttactcatatacacatttactcaaatgatagaagtattacttaataaacaccttagtatttaataaacaacctaatctgtaaagaaataaggtgagtaaaggagtaaaaatgcataacttcatataagtaaatgagataatgagtataagagtaaaaactcaaatgagtatttgagtaaatgagtttctggcgtacttttctatacgcaaaatccccatgtgaaatattctgatttcgggagtgaaatatgaaaaagggtgacagttgggaatacgatataaaagtcattggttaagatatatactttttaaaaaataggtttattgagggtgaaaaaatgagctgttgtgaaaatgatcgcacattaggtaatcgtcctatgcgtcgtggtgcaccaggcgaatcggcttatgaattttggaaagaacagcaacctccgggttcggatacatcgccgtgtgcttttgagaaattcatggaagggaagaccggtgaatcggcgtatgaattctggaagtcaagacaactacccggaacagatacgtcagagcaagcctttgctgattcaatgaaagggaaagttggcccaaccatagaagacaaaatcagtgcaagggatcaatcaatcatcactcagcagaccattgttgatgagacacataagacaacgacaattggcgtgcaattatccagtaaaaaagagaatgcactgactttagaaaaggatggattgtttagcccactaagtgagagcggaaaattagtctttgacccgacctttttttcaggaaagggaacacaaaccgatccatataaagttatgattaacaattcgcagacgaatattttgggttggagtcctaatggacttaatgtgccattactttttgattcaaacgcttttaactttgtgcagggttataatgtccagctgaggatttcgaagaaagcggggaatacactgactgtagaagatgatggattgttcagtcctcaaagtgagaacgaaaaattagtctttgactcatcttttttttcagggcacggaacgcaagccgatccatataaagttaagataaatagtaatgcgccgagtattttgaattggagtcctgatgggattgatgcgctattatctttttcaaaagcgtttaaggtaacgcagggtaatgatattcatttgaatatttcggtgaaagatggaaacgggctgaaatttactccagagggattatatgtagttggtgttgatccaacggtgccacaatgtttgtctcttacatcggatacaaaagatgcgggttctgcgggagcaattactgaagatgatacaggggcaatagcgataggtgcaggttcacaggcaacaggaaggcaatctattgctatgagttcaaatacatatgcaacagcagatcacgctattgctattggtgcatatagctctgcgaaagaaaacagtgtagctatgcatggataacagacaaagcggggccggtggcattaggtataccccgtccaatcaaggcacctaaagtaacattgacaggacaaaaatgtcgggatgatattcccgtacctgatgattgttggcaaaaagggttgccaagtgaacctgcacaggattgtccgaatcaggaattacccccacaggtactgaccttttgttatacctgggtgacagagtgtcaagaagagtccgggccaagtgattattcagaaccgatcctcgtcccctatgcagaatcggtcatgttggtgccaacagaaaaaccgccggttaatgccactatgatccgctggtatatgcttttggtaggagataaagaagcagaaatggcacagatagatgaacaatcggtaaagacgctggcgtttgtcttttgtccagatttgttcgccggtggcaatccattaatgacacaaacctggtatccggtgccctgtgctgagggagttgccaatattggctatggggcgattttggtttggtcagggtgccatatttatgtttccgcacataaacaacctcatgcgtttcccgaagccaatacgctggttgtggatgatgaggtcgttcgtattgtttctttccgaacaaagacaggcgcgtatcaagcggtggtattaacaaaaggcgtcccctttgtgattgcgggggaattacccgataaactaacgatcactcgtattaaccggcgaatgacttcgggtaactttacccgacacggttcaggtaaaatcttacccgcattttttgctttctggaatgcaggaatgcaatcgttgccgttaatatccagtattatgtctacacaagtgggtcgcttcggtctcatgggattaggcattctggctgccgctgccacacaatcggcgcttgatgatcccgatgatgaagatacggatggcggctcaaagttcgcccgtagtcagtcgcgcaagaagtctatctgtttcggggatatctgtggtgaaatgccttatgaagtacgtccttttatgctctcgatacagaacctcgttttgttaggacacggaaaaatagacatgggagaagccgttgggtcactccttcgttctgcagcagaaacctttgtgcccgttcagcctgccggtgatgtagatagttacactgtcacgcgaatgatgctaccgacagccgcccagccgcttatcacgataggaatgggtgtgaacgagttcgggcaagaagtcgataataagtatccggtagactggagcggcaaacagatcacgactccggcaaacgttgaacgtggcaagacgaccacaccggagtttcttaaagacatgactcgtttcttctatgaaaaatcgaatggtatggtcgatatttccccggccagaacggatgcgctgctctcatctttgttcggtggtatttataacatggtacgtaataccacgacgcctccccttcggcctgttggatggggagataatgctatcctgcagacggcgacgagtgcttatcggtacaaaacgaataactatgctgtcacacaaaaatatcgtgagttaattactcaggctactgcggcaggtcgtcttaacaatctgaatgatgagggttcatataatgtcctgatgaaaaacgatccggttgctaagattgaaaaccagcgggcaaaggcaatgcgtaatctgcgcgttgagggcctgacacgatcacaacttaatggcgcattggacaaagccttttatgacggtgatgaagcggcgattgcgcattatcaggaattgatgcgtcagtatgatgacgagagcagtcttatttatggcaaggcattgattgaactgcaggatatcgttaatgaacactaaaattcctttgctgaaacgcgttttatgtggatggcattccccactcggatatgtgtattcgttcttcgttggctctgcctatacctgtccgtgttgtgccttttggcgcggtatcttatggggagggattatccttgaaggtcttcattatgttgtgaattgacattccatcatcttccaagagtgtcaaagtgaactgcgataaccatttcctctttatcctataatcgaattgttagtcatcaaaaattacacctcattcagattaaaaaattacataattaatctgttacctcttatttatttttaatattgagtgttttcaattaaacatttaatctgataacgtaaagctacaaagagggggaatattgtttctaatataaattataaacttgagaataaattgttaatcaggaagacatgcaaaaggtaacgtatgaatagatcaatagaaagtttaattatgccgttaattaaattttgggagaagagtaatgatgcctggggtgcgaaagaccacaattcacggtttatctatgccaataaaaaacacaatgaattactttgtctacctaaaggatataatatagaaggtcgttttgatggtgaaattccgtcatgcacgtcaaattttcaggatgaatttcaaagacaggacaggcgagttgaagcattagaagatagagtgacctctattgaaattcatgcttttgacaaccttccctaccttcagccgtggtattgtgataagtatccattaatggatgaaaatggggtatgtcgaggaactatctttcatggcagacctgtagatacgataacactcgaaaggctagacaaaataaatgtgcaaacctcattagtttttacaccaccctcagaattttttagtaaaagagagtgggaaatagtgttttatattctacaggggcttccgactaaagaaattgctgaaaggttatttttatcccaaagaacaatcgccaatcatattcaaaatatatatcaaaaaacagggataaaatgtaagagggatttagttgattattgttatgaaaataacatagctaactatatacccgaaagttttttcagggggtcaatgtctttcacgttagaaaaatagccatttacatatatccaaaaaatatattcgatcatgaaaaggataagactcagggtataagaaaaattaattttacattttcataaatggcaaattgatatactgtattttaataaatacagaaaatttcctcctgaataaatcaatttatttggacatcgtgaactttattctctaataattcacctgtccaatccctctattaactataaagtgttatatgtcatttttctccaatattgcggttatgatagtcaactttattcccagaattgataaacatagcataagtgttttttataatcactttgactgcaatacaaactgcatcatctttaatgatctattttgtagatgccctcataaatatatttttcatacgtaatatgagtaatttttactctgtaagactgagtaataatacttaacattaacacatatgtaggaaaacatattcttataattatcacaattttatctcttttattttcaagtattactgtttttatttagccagggaaaacacattaaattaaaattccgaagataatcaacggtactcaacgtttttatccgcttcgacacgttctgtctttgtggttcatcgtttgttgagtagatgttgtccttcttaatcacgatatgataagaagaaggggattttgaatgtattacttgatgttcaacagtctatcaaaaagtgcaaattatttttaatagcccatgaagtatggtcgcaaaaagactatgataaataatcaaatgtctttagagcgatgataaattatggcaaagataggttatgcacgggtcagctcaacaggccaaagtttagatattcaacttgaaaaattaactcaggctgactgcaaacggatttaccaggaaaaacggagtggtcggacagcgcaccgaccacagttccaggcatgtatgaattatttacgtgacggggatacgttggttgtgacaaagctagaccgtctcgcccgttctgtgacgcacttgtcacaaattgctacccgctttcaggaagaagatattgacctcgttgttctggatcaaaatattgatacccgaacatcggcaggccgtttgatgttcaatatgttggcatctattgcggagtttgaaaatgacttacgcagcgaacgtcaggcagaagggattgccaaagcgatagaaaaaggtgttaaattcgggcgtcccgcaaaattaaatgataccatgcgaaacgacatttatcagcgtcgtcaatcgggggtaacaatagggacgttagcaaaggattttaaactcggtgaagcaaccatttatcgggtactgaatgcgtttaaaaacagagataatgcgtagatgtcacaaagtttataaaattggcaccccctcatgaggataaattgatccttgagcgttagagtgctaaagttaatagacattaatgtgtgtttttaaatcagaatttctggtcagtcacgccgaaaggtgactaagataccgtcagtacgcgaaattcactggcggctaaaaagcagaaaccccataatctgagtcatcttggcggaggaagcagaattacggggtatcatagagcagaaatcgtttgtggtttctgtgtaggagtatagaacgatgagacttctattgcaactttttgatccccgccataagtgcaggggttgtgtataaagttcaacacaccctatcaacttctgattaccctattcgtacccggcgtggtgagtccaatgccctgagaaaagggcagtccaaaatccaccggcgtaatacaccgaatcaaaacattcaggttccgaggggaacgcctgcgcgtcttgctcgtacgttgaaaagccacgactggtggcgagatagtgacctaatcaccctgcgacaaaagggatacataccctactctgaacgaaataatatccattatacccgtaagccgatgcgtgtgcgtgcccgtacggaaagccgtgaagcaatgacgtcgctcgcactggcattagtcgctcatgccgatttttttccgggccatgattacctgtttgaagtgatggtgccctttgaatttattgccagtacaatgggagtactgcatcaatatgagaatggtcgtaaagcatatgatattgccttacacgcactctctgtctttgaacaaatgaagcatcttgtggttcatcgagataaagatcgtgacgctggacaaaataaaccagtacgtatctggctgacaccggattttttcatctctaaaggcattcctcgtgaggaaatccggcaaagtctgatcgcttttcagaactgggccgttgacagtggtcagcttgaaaatctgaataaaaaataccagcgccatttattacgcatggaaagattgggaattgatatcagaaataaacacgccttgtgtaagctactgaaaaacataaaacgatctgttgttgcacctgatttactggaagagaaagcgaaagccatcaaacatattgaagagacaattgacggtttggataagcctaaatcagagaatctggaagcggaactgaatggtactcagcgggcgctctcacgcttgcagaaaaaaaataaaacctctcgatcatactgggatttgtatgttcagtggcaatatacaacaacaccagcggcggtttatattgcccggaacaagttaaaggcacagcatccgcatttagcggaaaattcagaccagttttatcgtctcttgcttgaacaggaaggggtcatactcacctaatcgatggtttaatcgtcatatcaatgaaaccgtgcacaggcgcggtttttccgttgactttactcgcaagtggattgttttttgttcaaatgaagcatgggcgtttccaacgattatgtcatttttttctcttaaaagagatcatctgtcttaacactcgccgattggataataaatcctcatttaatttcgaacaatgacctgtgaatataattaatttcgaaagttatttctgaacaaaaaagccttataaataaggaatagcattgcgttgggcctctaaataaaggccacaacgcaagatgttagtccttttcactacgttcaaaggaaaaacagtgacaattgatgcaaaaggaaacaaaaagaaaaaaggacttcgcttgcagcggctaacgccgcgccactcagaaaaaagaataaaacagtaacatcctaccgctattttagctgaaaaacaaaacagtcaaatcatcatctaagacgctatgctatcgagtactagcaagttctgtgctgagagttcgcttcgctcacagctttgcaggtaaggggggcttgctccttattaaaaggcttctggtcaaatttagataaatgaaattccaattcctttatcgcagctgtccagtaattaccctagttaactagataattaaaaatattcaataatgaaattaattgaatatacctagtaattgtaaatatttttgtattcgtggtgttgtgaactatattctaaacttgatgcgtgtagagagtattttatgttctgtgttcccgttaaaaacgcgttaaataaactgtgatttccatcatccctgtttacaggtgtttttaaagtccctaacgggtatttttagtgattaaacttacctgtttaacataatttatgatgggtgcctgaatttataattgtataaattttttccattttaaatattttattttgattctatttgtaatattatggttttttattaaaaataacaggatatgaagatggcgaatattatttatcttaagatgatgggaaataaacaaggtttgatttctagcgggtgttctactatagattctataggcaataaatttcaaaaaggccatgaagacgaaatactggttaatgaattatcctctaatttatctatgcatcaaaatgtcaattttcaacctatcgatatacgtaaacctatcgataaatcatcgcctttattatcacaagcattaacatcaaatgagttattaacctgtgagtttttcttttaccgcacttcgatgagtggcggacttgagttatattataaaattaaattaaccgaggcggctttggtgaatatcaatttcttttgtccaaactctataacacataatgatgctcaaccagaagagtcactctctattaaatttaaatccattacgtgggaacatgtgactgccggaaccagttcttacagtatatgggatgagagggtatactaatgtcatcaccgttagagactaaatttaatttttatgcgaatgaattaattaagatttctcaatatgcatccgcttatctattggattacattgagtataaaaatggctataaatatgaaataagtcaggttgtcaggttgataaaaaatgattttcaagcagccttatataattatgaacaaggaagaggcggtgaatattggacacaggcttcaaaatatgtcgatgagatacaattggaatttgagtcggaaagatttggttatgaacaattacgaaaaaaagataaacaagcttatttaaatacgcaagaatactcagggaaagggtatgtgttttatggtaaaaagtcgttaactattatcggtggtgctatgcagtttggattaggagtagcgacgtttagaatggggaaactaacaaagagtaaagaacttaaaactatgggaattctaggaatagctacaggaggtagcaattttatagaaggaactacccatatattgtatgaagttacagacggtaaagttgatcccctaaatcctgttaagtttgcaacagaacaaggttttttagctttaggggccaatgagggtgttggggaaatagcctatgatattgtagattttggggttagtgcttattttggttttgccgttcttactaaatatgataaagccaaacggattatacacttacctttagaaaaaaaagggggtggtttagaaaaagcttcactattagataaattattcactgacacaggaggaatcaggttatttgggtgggcaaaggctgatcttaaaagaaaaattcatgttagtagcaagcccatgcttgcttatagggttggtaatctatcaactaaattggttttactgttggataagtatcttaatgacgataatgaaaataactcaaaaaataaataacctttgcttttaaatagagtgggatgcttatttttctatctaatgatattgtgattaagaaaaagggggcgactaataaatatatagaagcgaaaataaaaaacataattaatgggctattgttagtataatatattgttgttagataaaggaatagcaatatggagttggttactagtattgtttgcagatcccagtgaaataagtcactaatccattcattgtatctgtcttttgatttaatttctttttcgtatgcatcgtttaatgatttaatttccttcttatatgagtcgttcaaatattggatttctcgctcatatacctcgtttaacgatttgattttttcctcacaatgttcatcgtttaacgatttaatctttttttcctgtttatttcttaaagatttaatttttttctcatatgcatctcttaaggatttgtctcccttttcatatgcatctcttaaggatttaatttctctttcataggaatttcttaaggatttattttccttttgtgatagtttacttaataagtaaatagtgtttttttctgtattcatagtttttcttcttttttcatgggcgttaatgtttttttatcgcccataattaatgattcttatcaagctatttttatttgtattctttcagaaagtgaattttcattctcttctgagaacttagtgtttattttttctataaacgaatttttaaatttaaattcatgtgttattttgttatcaacacactggaatatttttaattccaaactctcatttttatcaagcgcattaaataataaaggtgaagaactatctacatttttttctaaaattatttttcctatgtgacttaagtcatcaatgccttttgataattccagatagttgagttgtattttatctttgtgatcattatcatctgaacagtttttagatagcaatccttgaattgtccctgtaatttccatgtaagtggtatactgcatagtatttcctccttagtgttaatgactcccaagtaaaccattttatttgaatataggcaataaaaacctaatgcaataatagggtttctgtatatttacataatgagtcatctgagaaaaaggaatgtaaagtacactagttcttctggtcaaataaagccaaaccatattccaactcctctaactatccctataggaaacaccagtatatcaacaataacccacgcaactcggctatgagaggcatccgatattaccgatattaccgatattaaccacccaataatgcaagcaatgtataaaaagataccgaatgtgtcgaaaaattcgtcgttcatataacctccattagagaaacgaactgttttaattacagtcatatttgttaacgataaaaacggcttgggtgttttttgttccaccataaatgaaagagacaattggcggataaatcgaattgttaaaccaggtttgagtacaccagtttgacttaatcatatggagtacattggaatgtaactgttttttcatttcttctgtaataggcagcaatacgatgtaggaataaatgaatccattatcattgggttttatttttttcatgatcgtatatttatcaatccttttcggtagattctggtttaacgtagcaatggccgctttcatttcctgaatgtcttcctgaatgagttgtttcttacttaacgtttctgcatgggatacgctcatataaatcatcatacttgcaagaataagcgccagaataataagggcacttcccctaataagtttatttttcatagtgttatccttttttacagggcataagtaaggcttctatgttaaataggtaaatatagtgtattcaggaagttaagttgaaaaaaattaaaagtgtttattattagtttaataaaattaattgtgttttatgccattttaattcgtaactttgaattattcatctaagtatatcgtttaaattgataaacagctctgagttctgtgaggaggtcgttacatggatcaccggcccagaaaccaaatgtgccgcatcaaattttccacttacctgacaggcatcttctattgcttcttggggtgacatgccatgatcaagattactgtatacccgtgatgttatttgtgcgtcaccaatcacaatccgttgttttggcacggggaaaaaaggaacagaaagtcctgacgtcaaccacatataattctgtttttcagggataatcaatatatttcctgtatccgcatcatcagtatcgcgtaaatgtgtcagcaattctttgcgggtttgctcacaaaaattcattcccccacacatataggcatgaataagtgcatacccgattgacggatcaccaacaaaacccgccaacccacgttcatgaaatgacatttcactcgcattgggggaagtatcatttgtaccattcagatggtaagtgaaaattttttgaatcgtcatgcgatgatagttatcaacacaaagggaatccgcatacaaacaattttcctgggcatcgtagatcacaacactcatcgtggtttatcctttttcatcagtcactcctcaccgcaagcggtgagaagttatgtgaatgaatcattacgcattgggccatagctcagtgaattcctggtaaatgtgcatggccaacgtcatattctgcagtcgtttggcattttcacttctggctaccgcacgggactgtaacattgcatagagatcatcgagtttttggtcaaactcaactgcatcaatatctttcaatacgtgcatataattgacgaccccggcagtcacaagacgtggagtctttaatggctgctgtcgcgctaatgcggtcagcaattgcgtcataacctgagtattaaacgatgattcgggtggaatgctcacatccggcatcaccggtggtgttgtcggtatttcgggtacggatgacggcggatagttaacggccacggcgacatcttccgtagcagaacgtaatagggctgcctgtgtctctaactgttccgacttctgcaatgcatccggtgagacatacgattgtttattccggggagctttgttttgcttcggctcaatagggatctcctgcaggctatcggcagacgggatcaccgatttttttcgtgtcgagggtttagtcatttgtttctcctctcagatcaagttcccaaacattgggcctttttgattttgtcggaatactggtgacaccttccagcatatgcttacgggtatctcgtgcctgcaatagcttcatgtgtgctttaaacaggtcaaaaggatagttattactttcacaccaacgccgtgcaaaacctttattaataaataatttatgactgtaattttcctgacgcaaaccgagttctttcgaagggagctggttcgacataatgggggtatttgctgctctgatttccagacgattctcaaacgtggccgaaataaagtgttcaaagatactcgtcggggtgactttatcctgctcgacgttgacacgtatcctttctaactgttctttcacggcggtcatgacccgcgccacatcaaaatcccatacccccaactctttaccaagaattaatcccgcgatccccagtgagactgtccatgtccaataacgttctttttgtgtaaaatcaaaaaatgcctgacattctcgactcacgtcttcacagagctttttcaccagatccatgttacgcatgaggttgcgtaaccagagtcttcctgcagcaccagaatgtatcgtgcgggctaacataaacgtttgttcaacgaagtctttgtgctcgttgctcctcccccataggcttggtagattgctcatgtcaagttcgataacacgggcgtttaaagcctcggacagcgcattcatgtttaccagttgttgtgtcagtgataagtttcctgttgacaagaccgccatagtccaggaaccattattttcctgtaaacgattcgtattgggtaatcctctgtccttatcccgcccctgtgttacggaataaacaaaatccgtcagttctttaccctgacgttcagtgatttcatcaatgaacatggtaatggcatttaattcacccagccgtcgatatagtgcaaccgccgtgtctcgcgtcaaaccttcaataccactgcctccatcgacttggtgacgtccccaaatcgataccgccaggcgcgcagacgttgtttttccgacaccggatttcgttgcataactatgaacaagacagccctggacgcccattaatttaaataatggggcggcaaaactcacacccatcaaaaattgtggcagctccatatctggcacattaattaaatccattgctttacgaaaaccggctacagacgcatcctcactcatacgaaaggctttatccatactgcccccattattcgccagtatcattggtcgtaccgaaccatccacacgaaactcggtattccccaacagaaaagcagacatatcatctgtccagccataatgttggtgttgcttatcagcggcccgtacatcggcagcctgctctgcggttcgacgtaaaaaggtcataagatttccccattgcccttttgaggtgaccgtgacaccatgtttacttaataagccctgtaaactctgatctttgggtaactcggatactggtaattcaaatacccgtgccggatcatgtggcatcgtcacctgcatcacaaacgactcaccgttctgtggcgaataaacgcggttaagaaataaaagcggatatttataaattaatatttcttttccatctgcttcttttgcccgcttccagatccccgatcccatcgcgcttgacgcaattttataatcacggtgcaatggtaacggttgctccgttatctccgcgacctgtttactcagtaatgtaattgaggggagttgaccatcctgtatcgttaccggacgcgcttgcggaatatggttaataatggactttaattcttcttcggaggcttcttcaatgactttaccaagtacaatgggtgatcgaattttgccccaatgggggcaatcacgacagacatccgggttgagacgactgaacatgtcgcaagtgtaaggtttatctatcacggattgtgctttagcttccgtttctgtaacggagtaagttggatactgatctgagattttatgtatccattcctcaccatcaaaacaatttatcgcaatcgataaagctccccgccatgtcggttcgtcggtggtactttgttgttcataacataaggcgagttggtcacagccgcctggtttggggtttgtactgcctatatcacatagtgcgatgatctgtgcaaacgaaaatgatttcttttgcactccccataccgcgtcctgaaaatcattttcatcttgaagaaaatcgggcatcgcccccagactattcgattgcggttgtacataaggtaatacttcctgcatttcagcaagagagtagggtgtggactcggtggctataatacgaacggcattaccacttttggtatgtcgtgttcccggaacacgtaaaatgccgctgatgcgcatacttgctcctgcgtccatttttaaaccgtgtgtgcggacgagttgttctaatcccccatgaagtacccgccattgttccggtgacacgggtttatccagtatccaataaatatgtaaaccttcaccactggcaataatataattcggttgccacatatccgcatcaacgagccattgggaaaacgcggtataggctatttcaaagctgggataggcccactttgggtgtttctcgaatttttctttccctgcatcaatatctagccatagggatttcacttcctgtacatgatcatcccgacgcccagcatattccgttccttttgtgttaaaggaagacatggcaaagtataagtccgtctctcctgactcatgctgctgaataaatctggcagcattaccatcgcggatattgacccagtagttacgaacttctttacctgtcgctgtccgaggattctttttgatggtgacaagcaccgtttcaccctctggaggaacaaccgacgttaagaagtccatacggtgccttataggttaatactatttttaatcaatgattggatgttttttaatccaataacatcccagtcgcgttttgaatcgtcgaagggaagttcaccgtcgtcactgagatcattagcccaagtactgtcatgtttcagttcttccagcgtgtacttgtatttcaatgccgtctgtactttttcagcaaaggctaaaagaatattgggatagaccgtcttaggactgcacggtaatgctcccacggcatctatttccgttaataccataatggctaaacggacttcatcggtatatttagcctgatacgctgacgcattgacaagacgtccaatctgggacgctgacatattgggtaagagataacccaacgttttattattaatacccaactttaccgcaagttctgtaagctctacagataacgtagcctctgacattttcgtctccttaatgccatgattggatcatcgttgatgcgactaatcgttattttgtaacaacgctgcgttcaaagctgcctccatttctggggttaataggctgcctttacctcgtgtcttgggttgttcatcatctggagcttctgccgcttgttgttgtgcggcacgtaagctcggtgaggcattcgagaaagtctcttcggcttcggttgcttcaacgacagaagcacggcgactgacgcgttgttgtgtcggcgtattaacatctgcagaacgctgttctgttgctgaggacgtcaccgttgcacctcgcgtccgtgttattcctgttgaactagtttgtgtcggtgcggcgtgacgacgacgccccagtacagctgaggaatccgcaggcgtatttcgggtacgtgtctgagtgggctgctctggatttgaaacggtatcctgtgatgctacctcgttacgcctactgcgtgtacgtacagtactatcttgtgttattgacgtattctgtagtgtgttcacggcacttcgattgcgtgtgcggacgccactttcctgagcgtctgaggtattttgtccgtctgtcaccggtgttcgggtacgggtacggactgcgaccgcgccattttcttgccgattggcttccgccgcccgtcttgccagagcttctgactgacgacgctcttcggccaaacgttgttcttctgcgatacgacgttcctcagcaatacggcgttcttctgctaagtgtgcttcatattgttgataatcagctaacgtaacttcttctatgtcaggtgtttcaacgggtaagtttgtccccggttgtaacataacaattgcgcccagctccgtatgtcgccagtaggtaggtatgttatcggtgatgggattgtcatagaaaataatttcaccggtaaaggggtttaccgtctcctgtcccgtattaactgattcggtattgcgtacaggtgtatgagccgctggggtttgcaaatgggctggcatttgtccgaatccctcggcactcaatggttccgcttgttctgtatccaaaacaccgagccgcagtacgcggtcaagttcgtcagattcaatcagttttcgtacctgttgatattcttcgggatcagcaacgtatcctttgggtttcatcaaaatacgtttatgttctgagtaaggatcaacataaagctgaatccaggctttcgagggatctaatttttgttttctaaaccaatttacgagggcattcagtcccatataaccatcgatattcggtttttccccaaagatagcggttgatgataaattcacctgaaaaatagtatcccacgtactgtcattttctcccggtgtccaaacggcaatagattgccgataacgacatgcccttgattcaccattaatgccagagccgggaagattttgtggacataaatcacagcgcgtacactgcttatgtttcgcatcggcagctggcgtaatattatcattagagtaacaatcaggggtttctttactgccttcaatatacgtatcacgataaaatgtgcgtccgacctttgatggtcgaagcataacaacggtcataggctgcagaggttgggactgggcgaccagattcgggccaataaaagcctgcaatatatgtcctttcattttgatacgagcaaaactagacagtccaacatcatcccagtaagcacttaggccgtcgtgttcatcgcgcaaatgcgcgggtaaattatgatcaaaggtcacgatagaattattcataaggaattccttatttcgcgggtttgaattgtatgtgttgtcgtgtaaatgcctttaatcccggtggcagggcatcaccatgctgttttctatacgcttccacgcgtggttttgatacgtttttactgaaaaaagataagtcctgactggtaacaataaaatctccccaggcatccaaatcctgcacactgtattccaccgtcgtttttaagagaaccttacctaattccgtatccaatgaatgaattttctcattttgcatccgtttttgaacttcgtaatacaggacgcgtaattgatcatcaatgctttttgtttcctctatcattgccgccttgtgcatggcttcaatggcttctttctgttgcattaattgaatatgggctgaggccaattgcgctgttgagataccgacaaaaggatcactcattgttagtccccctggttgtcttttaagagactcctgtaaatatctagcaatgttaattgagcatcggcgcgtcctgcggttatgtcataaagctgtttttcccgttgatcaccccagatttcggttaccgtcatatggtgtgtctgtccattacgttccattcgggcattagcctgtaaatacacttctgtactgctatacggtgcaaaccaaatggtatgactcgctgccgttaacgtcacaccgtgtgcaaatgcggagggcacaccgactatcacttgcatctgtcctttaagatcatcttgaaaactgtcgaagattttttgacgtgctgtcttacttatcccaccgtgtatgacgccaaccgcaatatttttaaggcgtagataacgggcaatcatatcaacagctgcacggaatggcgcaaaaataagcacttttccctcttcactgtgaataatttccagacattcattcaatcgtttcgtgggtttcatttcaaccacttcaccattttcagaaagcacggcaccacaacaaatctgtaccactttattcaacagaatagcctggttatctcccgtgatatcttcacccgccaaattaaccgtctgctgaacacgtaacatcttaattgcagcattctgtaccgatgttaagggtaaataacgcgattcatatacaattggtggcaaatcaatacaatcccgtgttcgaattcggatcgcgggtttcatgtattttgcgacggtatcctgccaaccctcaagaggaagccgtttaaactcgttgactttccacgtcgttaaattttcccaccagtagatattcggcaccgtattaccaaaaccatcaaacatacaaatctgaccgaatgcatcttttggccccattggtgtgggggttcctgtcatttgccacgcatacatggcattacgcacaaggggataaaccaacgtccataaatccgtttccctgttctttattttagtactctcatccagaataatcaggtcgtaattattctgaataaattccttatgaagtccttttaacgcttcataatttgtaatatgaaacggcgcagccgaggcgacctgctcttgtttcttttttactgacccttcaattaccgtaaaatccgccacaccgaacagcaattttgcagcggtaggctgccacgcatccaataatacggaagatggacaaagtaccaggatcttttttaccaatccgagggtatacagataatgagccgcccagatgccgatagcggtcttccctgttcctgtacccgcaaaacaataggccttttttctaagacataaaaagtcagcacacacaatctggtgctgatacggacgaaaatcactggggccgggccaattatagtcccgataaataggactaacagcgggtaaattggcaaacgccagaagtgccgcattataatagttccacttataggcaactgtattgtcacccagatcaataagcccttctggattcaacacacgtgcccgttctagctcttgttctgacccttgaatgacgagcgcccgttgctgatagagttgcaacgttgccatcatccagccttatgaatatacatcattcaataatgtttcctgccataaacctaattctttgagtttattatcacgagcttcgcgggcctctttaatcgtctgatagccaccttgctgatcgagtccttttccccgataaatgcgccagtaaaatgttttctcttcacgattacggtaaattcccgcacgaggattacgaaagagttgtgcaatatgaggagaaagacacacaatattatccacggtacgcgcacaattatcatccagtaatcgaacaaggccattcggttctttgcctgtcacgacggcccaaataagatccagaatatttttccgtatgtttcccgcaccgctcccaatagcgatccgaacatacgtgttactgccattcattgtgatacccacgtgttcacccgcataacgttggttaaaccatgtacaggaacgttctgccattccctgatctgcctgactgtattttcggtagagttctggtgtacgtgctttccaaaaaagaccacccgtatcaggattataggtcattaatgcctgtaaatctttcgccttaagagtgtgtttcattccattgtcctccgacaagtttcattatctcttcatcagatagccctgcagtttctttgggtttcagttgcttaagtatactgaccaatcgggcattggcgttagtcatgccttctcctgccaactgaacgctgttatctaatgattccatcatcgtcagaatggtttccagcatggcctgttcttcttttcgtcgctcatataaattgcgcaataacaccaataaggcatctccccttattgtcagaaacgtgacatctggattttctttcattgtcatgagtatatccgctcgtatgtcaactgtcgttcacttctgaaccgtggcattaaacggacagttcatcaccggacaataggcacacaacggcgatgtctgttccggccaataatcacgttcataagaatcaataatacgtaaagattctcgtaaaaatttccgcatttgtatcgcgtgtccttcctcatgaagagaggttgtatgcgttttaacagtgcctgcttctaagaatatcagggcactatcaaattgcgtataatgctgcatggttggctgtgcttttgccatgacactcattaaatccagttgatcagttttaggataacggtcttttcctgttttataatcatacagatagagtttttttaaacttcccatccctaaatcggtttttccccgcataaaaacggcagacgtatcaaaccaacttgctaccttgccgtccgctttaatggcccattcctgttcaccgaacaaaggaataccaacacgctgttcggctactaaactattaaatttcttctttaacatatccgcgacgccagtaccgattttttctttcaccaccgtatccatctgctggccttttaacagataattttcgtgagcctggtgtacccgcgttccccataaggtggctggggtgtcagtatagggaatgttatgtgtcaggtgttgttcataaaatcgtcgtggacattgttgatactgactcagtttcgaaaatgataaggccagcgacaaaagtttaccgcccccaactggtttatgaattttattcggccattccacatcatgatccaggggatatgcgattaagtcgtctttttcttttgctgaaaatatcactttacccatcgcgcttcgctccgggaatgcgtatcaccggttgaacgtcagctggcttttggttttccgaatccaagatccagcccgtgataaattgtgtaatgagaatactgaactgttgcgcatccgtcagtttttctaagtcggcatcacattggggggcaataaaatcgttaccaaaattataattgatatcaacttgaccatcaggcagatcggtcacggtaataatgacatttgccattttacatactctccttttgacagtgaggacagtgacaggccatgagatgcacacatggttcgccattagattttataaacaaaccatgacaatctggacagttgtgatgtaaacatggcttatcattttgaaattgagaggtatttgataagggggaaatgctcggtgtatcgggtttagcatacagagtgagtttgctatcggtatccagatagcttcatcatattgatcaccataggttgggcctgcggtcagctcacaatcaattggtgtccgttgcgcccaatcggggcgctctctcatccggtattggatttgttcacagcaataggaaagatcttcgtttggtagaataaaaattaattcatcgtgtacggttaaacaccaaaaaaggccgtcatttcgcaggttcatcatcattccctgtagaatacgggtagaactgccttgtgtgacattattggcaataatgccgcgataaatcttgcgggtttcccgtttctcggcgtcggtatacaaaatgatgtcgcggtttagttcatctttaccggcgatccgaagatcgtcataacgcagtatccagccatccggtaaaataatcttgtttttcatggcaatatagttgttttcatagccaaaagaataggtgccaccataaagcatcacgtctaaggcattttggcactgcgtccagaactgaacgatatttttataacggtcacgataaagtaaaacagcgtcatggcagaattctttggtgacatctaaatcataggctgtacgtagccgtaaataaaacgattcgaaccatgacccatattgcagagaaagaattccctctttaccgacgttacgttctttctttcggccatttatttttgagacttcataaccatataacatcgttgcaaagtcagagtagggatcttcattgcgggcaaactgtaacagcaaatcgtcctgtccggcatggtcagccatccgtctggcttcaatctgtgataagtcgcaggtgacgactgaatagcctttcggtgcccgcagggattgtcgtagcgtcagatcgccgccacgtttggggaagttctgaacattaatatcctgatagccgacccagcgtcccgttgttgcaccaaacgctttcaggggaaccggcatctttcctcgatgtgcaatatctaatagatttttggctcgtgtgatcccaatcgtggacttctcgcccatacgggcctcacagacagcctcaagaaacggatcgcccgatgttaagagtgccttaaatcccatgtccattttggcaaacgcatacgtctttttcggtgtcccatctgcattctttgcggtcttactgtctttcataggaacatccacacccaactgcgtcagtacctctgcaaattgagggtttgacgataagcgtttacgaaatgtctcaacatcctgtgaaaatgccgcagaaatttttgccagtttttcttcctgtagttgtatcaggcgcgggatatactcacacaacaacgctttatctaaatcaaactggcagacacaaccggcccgtatcgtgtcggacatggtgaccatatccatttcagagtagtgccaacggaaaagaccgtagagtggtggcaaaagatccacatctcgaaggccataatccccataccgctgtaacccggtagccgtaaaatgttccagacgcatccccatcacctggtgaacttcttctttcttattcggcagggaataccgttttgctaattgggccagactgtttgccgcttttgcgccatgtaatggtcgcgccatcgtcatggtacaggtaaactcatggggttctataccgtagtaatctgacagaataaaaccatcaaagggaaggttgtgtgcgatgacgttgcagttgtgtaacatgagggcattcagttcttttcttactgcacctttatggttcggtatccagtaccgttcgcccgtatcaggaataagaaaggaacaaagtatgacctgaaaacggggatcacgaacatacttttcataggtcatgccttttgctgataacgaatacttattggcaggatcataaaacgtttcaaaatccagaaagactttcggaatacgatcaaaatcagaggtcagagcacgtgttaggttgtgacgggattgctgcttttccttatcactgaatatgtcgttttgcagaattccataatcgtatgcgtataacattatgttacattccaagtaatcagtggcctgataatcagataaagtaacccgataagacagaaaatcagtacccagtcacctgattttgacataaaggctggacttactgtgtcttgacgccggtcataaagctcttttaaacattgcaaatgatgctcggccatttgtaaattatctttatcataacgtgcgggcgtcccgtcaccatatacatctttgttttcagaatatcccaatctttatccgcaagaacgataaagacacgaaaaccgacagaacggtataagacctgacctgtcagataacgtcgcaaataatacgtcacttcttttgctgtattatcttcatctgtccgtgatatcaccaacagactgccttgtgataagagggcaaacgggtctaatttatacagatgaaaatcccactgtcaggattttcatcatatagccattatcccagccagccttctggcgcttagtcttcacgcctattttaactgacttctcatttttcagtaagttaagtgctattttattcattaatgccacattttcggccgcatgaccgcttctcagacgccggctatcctcaccaaaactcacatccaattgccagtgcagtttattttcaatatgccaatggctgcgtatggcacacgcaaggaattctgccgaggcaccacgatggctggtaatatagtagcgcctttcataactctctgttttaccttgctcttcccgccatgactccacaaccgcgataccccccaacgtgtgccactgaggatgacgtttctgcagccaattcacgtcgttaattaaccacaactggcgctgttctatacgaccatgatcgccatccgtacttcggtaagtgccatggataacgcccgtaaaacccttgccaattcttagagacacatggtccgag

SEQ ID NO: 422 - DNA, 35411 bp, Xenorhabdus sp.; identical to SEQ ID NO: 421
  CDS (1)..(510)

SEQ ID NO: 423 - DNA, 83080 bp, Xenorhabdus sp.
  CDS (38740)..(39948)
acagggtttggatccaggtaaacccaggccttcgccgcaaggcaatccggacatgatgggcgcagatttgacctttagatgtcctgtgaagtagtcatgattattatttcgtaggaccaatcttgatattcggacagttaaagggatggattgtttttccagttttagcattaacttttaaaaccgctttagaggtcatcaataattgaatttaaaatgagcattttttgctgaaatttttgaaaaaaggaacataccaaaaaaaaatgcgaaaaatctattgtcagggccgaaaaactccctataatgcgccaccatttaccgacgttgaggtgcactcagccgggaaggacagcggatcgaaagcgaaaataattgcttgactccggaggcaaaaagcgtaagataggcagcctcgcaacccgaaaagaaaggttcggttgcaaccgctctttaacaacataatcagacaatctgtgtgggcactcgcaagacactatcgacagccgaaaggcgaaaaagattcaagtcttgaagagtgactgaaacagttaattcattacgaactaacagtaacgattctttgagcatcaaacacttttaattgaagagtttgatcatggctcagattgaacgctggcggcaggcctaacacatgcaagtcgagcggtaacaggaagcagcttgctgctttgctgacgagcggcggacgggtgagtaatgtctggggatctgcccgatggagggggataaccactggaaacggtggctaataccgcatgacctctaaggagcaaagtgggggaccttcgggcctcacgccatcggatgaacccagatgggattagctagtaggtggggtaacggctcacctaggcgacgatccctagctggtctgagaggatgaccagccacactgggactgagacacggcccagactcctacgggaggcagcagtggggaatattgcacaatgggcgcaagcctgatgcagccatgccgcgtgtatgaagaaggccttcgggttgtaaagtactttcagcggggaggaaggcgtgaagttgaatacgtttcacgattgacgttacccgcagaagaagcaccggctaactccgtgccagcagccgcggtaatacggagggtgcaagcgttaatcggaattactgggcgtaaagcgcacgcaggcggtcaattaagttagatgtgaaatccccgggcttaacctgggaactgcatctaagactggttgactagagtctcgtagaggggggtagaattccacgtgtagcggtgaaatgcgtagagatgtggaggaataccggtggcgaaggcggccccctggacgaagactgacgctcaggtgcgaaagcgtggggagcaaacaggattagataccctggtagtccacgccgtaaacgatgtcgacttggaggttgtggccttgagccgtggcttccggagctaacgcgttaagtcgaccgcctggggagtacggtcgcaagattaaaactcaaatgaattgacgggggcccgcacaagcggtggagcatgtggtttaattcgatgcaacgcgaagaaccttacctactcttgacatccagcgaatccttcagagatgagggagtgccttcgggaacgctgagacaggtgctgcatggctgtcgtcagctcgtgttgtgaaatgttgggttaagtcccgcaacgagcgcaacccttatcctttgttgccagcacgtaatggtgggaactcaagggagactgccggtgataaaccggaggaaggtggggatgacgtcaagtcatcatggcccttacgagtagggctacacacgtgctacaatggcagatacaaagagaagcgacctcgcgagagcaagcggaactcataaagtctgtcgtagtccggattggagtctgcaactcgactccatgaagtcggaatcgctagtaatcgtagatcagaatgctacggtgaatacgttcccgggccttgtacacaccgcccgtcacaccatgggagtgggttgcaaaagaagtaggtagcttaaccttcgggagggcgcttaccactttgtgattcatgactggggtgaagtcgtaacaaggtaaccgtaggggaacctgcggttggatcacctccttaacctatgatggtgaaatgtgagtgttcacacagattgtctgatgcatgtaagacgagcagcgtctgcgaagaagacttgaagtccccttcgtctagaggcctaggacaccgccctttcacggcggtaacaggggttcgaatcccctaggggacgccactttgctcgggagtcgggtgaaagacggcgccaatgaaggtattgttaagcgggcatagttgccggtttaccaatacatgctctttaacaatctggaacaagctgaaaatttgaaacactcagtagacgtcgataagacggtattgaggagtctctcaataccccaatccgaagacaccttcgggttgtgaggttaagcgactaagcgtacacggtggatgcctaggcagtcagaggcgatgaagggcgtgctaatctgcgataagcgccgggaaggggatatgacccgcgagacccggcgatacccgaatggggaaacccagtgcaatccgttgcactatcctgacctgaattcatagggtcaggaggcgaaccgggggaactgaaacatctcagtaccccgaggaaaagaaatcaaccgagattcccccagtagcggcgagcgaacggggaggagcccagaaccaacatcagtgtcagcgtcaggagaacggtctggaaaggccggcagtaaagggtgatagccccgtatctgaagacgctggcagtgggagttcgacgagtagggcgggacacgtggtatcctgtctgaatatggggggaccatcctccaaggctaaatactcctgactgaccgatagtgaaccagtaccgtgagggaaaggcgaaaagaaccccggcgaggggagtgaaagagaacctgaaaccgtgtacgtacaagcagtgggagcaccctttggggtgtgactgcgtaccttttgtataatgggtcagcgacttatattctgtagcaaggttaaccgtctaggggagccgcagggaaaccgagtcttaactgggcgttaagttgcagggtatagacccgaaacccggtgatctagccatgggcaggttgaaggttgggtaacactaactggaggaccgaaccgactaatgttgaaaaattagcggatgacttgtggctgggggtgaaaggccaatcaaaccgggagatagctggttctccccgaaagctatttaggtagcgcctcgtgaattcatcttcgggggtagagcactgtttcggctagggggtcatcccgacttaccaacccgatgcaaactgcgaataccgaagaatgttatcacgggagacacacggcgggtgctaacgtccgtcgtgaagagggaaacaacccagaccgccagctaaggtccccaagtcatggttaagtgggaaacgaagtgggaaggctcagacagccaggatgttggcttagaagcagccatcatttaaagaaagcgtaatagctcactggtcgagtcggcctgcgcggaagatgtaacggggctaaaccatgcaccgaagctgcggcagcgacacgtaagtgtggttgggtaggggagcgttctgtaagccgttgaaggtggcctgtgagggctgctggaggtatcagaagtgcgaatgctgacataagtaacgataatgcgggtgaaaaacccgcacgccggaagaccaagggttcctgtccaacgttaatcggggcagggtgagtcgacccctaaggcgaggctgaaaagcgtagtcgatgggaaacaggttaatattcctgtacttggtgttactgcgaaggggggacggagaaggctatgtcatccgggcgacggtcgtcccggtttaagcgtgtaggtgggcggtcttggtaaatccggacggctgataacactgaggcgtgatgacgaggcactacggtgctgaagtgacagatgccctgcttccaggaaaagcctctaagcatcaggtaacattgaatcgtaccccaaaccgacacaggtggtcaggtagagaatactcaggcgcttgagagaactcgggtgaaggaactaggcaaaatggtgccgtaacttcgggagaaggcacgctggcagtaggtgaagaaacttgctttcggagccgaagccagtcgcagataccagctggctgcaactgtttaataaaaacacagcactgtgcaaacacgaaagtggacgtatacggtgtgacgcctgcccggtgctggaaggttaattgatggggttatccgtaaggagaagctcttgatcgaagccccagtaaacggcggccgtaactataacggtcctaaggtagcgaaattccttgtcgggtaagttccgacctgcacgaatggcgtaatgatggccaggctgtctccacccgagactcagtgaaattgaactcgctgtgaagatgcagtgtacccgcggcaagacggaaagaccccgtgaacctttactatagcttgacactgaacactggtccttgatgtgtaggataggtgggaggcttggaagtgtggacgccagtctgcatggagccatccttgaaataccacccttgaatggctggtgttctaacgtaggcccgttatccgggttgcggacagtgtctggtgggtagtttgactggggcggtctcctcccaaagcgtaacggaggagcacgaaggttagctaatcacggtcggacatcgtgaggttagtgcaaaggcataagctagcttgactgcgagcgtgacggcgcgagcaggtacgaaagtaggtcttagtgatccggtggttctgaatggaagggccatcgctcaacggataaaaggtactccggggataacaggctgataccgcccaagagttcatatcgacggcggtgtttggcacctcgatgtcggctcatcacatcctggggctgaagtaggtcccaagggtacggctgttcgccgtttaaagtggtacgcgagctgggtttagaacgtcgtgagacagttcggtccctatctgccgtgggcgttggaagattgaaaggggctgctcctagtacgagaggaccggagtggacgcaccactggtgttcgggttgtcatgccaatggcactgcccggtagctaagtgcggaagagataaccgctgaaagcatctaagcgggaaacttgccttgagatgagtcttcccttgtccctagaggacactgaaggaacgttcgagacgaggacgtagataggctgggtgtgtaagcgttgcgagacgttgagctaaccagtactaatgaaccgtgcggcttaacctgacaacaccgaaggtgttttgcggggattgagagcaagacgataaaagtttcagatgaagagtgaccggaaaacagaaagtagccggtgacacagcttgttcgggattgaaaacaggatttgtctggcggcaatagcgcggtggtcccacctgaccccatgccgaactcagcagtgaaacgccgtagcgccgatggtagtgtggggtctccccatgtgagagtaggacactgccagacatcactttgtcagagaagccatccttcaccggatggcttttttgcatttgttctttatctccattttttatttcatagaatgaaataatttcaatttgcgtacaaaaactcgacattcctcccattttaaggttaaattttggctgtctagaaggctaaactatgtggaatgattgaggttttaaacaatgccaattcgtgtacctgatgaactgccagcagttaattttcttcgcaacgaaaatatttttgttatgacatcgacgagagccaatgttcaggacatccgtcccatgaaggtattgttactaaatctaatgccaaagaagatagaaacggaaaatcagtttatcaggctactctctaattcaccgttacagattgatattcaattactccgtattgacagtcgtcgatgtagaaatacaccagtggagcatttggataatttttattgcgactttgaatcaataaaagatcagaattttgatggattaatcgtaaccggcgcccctttgggattagtaaaatttgaggatgttacgtattgggaggaaattgaaaccgttatcaattgggccagagagcacgttacttcaacactttttgtctgttgggctgttcaggcggctttaaatattctttataacctgcctaaatatacgcgaaaaactaaactatcaggtgtttactctcatactattctggaaccgctggcattattgaccagaggatttgatgaaacattctgggcgccgcactcgcgctttgctgattttcctgagtcagctattcgccaatatacggatctggatattttggctagttcagaagaagccggtacctatttacttgccagtaaggataaaagactggtattcgtaactgggcatccagaatatgatgttggcacactagctgctgaatatcagcgtgatcggacggctggtttagaacctgtattacccgtcaactacttcccggataatgatccagaaaataaaccagttgctacatggcgtagccatgggcatttgctattttcaaattggctcaattattatgtatatcagatcactccatacgatttgacctacatgaacccttccttagattgaactccttataaacatctttaaaaatgagaattaactgaagcgagtcatttctcattttttaattttttgtttattttctataaattatctgttttttctattctctatatataacaaaaacttaacagtttttgtttttctattttggaaattaattcccagtttatacatgcctatttatatattaattgtttgattttattaataataatttaatgtatgaaaataatggaaaccgtttttgatttattttttatattgattattcttacctgagtggacactttaaggtgaggaacaggggatgacgcagcaagtattggcaacagaattaacctttataaaacctttttctgatgcggagaagaaggttttatcatctgaatctattcattttctagaagatttagtcgtcaaatttgctgacagacgcaaaaaattactagaagatcggataaattggcagaagaaaatagataacgggaaattaccagaatttatttcggaaacatcttccattagaaatggtgattggagaattcaggggattccggaagatctaaaagatcgtcgggttgagatcaccgggcctgtagagcgaaaaatggttattaatgccctgaatgctaacgttaaagtatttatggcagactttgaagattctctggcaccaagctgggataaggttattgatggtcaaattaacctgcgggatgcagttaatggaactatttcttataccaatgagcagggcaaacgttatgaattaaaatcggaccctgctgtattgattgctcgtgtcaggggattacacctgtcagaaaagcacattctttataaaaatgaaccaatttcaggtgggttatttgattttgcgatttatttttatttgaattataaacagttgctggcgaaagggagtggtccttacttctatttacctaagatccagagttatcatgaagcacaatggtggagtgatgttttcagttttgcggaagagcgtttcaatttaccaaaaggtacgattaaagcgactgttctgatcgaaacattgccagctgttttccaaatggatgaaatcctttatcacctgcgtcatcacattgttggtctgaattgtggccgttgggattatattttcagttatatcaaaacactgaagaatcatgcggatcgcgtcttaccagaccgccagtcagtcactatgacgcagcctttcctgagtgcttattcccgtttattgattaaaacctgccatagacgaggcgcttttgcgatgggcggtatgtcagcatttataccgagtaaagatcctgagcaaaaccagatagtgctggataaagtcagagccgataaagagctggaagctaataatggtcatgacggtacatggattgcacatcccggtcttgccgatatagcgatggaagtatttagttcaaaactgggtgaacgaccaaatcaactgatggtttcccgcgaagaggatggtgagatcactgctgcacagctgcttgaaccaagtctgggagaaagaaccgaagatggcatgcgggcaaatatacgaattgcagttcagtatatagaagcatggatttcaggaaatggttgtgtgccgatctatggtttgatggaagacgctgctacagcagaaatttcccgtacctctatctggcaatggatccatcatgaaaaatcgttgaacaacggtcaaaaagtgactaaagagttgttcaaccagatgctaaaagaagaattggcagtcattaaacaagaagttggtgaggtacgttttaacgagggaaggtttacagaggcttctgagctgatgaaacggatcaccacacaagatgaactagtcgatttcctgactttgccgggctatcaattactcgactgatttaaacaacatccaatcaataattaatattcaattaattcagaataggaagtataggatcatgaccgtttctcgagcacaacaaatcactcaattagagcaagaatggaaaaaagcacgctgggaaggcattaatcgaccatacagagctgaagatgttattaaattacgtggctcagtcaatcctgaacatactttggctcaaatgggagcgaaaaagttatgggaattgttgaatggaaaatccaaaaaaggttatgtaaacgcgctaggtgcactgacgggtgggcaggcacttcagcaggctaaagccggaattgaagccgtttacctttctggctggcaggttgcagctgatgccaacacagcttccagtatgtaccctgaccaatcgctctacccagtcgattccgtaccaaatgtcattaagcgtatcaataatagttttcgccgcgcagatcagatccaatgggcgaatggcattggccctgatagcgtagaatacactgattattttctgccgattgtggcggatgcagaagcaggatttggtggcgtcctgaatgcttttgaacttatgaaagctatgattgaagccggagctgccgctgtccattttgaagatcagttagctgcggtgaagaaatgtgggcatatgggaggcaaagtactggtaccaactcaggaagctatccagaaattagtggctgctcgcttagccgcagacgtatcaggcgtacccactcttcttatcgctcgtactgatgccgatgcagccgatctgctgacatcggattgcgatccctatgacagcgagtttcttactggcaagcgaacctgtgaaggtttcttctgcactcgtgcagggattgatcaggctatcagtcgtgggctggcttatgcgccatatgctgatgtcgtctggtgtgaaacatcaacaccagacattgaagctgcccgtcgttttgcagaagcaattcatgctgagtatccagggaagttactggcctataactgttccccatcttttaactggaaaaagaatctggatgataaaacgattgccagcttccaggagcagctttccgagcttggatataaattccagtttattactttggctggtattcatagcatgtggttcaacatgtttgatttggcatatgactatgcgcgtggcgaaggcatgaaacactatgttgagaaggttcaggagcgtgagtttgcctcactggagcgtggctacaccttctcttcgcatcaacaggaagtaggcactggatactttgataaagtaaccacgataatacaggggggaacctcctctgttaccgctctgacaggatcaaccgaagagcagcaattctgattttttgtataaagttgatattactttgggggattccgtagggaattcccctttacgcgtcagattaaggtggcagacatggaaacagatttagctcacttaattgcacaaactattcttcagggatttgatgcgcaatacggcagatttctggaagtaacgtctggcgcacaacagcgttttgagcaggcagactggcacgcagtgcagcaggctatgaagaaaaggatcaatctgtacgatcatcatgtaggtttggtggttgaacagttgaaatgtattcgtggttcacggttgtatgatcaggaatacattgccaaagtgaaagtggtttatacccgcctattgccggattacccacgttttgaaattgcagaaagtttctttaattccgtttattgccgattatttcagcatcgtaatttgaagcaggaaaatctatttattttttcttcccagccaccacgccgttttcgccatattccacgcccattatcgagggatttttttcctgattccggtcttgaatctatgatatgggctattttgaaagatttaccgttacgactggaatgggaaaatttagacagagatatcagttatatcactcgctacttacaaaacacatttcccggatatgatttactacaggcgacatttcaggttgctaacgaactcttttatcgcaataaagctgcttggctggtaggtaaaataaggctgggtacagaagtttatccctttttattgccgattcatcataatgaatcaggccagatttttattgatacctgtctgacgaaccatgatgatgccagtgtcgtttttggttttgcccgctcttatttcatggtttatgcccccttaccagcagctatggttgaatggttacgtgaaattttgcccgtcaaatcgacagccgagctttatatggctattggttgccaaaagcatggaaaaacagagtattaccgtgaatatctgacatttattaattcatctcaggaacaatttaccattgctccgggggtgaaagggatggtgatgctggttttcacgtctccttcttttgaccgtgtattcaaggtgataaaagataagtttgcgccgcagaaagaagtttctcaggagagggttcaggagtgttaccggttggtcaaggaacatgatcgggtcgggagaatggccgatacgcaggaatttgagaatttcgtcattgataaacgtcatatcagccccgagttaatggaggagatacagaaagagatccctgacaagctggaagatttaggtgacaaaatcctgataaaacatctttatatggaacgcaggatgctcccgctgaatatctatatggagcaggtagatgaagatcgtctgaaagatgctgttgaagagtatgggaatgcaattaaacagcttgcggcagcgaatatctttccgggagacatgttattcaagaattttggggttacacgacacggaagagtgattttctatgattatgacgaaatttgttatatgaccgaagtgaattttagggatattcctccagcgcgttatccggaagatgaacttgccagcgagccgtggtacagcgtagcgcccaatgacgtttttccggaagagttccggcattttttatgtagcgataagcgcattcgtaaatattttgaagaatttcatagtgacctttttaaagccgattattggcgagcgttgcaagagcggataagaaaagggcatgtagaggatgtttttgcttaccgtctcaggcagagattcagtcagcgtaatgagaacagagctgaagagcagggcataacaaaatatgcagaatcattatgtgaagagaataatgttgtggtattagcttctcccaaccgcgatattcactcttaatataaggtggcatggtaaaaggatttaattggttttcttaattatttggcaaaaaaatgctggattcatgaaggcggaaattctaataagtcgtcctgttgaaataatagaatttccgcaatttcaaaaatgatccggctaaattatgctttagcgcctgttattgcattatgagccagttccgtaatatgcgcataatcaccttttttcaatgcatcatttggtaccagccaagaaccaccgatacataggacactattcagtgccagataatcacggtaattatcaggagaaattcctcctgtcgggcagaaacgtacttgtgggaatgggccagcaatagctttcagcgctttcacgccgccattggcttccgcagggaagaatttgaaacaatttaagccatagctcatacccagcattagctcagagacagtggagatgcccggaataagaggaattgagccagcagtcgcagcttttaacaactcgtcagttaacccagggctaatggcaaactgcgctccggcctcagtgacggcagaaagttgttcggggttaatcaccgttccagcaccaataatggcttcaggcacttctctggcaatgagacgaattgcttccagcgcgcatgctgttctcagcgtgacttccaatacccttattccgcctgccaccaacgctttcgccaagggtacggcatgttcaatttcattgattacgataacagggacgacagggccatcagtcagaatgctttctgcggttgttttccaattattcattagcaatttctctcatcgaatcctacacaagggatttaaaatccccggttataaaaatgtaatggaacatgcaccttgctctgcaccggaaagttgggtgcgcaaagcaccaaatagttcacggccacaaccggtatgtcctgtgcttaaatcggcttggtaaggtactctttgtgctaattccagctcatcaagcagcaacgtaagtttgccagtgcggccatcaatacggatgaagtctccatcctgtattttggccagcactccgccagcatgggcctcaggtgtaacatgaatggcggaaggtactttaccggatgcgcccgacagacgcccatccgtcactaaagcaactttaaagccacgatccatcagtacccctaaaggtggcattaatttatgtaattcaggcataccgtttgcctgtggcccctgatagcgaacgacgacgacacaatcacgatttaattttccagcctcaaaagcaggggcgatatcgtgctgactattaaaaacaacggctggcgcttcaataacgagattgttggctggtactgccgaagttttcataacagcacgaccaatatttccggtcatgacttttgtaccaccatgatgtttgaacggttttccaatgcaggcaataacctcgttatccagtgaggagtgagtgccttcacgccatgccagttgaccttcattcagccagggttcctgagtataacgttccagaccgaatccagcgatggtattaacatcctgatgaagtaggccttttttcagtaactcccgaacaaccagagccacaccacctgcagcctgaaattggttgatatccgcaggtccgttggggtaaatacggcataacaacgggatgacatctgatagttcagaaaaatcatcccagttaatgataattccggctgcgtttgccattgcgatcaagtgcatggtcaagtttgttgaaccaccggttgccagcagtgcaataatgccattgacgatcactttctcattaaccatttgtcccagagggagataattacctgaattttcagtcaggcgagtgatctggcgtgcagccgcatcgtttaaggcgtcacgtaatggcgtatccggatggacaaaagaagctccgggtaaatgcagtcccattacttccatgaccatttggttggaattggctgttccatagaaagtacaggtaccgatgctatggtaagagtctgcttctgcttccagtaacgcctgacgaccaaccttaccttcagcatataactggcggatacgtaacttctctttattcggtaagccactggtcattggccctgcgggaacaaaaacagcaggtaagtggccgaatgacagtgcagccatgaccagccccggcgcaattttgtcacagatccccagatacagagcaccatcaaacatattatgggaaagcccgatcgccgcggacattgcgatcacatcacggctgagcagggataactccatcccatcctgcccttgtgttacgccatcacacatagcaggaacaccacccgcaacctgaccgacagcaccgactgcatgtaaggagtcttttaatttttgtggatagctttcataaggtttatgagcggaaagcatgtcattgtaagaagtgataatggcgatatcgttatgcaccatattctttaatgcgactttatcgtcactttgacaggcagcaaaaccatgagccagattcccgcatgccagttgagagcgatggacggtttttgaacgagcagactcaatacgcgccagataacggttacgcgtctctttagagcgttcaatgatacgttgagtgatccgttcgacggttttattgatcgtcgtactgttctggggtgttgtcatgataattgctccaggcacttgcttccgacaccatatggaatgtatctagcacatactctcactgattgttaccggtaacatttttaatgcaataaacaaaggatgcaatcaacttttgcgttcaacacaccttatctgtgatctatatcaatttataagctgaaacgtaacagctattcagtaagcttactttttaagtgaaattagtagaagttttacttattaccgccatattcccgacttatctctttcgctgcccgcataacaagggcacccagctcagtcacacgctcatcagagatacgtgatatcgggccggagatagaaatagcggcaaacgcttcatggtgctcatcatagatgcaggcagcaatacagcgtaacccaagagcatgttcttcatcatcgagtgaaaaaccttgcttacggatctgttcaaggttctcttttaaggcggtagcggtagtatgtgtgtgctgtgtataggcgtgtaacccttttttatgcagtaattgcaggcatttttgttcagacagtgtcgcaagtagcgccttacctgcaccggatgcatgcatcggtaactgaccgccaataggcgcggacatccgcattaatgcgttacattgcacttgatcaacaatcaccgcttcatattcatcaatattgaaaatagcaagattgatagtctcgccagaatcttccatcaactggcgtaaaattgggtgaaccagtaccatcagattgcggctttgcagaaagctgctgccgacaacaaacgcatgtgatgcaatcacccataggcccagatcgccaacctgccgaacaaagccatgctgttgtagtgttgtcaaaagacggtgggtagtcgaattaggaagaccggcctgaatagcgaggtcagtcagggcgaccccactttgtgaatcagaaatgaattccaaaagggataagccccggcttaaagattgtacctgaccgcctgctgcggcaccgccggctgtcattttcgtttttttagggcgtttattggcaatagcggtagtcataagattccctctaaattatcctctgtttataggaaggctaagcagagttaaaatggaatttgttttcgttttcttattatgaatgataaagggtggaaaaacacatccgatgagtgaaggaaaaagtatattgaaaatcacatttggcaaacaaaaaaatttaactgagaatgagcacagtcaacaaagaggcaacttgaaaggcaaagtgtataggagggtattcttattaccgtaacggaatgagaatacccgggtgcgttgattattcttcaaacaaattcttatgaagggtttgaaccacttcttcagcgtcttgcccgggtacaagcaggcagacattatggctacttgcaccatagctgatcatacggatattgaaggattccagcggaccaaagatctcttttcctaatcctctggcctgtgacagcttattaccgataatcgccaccagtgccaaatcttcttcaacctcgacacgacacaatgttgaaagctctgtcagtagggcattagtcagcaaactaccgttcgtgctggtggagcctgttgtatccagtgttaacgcgacactgacttctgaggtagtaatcagatccaccgaaatattatggcgtgaaagcaggataaaaatttctgccagaaagcctcttgcatgcagcattttcaggctatgcagagttaataaagtctgtttgcgacgtagtgccagtgcccggaagcggggtggggttgccgttctgtcgcaaacaagtgtaccacctgcctgtggttgtttacttgaaccaacgaaaactggaataccacagcggacggcaggcagcaatgttgccggatggaggattttggcaccaaatgttgccatctcagccgcttcatcaaaagcaattttatcaatacgcgtagctgttgggacaacacgggggtctgttgtgtaaattcccggaacatcggtccagatatccacacgctttagccccagcgcttcaccaagcaatgcggcggtataatcactgccgccacgccctaatgttgttgtacgccctttttcttctttgccgataaaaccctgagtaataacaattgtattattcaggcgtggctgcaaatgttgctcggccagaatattgagctgggtggtatcaggctctgcctgtccgaattggtcattggtacgcattatccggcggatatcaaaccattcgacatccgcattgcgctgacgtaataattcaacaaacaacagggtggacatgacttcaccgtggctgactaactcatcagtcaaggcgtcagatgtggcgagcgaagccgcttctgacaatgtagcaatgttatccaacagacggtcaatctcatctttaatcacatctgattcattcagtcgcccgataatggcgtattgaatgtctcggatctgtttcaggcacttctcccgtttatcactattacagccggaagctaatgtgaccagcaaattggttatacctgcggaagctgataaaacgactacgcgaacatctctgtttgccagaataatatcagcacagttattcatggcatcaaagtttgccacactggtaccaccgaattttgcaacaatatactgcgacgagggagaagatactgcactcatggatgatggccttctgttttaaagataggcaattagaaatatcgggttagcggtaatgagtcaatatttgttaattaagcatcaatatttttcatgattagagtgagattatcgtttttgcctatgtaattatgactggaaataatcgcttattttgaccaatatcagtcagtaacaggaaaaggagatccatcacagtattaacttgttacaatccggtgcattcctatttttatctacagtagatagagaacattattcatgaaaaacatcaaccctagccagaccgaagcctggaaagcattgcagcaacattttgagcagataaaagatactcacctgcgagatctgtttgaacaggacaaggcgcgttttgcgacattctctgccacatttgacgatcagatgctggtggattattccaaaaaccgtattaccgcagaaacactggagaaattacaggctctggcgaaagaaactgatttatccggggctattcatagcatgttttccggtgaaaagattaaccgtactgaagatcgcgctgtattgcatattgctttgcgtaaccgcagtaactctccgattaaggttgatgaggaagatgttatgccgcaggtcaatgcggtactggcaaaaatgaaatcattcagtgagcgcattattagtggggagtggaaaggttataccggtaaagctattactgatgtggtaaacatcggcattggtggttcagatcttggcccatatatggtgacagaggcactgaaagcctataagaaccaccttaatatgcactttgtatccaatgtggatggcactcatatcgcggaaacactgaagtctctggatccggaaaccacgctgttcctgattgcatcgaagacttttaccacgcaggaaacgatgactaacgcacattctgcccgtgattggttcttgcaaagtgcagttgatgaagtacatgttgccaaacattttgcggcactttcaacgaatgaacaggaagtcagcaagttcggtattgatccgcaaaacatgtttgagttctgggactgggtcggcggccgttattctctttggtctgcgattggtttatccattgtcctgtccattggatatgataatttcgagcaattgctgaatggtgcccatgctatggataagcactttgcacaaactgctcctgaacagaatattccggttattctggcgctgattggcatctggtataacaatttctttggcgcagaaactgaagcgattctgccttatgatcaatatatgcatcgttttgctgcttacttccagcagggaaatatggaatcaaacggtaaatatattgatcgtaatggaagccctgtggattatcagaccgggccgattatctggggggagccgggcactaatggtcagcatgctttctaccagcttatccatcagggaacgaaactgatcccatgtgattttattgctccggcaatcagccacaatccaatcggcgatcatcacagtaaattattatctaacttctttgcacagactgaagcgctggcttttggtaaaactcaggctcaggtagaagccgaatttgttgctgccggaaagaatgtacaggatgtggcaaatgttgtgccattcaaagtgtttgagggtaatcgtccgactaactcaattctgttacgtgaaattacaccatttagtatgggcgcattaattgccatgtatgagcataaaatctttgctcagggcgcaattctgaatattttctcatttgaccagtggggcgttgaattgggaaaacaattggcaaatcgtatcctgcctgaactccacgattcagaaagcgtaaatagccatgacagctctacaaacgggctgattaatcgtttcaaagaatggcgttaatctgatttatcattttatataatcagctatcccctcaataacactatgggcgtgttgacgttttgttttcatcacttactcgacccacatgggtaaccagataatgataaatgccagtgctaatgtgctggcgtaatttctcgctaatttatcgtatcttgtggcgattgcacgaaaatgtttgattctggcaaatgcattttcgactaaatgacgataacgatataaatccttatcccactttttatccgaatttcggctattttttcggtagggaataaccgctgttgcaccttgttcttcaatataagttctcaatgcctgactatcgtatcccttgtcagcaacgacaaaatccgcgggcggtgattgcgccaccaaactttccgcatgcaccatgtcgtgagtttgtccctcggataattcaaaatgaacaggcaggccgtaactgtctacggccaaatggattttagtcgagcgtccaccccggctttttccaatcgcttcattttcctttgaagctgcgcctgaactgtgctgatgagcacggacaatactgccatcaataaacaaccattcagtatcagaattcttagctaattcgttgaataatgaattaaaaacacctttttttgaccagacattaaaacgcttaaagaccgtattccatttcccatattcagcaggtagttcccgccagggtatcccggttctcattcgaaaaagaataccttccatgatgaggcgatgcgtttttttatgataggtaagccgattttgttgcatgaagacaaatagcttatcccacacaggatctgataacataggtcgtggcatgatagttcgggtaacgagttttttggcgaaaataagagaccaaattatcatgccacccaattcccttcgagcaaacgtcaacacgccctagcaatttttttcgctatattttcgatctgttgcttagctacttcttcagatagtttttttcccatttctttttctatcttttccacttcttttttagccatttctctgagcatatcttcggctagccgtcccatcccatcaaatacattttcgagcgcttttttgcgtgcatcgttattaggaatagtggcttgatttatttttgtacgaacgccactcaaaatgcttgtcgttgtattttcaatggtaagctttatttcctctggtgactttccttctgcctccatatattttgttaataatggttctaatttattgtttaatcctattttcaaaacgttttccagtaacctagggctagctccaacatcgggtacatttggcgcaatgattaatccggctccagcgttcactaactgcgttatttgctctgaggctgcataggcactgtttttcacaatattctgtgcaatgaaaggattttgctgaccagctattaaagcggcagcgaggtcattaccaccaatccaatggatataaacgccgttagagtcagcctttccatttgtacttgcaaaatatttatcaagttgtgcctttgttgtattgttaggttctccaaaatagggttgccaaatggctgttgcgcgacctctagcgtggttattgccacctaagtctgatgcaagtggttcttcatttgtccatattttattcactattttagtatatgaatcacaggcaccattttcatcttttgccgtgtaacatccattatttccaatatcggtcaaactatttccaaattcataaacattcttataagtcttagcataagaaatggtgctgactgaaagcgctaatagggcaggtgcaaataaaaaagcctttttcactggcattctccataaatagtttttgttatttatcagttccccaattttttaatgacgaagtctgagcaacgccttttcggaagttttgaggtgctgacaggttaaatattttgtgattttgatcaaattgttaaccatctgataacaattgactaaattagagtatgttcaaacgtaagaaataatccatatcacattgaattatttgtagataatgtgatgtctgaccagtgtgtctgaaatagttgacccagtatattgatattatttcagtgttaagttttatgcggatttaggctgaagaaggggtttgaaggggatgaaaaaatgcagggcggcaatattgtgccctgcatttttaattttatggctttagccagtttaagtcgcgttagcgtcttaaacataaaaccacccgctttgcgggtggagttcaaaggttataccaagaaaaacacctttccgttacgatatagatgttcaagctaatattcgtaactcaaataaggaaaggtgtttatgggcattaaagcacaaagctcagcgcatacaaagtggctgtgtaaataccatatcgtcttttcgccgaaatatagacggaaagtgatttttaataatattcgttcaagtgtgggagagatcctcagagacctttgtaagtataaaggtgtggaaataatccaaggtcatctcatgccagatcatgttcatatgttggtgagtattccaccaaagctaagcgtttcaagctttatgggatatttgaagggtaaaagttcgttgatgatctttgatagacacgccaatttaaaatataaatttggcaacagaaagttttgggcggaagggttctatgtcagtacggtagggctaaatgaagcgacaattcaaaagtatatcagagagcaagaaaagtcggatttaatctcggataaattgagtagtaaagagcatgtagaccccttcaaggggtaggccaaagcagcaaagacacttagcttgaacgaagagaaagcagcgtcatttaggcgcagtcggtaacaagcccttatagggcaagagcaaaccacccgttatacgggtggttatgattgctcacgagctttttagctttcacgaacaaaggcctgacattcaaacaacgacttaaaaccaatgcgacgatacacgccattaccctcacgggaagcttccagatagcaagctgttgcgtcttttttcctagcttcactcagtacatagttaatcaatgctgaagcatatcctcgccccattttttcccttactgtactgatatcatcaagacggacaatattatcaagccttgatagggttaaagcacaaactggctgttcatcgacatagagggcgtaatgtcgcaagcatttcccggcaattaacgcagcctgatggcatttcatatactgtccggagatagaattacctgtcgcaaatgcacttttaaccggaagaatccaatcagacaaacgatgatcaacacacctgatttcatactcagtgcaatactcattcttcatctgccagttgattaaatcaagcttcataaccgttgtgatactatcaggatcaaacacaaatccggcctgttcaataaccgctaaaacctgatgactgggctgtacagcaacaatcagaaaaggtacatcagattgctcgttcattaactgaatcgctgctttcagctcctctgctatctgatcattttcatcaactacctgtaaaaaatttaatgaatcagtttcaacgccagttacataaacccggataccagttccaatatgccgataaatttggctgattgatgaaaaaaagtaatcttccagtttacgatgggacaaaaccgaatttgataagttatataggctcatattgttgagtcacaaaaatatttttatagagaaatacagatatgttctgaaattacagaaagcacagaacataaccgataaaaattttatattcaaacaataatcaaaagtcagtaaatgaccagagaaattaatcaaaaagacagtcaatatcactaaaaaatagttgatagcgcttaagaatagtttaaatcagttaaaagatacttatttctgtatataaaacgcgcatatgaattttcggggctagacctaatgccacacagtaccgtataatctccccacttcactggccccttagctcagtggttagagcaggcgactcataatcgcttggtcgctggttcaagtccagcaggggccaccagatttaagctgttaaatcagcacattaggccactcttagacgagtggcttttttgtttttataagtcagtggcgataaaatggcgacagggatttttgagcttccgctatcttaattttttcattgaacatttttaactcaattgctccaacccgaaaattttctttcagccagtgacaatatgtttatgggttcaattcatttcaatttcctaatggactcaaagccgcaccgctactctgttctagaattttctttagcctgtctttgtgatctaacttcccacgtaaaatgtagtttttcttttaatatcatggcattgatattttctccgcgatccgcttttgatccaaaaactgaaatttcctgaaaatcttttcacgcctttcagtttgggattttttccacagcgccagcacgggcgcgctccggctactccctttgtaggattgtaaaactgaaataattttttgatccaaaacgtgcaggcgggtgcggtgtagtgcgttttacgtcaggttgacgtttatttcgtggaaattgtgcagcgtgagcgcgacacagtaacgcagatccaaatgaaccctagactaggagcaaattaagaaatgaacggtgttgcgtgcgtctggtggcgttttattgagggggcgccagaaatgttaaaggccaccgagtggttaacccgatggccttatctacgtttccgttattctacttcagaaatgtacggatcaattctaaaagcgcaattagtgctttcagaatgatgatagcggtgttaataacctctttcatccgttcgctcctatgagcaggagcacgatttaaccagccattgcctttacgctgcctgtccggctagcttccatcacggtcagttaaggaatgtcgcgctctgaccgaggcactgaagcggcaccacccgtacttcggtcaggactttgatacactccgcaaaatttacgaaatgctgagttccttttctatatcaaacactctttagcggcggtcagtgcgcttgcctaactaacaactataaattataagttcattttcatatcattcaatcaataaaaatgataggtagataaaaacaaaaaaaccaactggtgaggttggtttttttgcatttcccttaagcagggtatttgtctttgagctatacgagggtggtggcctcagttatagcgcgacattccttaactgacatcatcagtctaatacctatagcattaaatatcaacctatggtatagcgtacaaaacatcacacaaataaacgatattcagccaatcacaggcgaatacttctttttcagcccatcggatttatgggcggtgcctctgatggcgctggcgttctgcggggtgcctgtgttgtgatgggtatgggcagcggtcagttccgccagttccttgaccacatccagtgtgtctaacatcaacgtcatcacgttaatttgtgggctgcctacccagaccacaggcgcgacgatttcctgcttcacgcccgcaatgctctgtttcagcaggccgattttctctatcagcgtttggcccacgtcaatgttggcattttttcccacactggcgaggtaattactggatgtggccagactgtaatccccctccgccacctgctgaacagcacccgccaataaagtggatgtgcctaacaccagcgttttatccgtggcctgaatcgtggtatcacgggcgaccacggtgcgggtttcggtatcggctttaatttcacggtgcatggacgattcattaatggtctggtcagtctggcgtatccagctcccttcctgtgtcacccgctgcgagacttccgcccgctgctgctgcaattgttcaccgggcttgatatccggcaaggtgttgccctgacttaaggtctggcggataaagggcttatcgggtcgcccgccttcaaacgcgatttcaaccacggtgccgataggcggatactggaacatccccgattcactgcccgccatcggcaacggcagtgggacggcacgataaaccggggcagccgcatctttgccgtcagcatccagcagttgcacatcgacggcatagcgcgggcggaacgggtcagatatatcgccgctgacggtgttttcggtgtgggcttcaatgcgggccagtttgggcagatgtaacccggcagagagttcagggtaagcggcatcaatctggcgctgggcgggggttttgtgctccgtctggcctttcggctgccatgtgatactcatgttttcattcaacagattaaccttggtcagccgctgctgattgaccacaaaaccggggcgcagggattggatcatgggaatggtcatggtattgcccgccgactggctctggctgaattcattcggaatgtcgacaggcttttgggcaaacatcgaatgcgcccaactgcccagatagaccgacccatccggcagttgatgccagagataatcgtcaatggcaaaaagttggcccagactgcccagtaactgatagcccgtgccgttatgggtgtaatgcgggataggtttatcggtatagagcgcatccggtagcgtgaacgtcaggccgctgtgctcttgcaaccagttgactatctcgcgcaacgtcgggtgctgaaacgaacatggccacgctttatcaaatacgccgaccagttcacgcacaaacaaacgctgatagccgttctgggcaggctgcgagcgttccacataacccgtaaaccagcgcagcaccaaatcggtataacccacctcaaggcgcaccagttttccggtgtaatcagtcgtggtttccgctgtgataaagccccggccacaggatgacagttccagcatcagattggcatcaaccacatgcacctcatcgccggataagtagaggcgctggatgggtttcattcgcttgcgcctccgatgccgtcattaatcggttttaagacctcgcgttcgaaccagcttaatttttccgggtcttccccggctttcgtgccgccctgtccggtctgttttttcgcctgaatcgcgccggtggcacgggcgtcgcgtttctccgccaccgataaatgctcccgtaaagtaaacgtgacctgccatgcctgtttaccgtccaccttgctggcatcaatcgtacccgtaaaggtgccgatacgaaaattaatagcctgtgcagtgagattcgccacccggtagcgtttcaggttgccattgtctttggcttctgccagagcaaacaggcgcgacagggttttctgttcggtaaagggaataatgccggtgatacgcagttctttcggcttgatgccctgttcggcgacggcggtactggaagactggccgctctggtcttgatcctgaaacatcaccgagggcgtgacggtcaggctttttaacggtatggcctcaccatcaagggcgagggtgataatttggctcatggtgtagcatcctttctaatgagcgaagatcgtccccggcaaacaggactgccagtgtgtacaccgcatccggttcggggatgtttttacgtaatttttctgccacatgtgccccgttccctgtcccggcgaacgcccagaccgtggccgattttcccgccagcccgcttatggcctcggtgacgtgctgcaatgcagattgtcgggcggcggtcagcgcggttaactgggattttaacccggcaagactgctgcccgcgctggcctgcgcgttggctttggcgatgagttgcgcattgatcgcctgacggctggttgcggtggataagggttgcggcagcggtaacccgccacccggcttacccggcaattgcattttggtcgtggccagactttctgccgtctttgccatccgtttgacctgcgccaatgcgggcaatggcagcaccgctgaaaactgcgtgaggtgctgcataaattccgcgtgagttttggcgcacaccatcagtatcagactgttgatatggcccgcacccgtgagtttagtcgccagcgtctcaatggcattggttgggcttaagtaactgccgctgtcggtctgctgcccgataccgtaaataaatgggtggacaggcacgatagcggcagacagccccgataaatccggggccagttgcagggttttacgctgccagtacattattcgggttgctccggccagataatatccggggcggtaaaacaatccacccgattgagcagtattcgatatttcttccatctgatgagtgctgcttcctcttcacccgtcgccatctctaaatcaacggcatcctgccagacagcaattttatctttggccacatccatcaggtattgtttttcatatacagcttgttgctgtaactgctcaggcgtaggcggtggattcgtaatagcccgggcttcttcttcagtaatcaagataaaatccggctcaatccacgcatcctgagagccgtctgacgtaaacgcatgaacctgattatcttttgatttgtagtatttcatgttcacctcaattcaacccaacgaacaatcgcatcgggtgtcaaagtcaccccccaccccgctttcacgatataacgacttcccgggggaacaataaaactaaaggaatggatgctgttagttgatacccaaaaataacccacccgataattatcgacttctcctcccatactgaacggccccgttcttttatcggtcttttggctctcaacatagacggtgatcggtttccccgtatcattgacataccacgtatcattactgcgaactgacatgacatcagtccatatttgatcaacaccaagcaattgtgattccaaggcgaccgtgcctgatttttttcggatatcgacattgtacaaatcgttatctttcctatctcgatagcgaatagtcagcatactttcgctgttatcaggattagatgctatcgtggtgttgtaaccactgggctttctgaaaaccacacccggccattcatgcggggcattcacatgcaagttgccacaggtgaaggtatcctttgaggttttcagggcaaaattagcatcaatcgctgtcatcgaataagcgccgatatcggatgcagtcggtttttttaaggggctatacacctcataccattccccttctttaccgatatagacacgttcagcaccgacccattttgttaccctgatagcctctttagcataaacgtctccagtaatgaccccacccgatgccggaaatgcgcctatttcatgaggggaaggtttgtgggcttcactgtatacctgcgaccaacctccatcgtcatgacggtcatacaatttactcccacccacccaatgagtagcctcgaccacgccgttaatctggcctcctgttcttgggtaagcattcatcctaacttcgtttaacgccacatgggtggcataatcctgcttaaccccgcccaattccttttgaagatgagcaatatcacggtcacttaatgtgcctttgctccgcaaatcagtcacattaccgtccccgtcaatttgagcaatggcaaacacataatgcgggtagcctgcggcatccacatagttgctcagctcatttgcagtggtcattttcactacggtttgccattgactcaccagattgccctgatagctaaaatcggcatacacacgggtattgcgcagactgttaagcgtctggtcaaattccagcatcccgcgcaggccaccgacataagccagcccttttttcacaaggtactgttccccctgacgcaccaccgcaaagccatcaccgaaaaaggcggcttcaccgtaactgtcggtattaatcagacgctgcatttcatccatccccgtcaaacgggcggtaaaatcaatctgccatgtttccgctgtggtggtgatcgcggtctcagtcgctgcgccatcaaactccagtaagaaagagcggattaagacgttgccctgaagaccgttggcggttttgattttcttctgcgtaggcgcatgggtgatcatcccaatcacaccggaggccttatttatcaggccaatccagttaaaatcgaagtgacccacttccgtacccaatgtgacgctgtaggccacggcgttctcactggcgagtccggttttgttgacggcctgacggtgaacgatttggttttgggcaggtaatttctcactgcggctgatgtctttcgacggatcaagatttggcacgttagcaaagacaaattcatccagcaccacaggctgacctgcggctacttgttgggccttccatttttcaaagtctgtcgttatcactgaagacatacaatttccttataatgatgcaccgtaggtcacgttcggtgcagtactttccttgaggcgggcactgtcacagacggcaacgcccgcgatatgccctacttttattaataatggctgagtcggaatagccgcggcatacgtgcaataatctgccccgatattgcccacccgcatcagcaacgggtttttcgcgatcacttcaaagcgataacgacggcaggtgcgcccgtattgccggataatattcatcagcaaatcagggttagccgctatctggctatcactgaggcgcaggataatcacatcccagtcaatgtccggctggcgttccagtagctccacatagcccacgccgaggcgttcaaagatggcaataaaaccggcgatgctgcccgcatctttggcgttgataaacgcatacttcacgcgcttgcggaacaggggtagcggttcaccgttaaagcgctggatatcgcgctgataggccagtacggataacaacgcttcggtacaggtttccgcatccagttgggccagcggccatgtcagccagccgtaaacctgcatccagaatgcccgcgcagcactgagcagtttggcaggctcgcctttgtccatccatgagggcagagccagccgctgaaggcgttccctgaactcagacatttttcacctccaccgacagcgttttcagccgtggcacacttaagtcactgagaatatcccccagagaaaaggtcagggattcaatctcgctgaattcacggtggatttcccgccctaagttggaaaaagaaaagcgcgagtagggccatgtttttttcaccggatactggctattttcccggaaggcacagcggataaggttctcgacatcccgtttcagggtggctatctgttcgtggctatagttcgccagactgaccacaaacagcgtgaccgctaaatcatgctgggtttccggcatcggcaggcactgcatatcatcaccatgcccgtgatggccctgattggtgatgtaatcgttcaccacctcaataaagggctgactggtgacgcctgaatccagcaacagatacgcattggcggtgcctgccccacggggggcgtcatgcagaaagaagatacgatcaatgcttaaccccgctaccgccgcaatcatgccccggtaaaccgcatcggtatgatagttaccgacgaggttatattggttgcggcaacggtcgcgcaaatcgtcatcggattcggcatccgcgccgggggttaacagccagccttcctcattctgtacccgcgcaatgccggacacggccacaggcagaatgcgaaaataaccgggggccagattgaatgccccacctgctacttcagctgttacgggcagcaacgcactgctgaccccttcagcaatcgccacactttccgtggtgctgacccggtagatatcaccgttaatacgctcagtctggataaccgttccggcaggcacggtcacggcagaggcccctgctgctttataaaaacgaataacgccctgcgctgccgaagcgggtttgcgtttcaggttcactccccacgcgaacatatccaaccatgaaccggatgcgctcgccagatacatattcttcagcgtgacgttgattaaggcttctttcagccacaacaccgggcgcgtgacaatggttttaatcagccgccagaacggggacatgcgcgaggtgttagtgaccagcccggcttcattcaccacattggcaaacgctttgctgatgtcggcttccgtggttggcatcccgctgtcacgcagcaccttttcatagtcaatggtgggtttagtgtccatgtcccacactcacgctcaggcggccaaaatcgtaggtttccgccgttatccataatttgatgggtgactcttcattaatgctgaccgtgcccggaataatccgctcgtcgtcctcaaccagaatttcaatctgagtgcggatatctgcccgcaaggtcgggctgcgttcagcaaccagctcggtggcaaggccactttccataatggcatgaacacagtcctgaccgaccgaatagcggttatcgcaaaagcgcggttcattcccggagttcagcgtaaaatccccgtccgtaatccataaatcaatgtattttggctcatccataagccacctgctcccattctgtgagttgtcccggtgtgacgttgcctgtcacgttcagtgtgacattttcaatccggcgactgttatccgtgatggtctgcgagtttgtcgtcacgtcttttatcagaccctgcttgccgatcccctgcttccttccgcccgttaaaacaccttcactttcaggtggcttgatggcttttacctgctgcatcatcatcggcggctgccccggcaacgtgccgttcggcagggatgccagttgctggggatttccggccatgcccgcattgggcacattggcgtttatcgcgggttcgaccaccgttttctggatcgccatcgtttcaatattcacgccggggatcatattgagtttctcaatcaccccgttataaacccccgcaaaggattctttcagccagtcccagagtccgctgaacagattgctgacactgtccaccatattggagaacgcctcagccagtgaaaagctgctgaaccagtcacacagcttactccagcccgccgctatcccgtcccagacgacgctgaatatcccgccgagccatttcacatacgcggccaccaccttaaacgccgtggtgttcatgatggcggctttgatggcatcccagtgcttaatcagcagataaatgcccacggccagcaacgcaatcgcggcgataatcaacaggatgggccatgtcataaaggtaaaagagacacctgccaacatcgccgctatcctgacagccagcaatacaccgcgcaacatgcgcaaggtagcattccagacgagaatggccccattgcacagccagacggcggctgtccacagcttcatgaccagcgtacaggccgcccaaattcccttaaggcccagccagataaacttcgacatgcccatgacgatattggccacagcacctgctgctgcgaatccgataatgcccgctgagatatagccaatccagcgcgcaatattgggaaacagtttcagccagcgcaccactaactgactggtattcgccatccggttgaccagcgaagggccatcagctctgaggcagtcatacccgtagagcagcgtcagcccgcgcagggcaaggctttcagcaggacacgtttcacccattttaccccgatcacttttttgaccccgacgtacagtttgggattgtttttcacttctggcaacgggcgaacgctgcccggcttgccgggcggcgggcgcacgttctgcgggagcgggcggcatagagcccgcaagcggcgccctgcgacgctctggggcattgaggctcagaatttggctcggtttgttgatggcgctttgttcaagggaagccccctgcgggggctgcacggggcggcgatggcgagcacggcaacgagcaaggagcgcagcgactgcgagccgggcgcagccagggcagcggggttggggcgggggaggtaaacgcggaggccgcaggccgacctgccttcaggggtgtttgcccaggtaacgcaaggcagctaaagaggaagagaagggggtttagctgaacgtgggcacggtgtttcggtctggcgcaggtttttggcaggcatcggctcagaagtttagagcagaaggcgtagccttgtgcgccacaccccgcgaggccgaacagcgggggcgccagacataatgtaaattatacgctgcgaaccgctcaccgatgccattgactgacggcggggctgcccggtgagtggcgtataattcccccacattatgttgagtgggctttgggcggcctgcacatttttaacggggacacgatagctcaggccgaccattgcccacgtacccccgcaagcactgatgctaacgggcagtccggttacggtctgcccccgcaccgatcccagcgaactcaacggggactggcgggctgtccggtgcgcggagttttcagttcggcgtctggctctccgctgacactgcctgagccgctctctggcgttgattttgtcggattatcacgctctgccgggtgtgtctgttgatgcacttctttcaggtgtccgatagcgacccgcgtataaatttgcgtcgtttccagactggcatggcctaatatggcctggatatgccgcgtatccgcgccgttctccagcatctgcgtggccatcgcatggcggaacaggtgacaaccgcccggtttttcaacctcagcacgatgaagcgcattgcggactatctgcgtcaggctgccatcagtcagccctttacctttattggagacaaacaggtaacccggatcttttccccacaccagacgcggacgcacctcctccagatagctctgtgtccactgctgcgccgatttgccgaacggcacaacccgatctttgcgtcccttacccagccggataaacaccacgccgcgcccgaagtccacatcacccacctgtaaccgctgtagctctgaacgccggatgccgctgctccataacatttccatgatggctcggtcacgcagacccagcggcgtgtcactgtttgtcatagtcaggatacgggcggtttcttcttcactcaggatatgcctcggcaagcctttgtctgtccggggtagctccagatcccgcgccgggttatacagcaggtattgccgtttgaccagccaaccgaacagaagacgcacgttcgtcagtttttttacgatggtgctggcggcaaccggataaccctgcggattcttttgtgctgacaggtggcgctgccagctttccagatgggcgaagctcacctgttgtgccgtaatgatcccccgttcatcacaccagcggacgaactgcatcagattcgactgatagtgtagccgggtgtcccgcgtataacgcagggtatcaaggtgttcaatgtaattctggatatgttgtctgagtgtaatcgatgccatgataagccccctgtctgtgtgagaagcactgtggttacgatgggataaattcatgtggtgggaaccgtgttttttgaggttgtccgaccgcttttcggtgaagcctttctgtgtctgcctttgcgatgattttgctatgccgaccgcccgccgactgaaccccgaccggggggcgaccgatgactgattgaccccgaccggagaaagtcatacctgccctgtcacggcacgataaggccgcacaggtacgcggtgtcgctgtcgtcgccgtcaaacagcagttcgtaggcaaacgccagcccgcgccggtgcaacagcagatattccatttcaaccagccgggacaggtgcactttcagctgcgtatcgccccactgcaccgcatcgcgcaactgcttgcgggtaaaaatcctctcatggcgtggctgaccgctgtcccgtatccatgcctgtatcagcagcaacagcttgcgcgtctgtggcggcatctcgtcgagtgtccggcctaagatttcgtgggcaagctggtttgccagccggatatcgtctttgctgacttcgatgtattccagtgttttcccgcgatgcactgctgttttaatgtcccgctgatactggtgcaacagggcaatactctgaatgagggtcaggtatttcatatggtcacggcgggtgcgggttttgtctgacaggaatgtcaactggctggcatagggattgaccacattcagcggtttcagcaaccgctgggcgttctggtgaagctgtgtcagatactcccgctcgctctcagccagcaggccttcaagggtttgcttctggcgttgcaatgcatggatcgcttcggtctgttcgcgggattcgttcaccgtcagcaccagacagcggttcagtaattcttcatccacatcaatggccgttgtggtgagcatcagcatcaccgggcctttgacggtgtagcttttggtgaccagattccccgtggcttcgtccttgcccgtgctcgccatcgtcagctcgccgtctgactgcaacagcttgagcgcataggcggcctgccgcaccccttcttcttccgcgatggctaatattttgtgctggagattggtttcaccgaggtagaacaggctttgcccggtcatggcgctgtactggatgcgttcttcttcggggatcaggttcaagacggcatccatcaggctgctcttgccggcggcgctgctgctctggatcaggacggctaagggtttgggtaattttcggctgacggcggccagataagcggccaacagattagtcgattccccgaccaccccgcaggcggctaaatccgccgtaatacggctgatgagttgggggtcttgcagtaatgccagcgcagcctgctgctcatcggcattcagggagttggcggtgtgttccgtttctgctgccatccaagaacgttgctccagcaccagtaacacccgccccagttcacgcttgatcagcgtatccggtaacgccagttcctgcgcggcttgacgcacgaaccctgtccgcgcacgggcgctcaggatatcgaggctgtccacgaacaacgccccgctgtttttatccaataattgtacgttgattttcatgaccgcaccgattttcggtggtacaccgcgcagacgccattcctgcccgtcctgccggataacgatatccccgttgggctcaagcgttgtcaccacgcccggttctggcactaaggccgccgtagagatggggacggcaatggcagcacttgggtctgacaacggtgtttttgtgggttcaccgagccattgcgctgattcaagtaactgaccgaaagcattttccgggtttgccacttcgcagctaaaccgattggcatcgcagccttccgggaacaccacccgccaaacatccagccccatcagttgcaactctgccgccagtgttgccgccgcttcattgcccgccttgtcattgtcataggcgatatgcacctgccggatttcatactgccggaaggcgtcccggtgggcatcggtaaagccgtgaaccccatacgaacaggtcacgttgcgataccccgcacaccagaacgacatcgcatcaatcaacgattcacacaggataaccgaggccgaaccaaccagccccgcttcattccagaccccgccatgctcccccggtaaatacagatgcagcggtgtgcctgcccgcaggcgattcgtgattttacggccatacatttcctgtatttgcccctccagcccgatcaccggcacaaccagcgagccgctgaagtgttcatgcccgctctcacgcattaacccgaccgcctgaagccgggcacggatctcagcacctgctttgatttttttctccggcaggcgatagccgagggtgcggttggcaaagccgagcttaaaatggctgaccagctcagggtgatcaaggcggcgttttttcaggtactgatgggcttccggcgcattcagcagagtctggtgatagaactcaaccacccgtaacagcagcgcctgttgcccgaccgcatcacggatcaattccgaggaatcaaccagcggctccaccgccggattactgccgagcatggcgcgtaaccgttcgcaggcatgacgcaggctcagatgttccgttttcatcacccagtcgagcaccgagccgcccgcatcgcagccaaagcagtgatagaggttcttcgacggcgtaatgaccatcgagggtgttttctcctgatggaacgggcacagcaccgtcatatctttgccgcgtgggatcaacttccgcccctgctgttcaatgatggcaactaaggagacggcggattttaagtgctgtaattctgcgtcgggtatccgtgccatgctgttaactcctaaatcctgtcaagatttaaattgactcttaattggatttatttataatccttttaggagctacttgcaacccctaattcagacaagcccttacactaacggagtcactatgcaaacagagtttttgattatgcaaaatgctgaactccgcaaagagtttggggtacgtctcaaggcactacgtaagcagaagggatggcctcaaaaagaactggcaggaaaagttgatattcgttttcagcaactgaacaagtacgaaagcggacttaatattccccctgctgagatgatggttaagctggctgatgtgttaggggtgacggtggattatctgctgacaggtaatcctgttgaagattcaccgttggctaactctcggttatttcgacgctttcaggttctggaacggctggcacaggaagatcaggaaacggttatcaagatcattgatgccatgatcgccaagcagcgtatggagtctgcattactgcccgttgatgaaccggagggataaaaatagcgcggcgctgatgtgttgagaccacaccaacgccgctcaccacaaccaactgattaggagttgaatgatggctaaggcgcattctaagcaaaaccgcgcggtaaataaagccgccaaaaccgaacgttattacaccgtgggatacgtgccgcaaaataacaaggccaccgccccgcctgcgatccaccttaaaggccagtggcttaaggcggctggctttgataaaggttgtaccctgaccgtgaagatactggctggctgtctggtgttgattcctgacagcgatgatacgcaaagcatcaagcagcagtaccggcaccagcaagaccagctcagtgagattaagctgaagatgcgcgagatgattggggattacaaacgccgctaagggcaagagctaagcggctctaaaaaaagaagaaagccggaagatcactgggatatttccggctttttaataaaataaatatgactatctttaatttcagaagagagtcatatcataaaaatagattattctaattgagtaaaatcatgatcaaaaaataaatttgaccctgtttctaaatttgtgtaattgcctgtttttgatatgtttaatttatcaactaatacaggtgaaaagatggacgagaaacagttacaagccctggctactgagctggctaaaaatctcaaaacgcccgaagatttaagtcagctctcccgtttcctcaaaaaactgaccgttgaaaccgcccttcaggccgaactggccgcgcatctgggccatgaaaaacaccatcccaaaacaggttctaatacccgcaatggctactccgctaaaacgctactgactgaagaaggcgaattcgcgctgcaaattccccgcgatcgtgaaagtacctttgaaccccaaatcatcaggaaaaatcaaacgcggattacgggcatggacagccaaatactggccctgtacgccagaggaatgaccactcgcgatatcgccagcgcgttcaaagaactctatgatgccgaggtttcaccgtcactgattgccaaagtcaccgatgccgtcaaagaacaggtccttgagtggcaaagccgtcccttggatagcttgtacccgattgtttatctggactgcctggtggttaaagtgcgtcaggataaccgagttatcaataaatcggtcttcatcgcgttaggcattaataccgaaggtcacaaggaattgctgggcttatggctggccgagaatgaaggggcgaagttctggcttggcgtactgacagacctccataatcggggactgaaagatatttttatcgcgtgtgtggacggattaaaagggtttccagaggcgattaacaccgtttacccgcagacacgggtgcagatgtgtattgtccacatgatacgtaataacctgcgctatgtatcctggaaagaggccaaagcggttgttaaagatctcaagcagatttatcaagccccgacagaagaaatggctttgcaggctttggacgcttttgctgaacaatgggatgagcgttatcctcaaatcagccggagctggcaagaaaactggggcaatctgtccacgttctttgcctatcccgctgaaattcggaaagtgatttacacgacaaatgcgatagaatcgctcaacagcgtcattcggcatgcgatcaagaaacgcaaaatattcccgtcggatgattcggtgaaaaaggtgatctggttagcgattcaagcagcgtctaaaaaatggactatgcctatccaagattggcgtcttgcgatgagtcgttttatgattgaatttggtgaccgtttagacggtcatgtttaattggaaatggcgattacacaaaatcttaaacaaggtctacaaacttttataattattaactaactaactaactaactaactaactaactaactaactaactaactaactaactaactaactaactaactaactaactaactaactaactaactaactaactaactaactaactaactaactaactaactaactaactaactaactaactaactaactaactaactaactaactaactaactaactaactaactaactaactaactaactaactaactaactaactaactaactaactaactaactaactaactaactaactaagaccatcctaatactattgggaacctctaaaaacttttcacagccacaaaattgagtaaaatgtaggcacagtacctctctgcaaggtagcgccatcatgataccgcctcgttctgctttaaaaaaagacaaacaggcatccgaatatcaccgtcgaaaaatcgatgaattaggtgatccgctgcttgttcttgataaatatgttgatttctcggcactggctgacaccctagaccgtatcgtcccacgtattatttcccccaaagggggacgcccgccattcccgacggaggtgatggttcgcatcattatcctgaaacatttccataatctttccgatgaaaaaatggaatatcaattgcttgaccgaatgagctggcaacgtttttgtcgcttgaccgatgtcattaatattccagaccgtaacacgatttggtgtttcgaaaaacggattgggcaggaaggtgccagagcgttatttgaagaggcgaagcatcagctgtcagcacagggattcattcccagaggagggcaaatcattgatgccacgttgatccccgtgcctaagcagcacaataagaaggaagaaactcaacaaccaccgactaaagtcggtgggttagtgattaacggactgaaagtccggatacgcatcggctaaacgatgcgtcaattatccagcctgaagtgatcattcgggttcggttcaaaatgatgcgccagataggcctttatcatctcttccgttaactgacctaccgtcgcacaaaaatagcctctgccccaaaaatgctgaccccagtaacgctttttcaagtgagcaaactcttcaaacaacttacttgctgtccttccctttattcgcctcatgatttctgagggcgctaagctcggaggacaactcaccagtatatgtacatggtctttgctcacgaccccttctactatcctgatttcgaacgcttcacaggtctgacgaactaactctctcacccgtaaaccaacttcacctgttagcactttgcgcctgtattttgttacccacacaaaatgatactcaatctgaaataccgtgtggctgccatatctgtaatccatattgcacctctcgtgcaacacagtatcgcagctaaagctgaccgactaaagtcggtggttttaaccttttatatggaaaaataaagaaaaacgtatcaatgccagtgcttatcctgatcaaaaaacaaattatgccgcaggaaaaccatgtgctacgtgtgcacctccacaagcaagacccgaatttgtagaaaatttaattaaatctttagacaaaaggtatatcgttattatttacgcagcgcatccgggcacgcctcttaataacgatgatggaacgcctcactttgaaaaaggtgaaagagtaacatcggcggctggacatatgtggtatgaaatttcagacagttatgttaatgactcctatggatttgcacctattgtatcaggaattacgggagcaggtagggtgacaaaagaagatacaatacattatgaaaatccacgatatagtcgtaccatggaaattgcagaagaacactataataaattgaagaaatacggcgaattaactaaaagtggaaataacccagattttaatcttggatataatggtgcgacgaatagttgtattgattttacttggaaagcacttcgcagtgcaggactcatacccgaaataacatggaatgactttactggaattaataaaatcaataaaatatttaaaaaatttgatggtgattttaaggtggataataacatcccgcataaaaatcaattcctgcgccattccctgatagtgagctaaataaacaacattacaataaaccgcctaaaaaaacactatcacaaataatacttactcaaacaaatagcaataaaacagatattaaaatcagctaaatggaaatatctcttgaattcatagagtcgtagtgaactaataaattgatccaccccaatatcatggagagcacaaatgagcagggtaatagataaaatcaaccaactatttgatcgctcagggttaagatttacactgattacggaaaacttacccgaacaaacctttgctgttgtcgatttttccctacatgaatcactatcttctcccttccgactggaagccactctaacctgtaaaagcccggagattgactttgccaatgttctcgacagtaatgccgcttttgccgtacatcgcaatggacaagttgaacgacaaatcacagggatggtcactcaattttcattgatttccaccggacgtcatgttagtcattaccgtatcactattcaacctccgttatggcgtacttctctgcgggtcaatagccggattttccaaaatcagtccgttgtggatattgtggaaagcctgctcagggaaaacggtgtacgcagttttttctttgctctgggttataaacatccaccacgggaattttgtgttcagtacgatgaaagtgatttggcctttattcaacgcttactggctgatgagggtattttttactatttcgttttcgatcaggagcagcacgagcaacgcatcatatttcacgattccagtctgtcccttaatcaggtcattagcgttccttatcgccccgaagctgacgtcacaggtgaaacaacctgtattcaccaatttagctggtcagagcgtgttggtgttgccaatatcaccactaaagacagaacgtttaagaacccccgctggaaccgtgagttctggtatgaagggcgcaatctaaataatcagcggatcctgaacagctatcattattacgatttccccagccgctttaaggacgatgatctaggccagcgggcaagccagtatcatcttgaatacctgcgacgggatactcagcttggcaacggccatggagactgttttgccatatggccggggcaattgtttaacctgacggatcaccccagagaaactttcaacgaccaatggcagcttatccacattactcattctggccgccagccacaagcagatgaaacccagtccggcgatagtggaacatggctgtccaaccaatttaccttgaccacccgaaaaaattcttaccgcccttccccctatcccaaacccaaaatggaaggcccacacattgccactgttgttgggcctgaaggagaagaaatcttctgtgatgaacatgggcgcgttcgtattcagtttgactgggacaggtatggtgaattcaatgaccaaagttcttgctgggtacgtgtcagtcaagcctgggctggacaattaatgggaatgattgctattccccgcattggtcatgaggtgttggttgattttgtccacggcgatcctgaccaacctattattgtcgggcgagcttatcacgcgaacaacattccaccaaaccgcctgcctatggcaaaaacgcagatgtcgatacgttcaaaaacccacaaaggagaaggatttaacgaattacgttttgaagatgagaaagatcgcgaagaaatctttattcatgctcagaagaacctggccattcaagtgcgcaattcgcgggatgaacgcattaactatgaccgtacaaccagtatcggtcacgatgatgagctggtgatagctaataatcgcaagattacagttgaaggtcagcaggatcataaaaccaccggcaattatattgagcaaattgatggtgatcgtgcattacaaatcaagggagatctggctgaaaaaattcaaggtgttgtcagtgttgatgcgcaaggggatctgacactacaaagtggcagcaaacttaccctgcgtgttggctgtctcttgatcatatttcataggtcaagagacttggacagtaaataaccgtcaaggatggtttgtaacatgaaccatccttcccacagcctttcccattctactcggccatttcgtttagagtcataccagcccgccagtttgcccaaattaatataggcccaataaacgcttggggctgtcttagggagttttttcttctcttgctttgtccacaataacttccacgctaacgggcttaataacgtttcacaactttgtttctccgcctctgatttattgagtcccacatagcgtaactgatgaacacgaaccgcaataaacgccaggatcaccaccattttttccagattctctttacattgcatccgtagcgcttcgacccgtgtcccgccacttttccacgctttgtgaaactcttcaatgagccaacgtttttcatagtaatccagaatacggtgggcatcttctttacaggttaccggttctgaggtcaaaatgtgccagctcagttctttatcgttattggtttcctgacaactcacataatacagggcgaccgattcaccccgtttattgaccggcattttgagggtaacaggcgcataacggatctcacagactgcttcacgtgccttacgtccacctcgctgcttaacctgaacgtttcttttatctgccggctgtaaagattcactgaactgataaagcttatccgggctttgttcaatacaacgactttgcattgaacgcacaataaaacgctggtgatgtgtgattttataagtcagatagtcaatgatgtctgcctcgcgatcacacaccgaaatcactttattcatctcactgccaaggcgggcttctgtggcctgagaggcccgttcccacttataactttccttgtctttatatggacgggaagcccgttgcgctttcttgccatactgactcagcgctcttatccagcgcgtttgttcaatcaggccaatgagctgttcttctttgggagcaaaaagtgaaacagaatgggcatgcagaccggtggcactttttcgggatgtggtatagcccatttctttccggacggtctgatgagtaaattccagtgaggtcgtatcttccaatgccagcaaacagtcataggatttggcgtgttcagccgtcgccgcaaatccggcctcggcaatagaggttgcgttaatggcctgattacgcgtaaaccgataagcggcttcaatatccgctggggttttgagtgattgcacaatagattgcccgatatgattggctaacgaggcggtgaatttgataagccgttttgtacgccgactatcgcccaaatttgcgcgagaaaaagtttcatcagcccattgttctgcgtgagtttggaacattttaccgtacctcaatgaaatcgttattactcagatcggtaaagtggaaaaagattcaaaaaatcccccgattttttatcgggggatttgtgtatgaaagacagctctggtagagggcatttttattttatggctttagccagtttaagtcgcgttagcgtcttaaacataaaaccacccgctttgcgggtggagttcaaaggttataccaagaaaaacacctttccgttacgatatagatgttcaagctaatattcgtaactcaaataaggaaaggtgtttatgggcattaaagcacaaagctcagcgcatacaaagtggctgtgtaaataccatatcgtcttttcgtcgaaatatagacggaaagtgattttgggtggaaaacagaatgagacaaatcgttaatgttgctgccatgattttcttgctgtcattattctttttcgccaatcaggttgcagcgtatcagcctgatggggaaagctatcgctatatggaggtcatcagagacagcgaaatttatgccttggttggagagcatgtgattcaggttggtatcttcagggaagggcaaagcctgaaagtggctcaggatgaacgagaagacagtgattattacgtatttaagtttggtaatgggaaaggttacattgctaaaaaccatttaaaagaaataaaaaaagcctcattccccagtgatcctttccccattctcaataataaaatcgctcagggtttagctacctttcagaaaacgaaggtttacagcacgttgaaagccgatagtaagccaattgcagtactggcggcagatctccgctatccaattcaggagaaggtacaggatattaagcataatatctggtatgaaattaatctgggaggacgtctgggctatattcgtgctcaggatgctgaacaggataatggcatacctgtgctgacataccatcatctccttgaggagaaagaaaataagcgttttctgcatacatcaacaaccacatctttgaaagccttccgtaatcaaatggattacttaaaacaggctggttacaccacgatttcactctatgagttggaagggtacttaaaaggtgcagttaacctgccggcgaaagtcgttgctttgacttttgatgatggattgaagtccgtgtatcgttatgcttacccaatactgagaaaaaatgaacaaaaggcgacactttttatcatttcatccagaatcaaacgtcatcctcagaaatggaatcccaataacctacaatttttgagtcttaatgaattgttatctatgcaggatgtttttgattttcaatcccatactcatttcttgcatcgattaggtaagaataagaaacccatattattcaagcgttcataccggaatattctgtatgattttgaacgctcccgccgggcattatcacaatttaacccccatgtaatttatctttcctacccttttggcggatataatatgtcagcgatgaaagcggctaaaaatgcaggttttcatttagcggttaccactgtgcagggaaaagttaaattgggagacaatcccttttctttgaagcggctatatatattgcggacagattccattgaaaaaatggcaaaaatgatagccaataaaccaagagatatttctttttctaagataaatagtaaaaaatgatatatttagattaatgttaagataagtatatagaacttactgtattaatgggtttttattgcaaatatcacagttcgctatttttgatcatgttttcatgaaataagaccctgtcagtttagcttgaaaatattatatattattgtttccatttaattattaaattatgtggaggtgagcgtggatattgaagatgattataatgtgttaataatctcctttgatggcgttccgatgtccggaattgttgttgaatcaattaaacttgcagggtttttgaaaaataataagaaaagaattttcatggaaacgcgaaccggtgtctcagaggaaaaaaagcactgtggtaaaagaaaatgctattaaaatggcgttatctacctgccagccggtagacaacgatgttcaccagcaaagatttggtcatgcgataaaagaaaacaaacgtatttataataaattatgtaatttggcggagcgtcagttgctattttttgatgatgataaaattaagctcacgcgtaatggcaaagtgctggttgaatcaatcgtaaatacagaatttaatgactaaatatgatgagtaataatgattaaagccaaccgttttattcctactaaacgggtggctttaatttgtaccggttcaggtagatcctttgctctttatcattttgataaatgtttcccgtgcactcgatgaaccaaggcgttcagcttcatctaacagagtcagtgccttattgatatctccatttttgatcgctttcttgatggcctcattgaagtgctgttctgtttcacctgaaatagatttaggcaccctattaggctttcgatctacgagagaatggtcagccaatacgttttcggtagtttgttcttctgacgtcactttcagcgttaaaattccggtatcagcatggctagctactgggtctggaatattgggaaccgcgttacctactccctgagcataggctttggctggatcaaccattttggtcgatgtttgcaggtctgaatgggtagtgtaaatcaacaaatatatatttttctgccctgacactggcgttatttttaatgttctttcaacccgttcccccgagaagacccccggttgttgataggaaaaagaatggcttgcataaagtgcaacaggctgaaatttttcatcaaacaccaacacgttaggtaaatagacctgcttatcttttatcaggctgcttaacgtcattttcagtgcaccctgactggccggtaaagcaagagtggcaactgctccctgaatatttccttcgttaatctgagatgaagtccgactgagaacaattgtgtgcattgccggggtctttatcggtttccatacctgcttctgtaaaacagaaacaggtatggaataagcaacgctgttgtttatttccggattaatcatagccttctcagatacagtacctgctgcataagcctctaaggggaggcttatgcaggagaaaataccgctaaagaagagagtaattagtttggttttcatcgtttacccttacccgaaattaccaccaggcttcaaattgagcaccaaacgtgaactcatcattcttaccacggctgaaatggtgagcagttgtgtcacgataagctaacccatcgttataaccgggagttttattggcataaccccatttttcattccatttagcataagtggtgtacaaacgaatcgccggacgggaccagatgctatcacccgcctgccattgttgggccagagtgattttgtactggtcgttaatcgctttggtacgctgagatttgacattatcgtagccaacttccaataacgtactcatggtgggtgtccatttgtacattgggcggataccggcggtataccaaatggtaccgttacgattgtcgcgatcaatattttggtacatagcgacgtacatcaaatcccattttttagccagattgatagcgccatgatttatcacacgtagcatatgaccattattgtcggtactggctcccgcggaacgaccattattattggaagtcatagagtcagtcgcatactgaacaacaagtttattgaacccatccaacatactttgggtatgttcagctgttagcattaccccatctttagaagcgtttttggctaaatgataacccttgcgtggattagcccgcccgtaatcaacacctaattccagcacaccaccgctattgatggggagagcagccagccggacatcaaaaacatcattagaggtttcggtattttgatttttattactaacccagcgatatgaacctccactttcagtattgcgtgtcacggcaagagaaagtttgccaaaatcaagatcaatattttccaaaccggctccgggaccagaaatatcccaataatagaaatcgatcatatgtacatcatggcgttgataaaaacgcttaccggcccacagtgttgagccgggcaaccagtcaatcaggttagttccctgtacattcacttcacggaatgccgggttgaccgattcatgatcgcttttttgagctgcgctataggccagattggtatcgaaatagaagcgtttatcttcttgttgccataatgcttgccccaattttaattcagcataggtttcacactcatttccgaggcggtatttactttgtgcccctgtactttgagcacatgtttgctcaccgccacgtcctgtccagccgatacctgaacgggcataaccgtggaagtctaccgcagcggcctgcatggaaaataatcctgccagcacgggtaatgagagaggtaagatgcgcataattgttctcctgttattttttatggcgaggttttaaacccctggttctttgtataggcgccgacatgctgttccgtcttcccgaaacagatgacaacgatgaggggctaatccgatagtgaaggtcgccccttcttctacaagaacaatatcaggctggagataaacgagattttgacggatggttgatatgtggatatggatatgagtttcacttcctaactgctctactatctgtacagttcctgtcagtgttacgtcagcgacatcgctgggtaaaaggtgttccggccggatacccaaagacacattactcccgacagtaactcccttactttctaccggaagccagacatgttgcccattaggcaggctgatctgtacttgatcaacagcggttgcagagactttgactggtaagaaattcatctttggagagcccatgaaactggctacaaaacgattagccgggtagtgataaatttcgagaggtttaccaacctgagcaatattgccggcatccaatacaacgattttgtctgctaatgtcatggcctcggtttgatcatgggtgacgtagatcatggtgcgttgcagacgcttatgcagacgtgaaatttcgatacgcatctgaactcgcagggcagcgtccagattggagagaggttcatccagtagaaaaatattgggttcggcgaccagagtacggccaatagccactcgctgacgctggccaccggatagtgcttttgggcggcgatccaatagatgagcgagttggagagtttctgcgacctgctctacccgtttttgaatctcactttttttaatgcctgccagtttcaggccgaaagacatgttatctgctacggataaatgggggtaaagtgcataagattggaaaaccatgccgatacttcgtttagcgggcggtacatcatttattacttggcctgcaatcagcatttcaccggacgtaatatcttccagcccggcaatcattcttaataaagtcgattttccacatcccgatggaccaacaaaaaccacaaattccccttcatcaatctcaagattgagatttctggaaataacattttcaccataagccttatatacattacgaagtgtgacgctggacatgtgtttacctcggagttgccatcctggtttgtagcgaaaagtagatggcagaattgtgtgcaaaataacaggaataaaaatcctccattttatcgttttttatgggggagggattaggaggatgagattagtagaattacaaaatccctcgatatttcacggaacaaaatgtgattttagttccagaaattggtgcatttttaaggctgttggcatggtttacagtgcttttgtaatcacgttcacattcatttgatgagaggcgtagataaggggaggatgagtctgctttctattaattgcacactatgaaatattttctggcggtgtagtgaagaattcatcttaaatcagcaaatactgaaaaggacggaatgatgacaaaaagaatctcaaaaataggtgctagtgcgctgatactttccgttttatctgcatgggtactttctgttcctgctttcgcaaaactggaagaaggtaagctggtaatttggatcaatggggataagggatataacgggctggctcaggttggtgacagatttatgcaggatacggggatttcagtcagtgttgaacatcccgataaactggaagaaaaatatcctcagattgctgcggtgggagatggtccggatatcattttctgggcacatgaccgctttgggggctacgcacagtcggggttactggctgaggttacgcctgataagaattttatggacaaactatttccctttacctgggatgcggttcgttatgaaggcaaattgattggctaccctattgcggttgaagctctttctcttatttacaataaagacttggttaagtcaccacccttaacatgggaagaaattcctatattagataacgagctaaaaaagcaggggaaaagtgcgattatgttcaatcttcaggaaccttatttcgcctggcccctgattgctgctgatggtggatatgcctttaagaggcagggagatacctacgatattaaggatagcggggtaaatcatactggttctaaagccggtctggaatttttagtcagtctggtaaaaaacaaacaccttagtgctgataccgattattccattgctgaagccgcctttaataaaggtacgacagcaatgactattaatggtccttggtcatgggggaacatcgacaaaagtaaaattaattacggtgttactttgctgccgacttttaaaggccagccttctaaaccttttgttggtattttaagcgcaggaattaacgcggccagtcccaataaagaactggctaaggagtttttggaaaactacctgctgactaatgatggcttagcaatgatggataaggataagccgctgggtgctgtagcattgaagtcttatcaggatattcttgccaaagatccacgtattgctgccacgatgaacaatgcccagaaaggcgaaatcatgccgaatatttcacaaatgagcagcttttggtacgccatgcgtagtgcggtacttaatgcaatcagcagccgacaacctgtagatgcggctctcaatgatgcagaagcccggattgtaaaataaacgcgcattagtctccttcttttgaagggggctttttgtttatcggaggaaagattttcttattgaatctcagtaaaacaggttcgtgggaataggctcgcaggtaataaacttctagtaacaggaagtgcataatgtcagcaaggttgaacaaaaatgtatggtggctacgttctgtcctgaaatggtttgcggtgggactgagcctgtcttttaccggttatttgattgtgttgatgtacgcacaaggggaatacctgtttgcgattctgatactggtattactgggtagtggtgtttatgttttcgctaatagtaagtcttatgcctggcgttatacctacccgggtattgccgcaatgttattgtttgtgctgtttccgcttatttgtaccattacgattgcttttacaaactatagcagtaccaaccaactcacccttgagcgggctcaggccgtattgatgagtagacactatcaaacaggccagtcatttaatttcaaactttaccctcaggatcaacagtggattttggtattaaatgttgctgatagttcgaatgtattggtatcagagcctttttctttatcagataaagaaaaaatcattctgccattatatgagcaggtaacccgctttaatcatgacgctgccacattgcgtaccattacgcagaaccggcaggcattaggacaaatcacagtaattctgccggataacagtagattgcgcatgagctctttgcggcagttttccggtatacattccctttatactctggagaaagatagtcacactctgattgataatcagacaggtgtaaaatatcgcccgaatatggagacgggtttttaccaatccattgatgcaaaaggggaatggggcgatgggacgttgaatcccgggtttacggtttccattggctggaaaaattttctgcgggttattcaggatgaagggattcaaaaaccttttctctccatttttgtctggacggtgttcttttctctgttaacggtaatattgactgtggcactgggcatgattctggcttgcattgtgcagtgggaagcgcttaagggtagggcgatttaccgtgtgttgcttatcttaccgtatgccgtcccttcctttatttctatcctgattttcaaaggattatttaaccagagctttggtgaggtgaatctactgctcaatgggctatttggtttgaaaccggactggtttactgacccgactctggccagaaccatgctgattattgttaatacgtggctgggttatccctacatgatgatcctttgtatggggctgctgaaagcgattcctgatgatctgtatgaagcctcagcgatggatggtgctgggccactacagaatttctgctatatcacttttcctttgttaattaagcctctgacgccattgatgattgccagctttgcttttaatttcaataacttcgttctcattcaactacttactaacggcaggccggaccatattgggacaacgacaccagcgggttataccgatctattagtcagctatacctatcgtattgcttttgagggtgatggaggacaagactttggattagccgcggcgatagcaacgttaatcttcttgttggtgggggcattggcaatcattaatctgaaaacgacacgaattaaatttgattaaggaggtagtgtcatggcgatggtccaatctagatcacagcggtggcgaatatgggcaacgcatatattcatgctgatttttatcgcctcgattttatttccattactcatggtcattgctatctctttacgaccggggaatttcgcgacgggaagtttgatccctgagtcgatttcctgggaacactggaaattggcgctgggctatagtgttgaatcctctgatgggcgcattactcctcctccgttcccggtaatactgtggctatggaactctgtaaaagtcgcattcattactgcgactggcattgttgcgctgtcaacaacgtgtgcctatgcttttgctcgcatgcgttttcgtggcaaaaataccttattgaaaggcatgctgatttttcaaatgtttcccgctgttttgtcgttggtggccttgtatgccttgtttgatcgtttaggggaatatatcccttttctcggtctgaatacccaaggtggtgtgatttttgcctatctgggggggattgcgctacatgtgtggacgataaaaggttattttgaaacgttagatcgttctttagaagaggcggcgatgctggatggcgctacatcgtggcaggtttttcgtttgatactgttgccgctttctgtaccgatattagcggtggtatttatcctgtcttttattggtgcgattactgaagtaccagtcgcatcgttattgttaagggatgtggataattacacattagctgtgggcatgcagcaatatcttcacccacaaaattacctctggggtgactttgccgccgctgctgtactttctgctatacctattacagtagttttcttacttgcccagcgttggttagttggaggattgactgctggtggtgtgaagggatgacggtctgttcggaaattcatcaaagagtaaaggtaaagcaaaacttcgtacctgtataaagggtacgaagttcaatattttttgcctgtagttatggcacttttcttctgtgtttatctattttttccaataaattatttatgtctgtatttttgaacatgtcttccaatgtgacggttaatttacgtctccaattaggatattccatggttgtgcccgggacattgacaggattttccatacccagccagtcctcaggttgtaagcccaacaaggcactggtacagctagcgagataatagtgtattccttgattaacggacgttggtatctgtgatgaagatgtctttggctgcaatggggttagtgtgtttgctatattttctgattcagagagataaccatgatgatttaaactctgtaatagtttttgcttacagtgttcgcgttcattatataactcagtgagtaatgccttatcaggatataacccaattgactcacccagtttcaggtcaccactttgccaaaacccacataatgtcggtaaatcatgggtagtgatagttgccatggcttgtgtttgatatttctccggtggtttaaattcaccttgcccgtcgcgctcgaaataaaaaaccttataagaatagataccacggttacgtaactttccaacaatctcttccggtactatccctaaatcttcgcctatcaccatgcaacaatgacgctggctttccaatgccagtattgccagtaaatcatcaacaggataatggacataaacgccttgagctgcggtttctccctgagggatccaccaaagcctgagcagagccataacatgatcaatgcgtaatgctccacagtgccgcatattactacgtagtaattgaataaaaggctgataattctgagcctgtaatacatgagggttcattggaggaagcccccaattttgccccagtggccccatgatatcaggcggtgcaccaatagatgctttcatacaatagagttcccggttatcccaggtttctgaaccaccttgtgccacgccaacggccagatcacgataaataccaatcggcatagcatggctctgactttcacgaaaacagtcagccagttgcctgtcagcaatccattgtaaccaaagaaagaactccacttcctgtgggttggtgtgacaaaacgcctgtacagtatcattatctggatcgcggtatttttcaggccagatgggccaaccccaataagtgtgactttcactgtatagtttgtcatgcagggcatcatagacagcctgagaatacagacttttaccgctttgattaatgaattgacggaatgagagatataggggatcggtatcagttcgagtattgaattgttgataagctaaacgtaatgctgtcatttttagtgccatcacacccgaataatcaacccattctgtttggcggacactctgaattctgctttgggtttccggcatcagccaccacttttgagcgttggcactggattggaaatcttctacctgactgacatcaatataaatgatattcaaccagtgacgggatgaggggctataagggctggcgttttcaggcatggcaggatacatcgcatgtagcggattcaggccaataaaagcgccgccgcgttgtgccagttcccgtaacatttttttcagatcgccaaaatcacccattccccagttagtttcggaacgcagggtataaagctggatgcaggctccccacaatttgctgccttttatcagtgattctggttcgtaacagcgttccggtgcgatgatgatctgcataacatggcgttgtactgagtctttgggatctgatgaggggactaaactcagcgtgtgataacccagaggcaaagaggctggcagtatcagttgatattggcaatttccacgcaggtttgttccttgttctgtctgtatttgccactgatattgggcggaagtattcagcgtaaaagtgaatgactgaccaataattaatactttcactgtgggtaaggctgcaaccgatggatcagaaaccggctttttgaccggtatattttcttccatggcttgcaggatcttatgccttatctgagcaggaatagcctgtggtttgccataggcattaatatattcagtggcaatgccagcttctgtcgctaaatcctcaaggcttttgttttccattatgatcctctatttaacctgcttaacctgccagatacgttgttgataatcctgaatagttctgtcggaactgaatgttcccatacgggcagtattaaggatcgtgcttcgtgtccagtgcggggtattacggtagagttcatcaatctgctgatgcgcggcacagtaagaagcaaaatcagctaatactaaataagggtcaccaccatcaatcaggctgtgcagcattaaatcaaatgcctgtttatctccgtgactgaactcaccgctggagagggaatccattatttgttgtaattgcttattttgttggagaatgtttttgggatcataaccctctctcagtaaggtttttgtttcttccactgtatgtccgaagataaaaatgttgtcgttgccaacctgttcggcaatttcgacatttgcaccatccagagtcccaatagttagtgctccgttcaaggcaagtttcatgttacctgtaccggaggcttcttttcctgctgtggagatttgttctgatacatcggctgccgggatcatcaattcagcttttgaaacattgtaatcaggaatgaaggcgatttttatgcgatcgcgtacgatcggatcatggttgattttttcggctgcgtggttgatggctgaaataatattttttgccagatagtagccgggagccgctttcgcaccaaacagaaaaacacgcgggtaaatatccagtgccggattttcctgaatctgtcgataaagtgagaggatatgcagcaggtttaaatgttggcgtttgtactcatgcaaccgtttgatctgtacgtcgaaaatggcatgagggtctagcttcagccccattgttttattgatgtagttggaaaggcggattttattgttctgtttgacggtgcgataagcctcacgaaaagcagcatcagcagcgtagggttcgagtctttttagttcagtaatatcgctgagccattcatggcctaatgtctgatcaattagtgaagagagtgctggattacactgttttaaccagcgacgtggtgtaacgccattggtaacgttatggaatttttgaggccacaattggtgatattcagggaagagatccgtcacaatcaaagatgaatgcaatgcggcaacaccgttaatcgcaaagcaggctacaacacaaagattagccattctcacctgattatcatggatgactgccagtttttcccatatttgttggttacccggccagtttttttctaccgttttacgaaaacgattgtttatttcctgaataatacgatggtggcgcggcagtaattcgatgatgagatgttcatcccaacgttccaaaccttccggtaacagggtgtgattagtataagcgaaggtttgcccggtaatgctccatgcagtatcccaatctagttggagatcatcaatcagcaggcgcatcatttcaggaatagcgattgtggggtgagtatcgttgagctgtatcacttcgtattgcggcagctcctgtattttgcgaccagccagctgggggcgacgcagaatatcagccacagcacaggcacactgaaaatattgctgcatcaggcggaggcgttttccagcccgatggttatcattcggataaagaactttggtcaggctggtggcttctataccctgctgttccgcatgaaggaactgaccatcattgaacagtgataaatcaaagggattatcatatgttgcttgccacaggcgcagcggctgtataacaccattcttataaccaacgacaggaagatcccacgcttccccggtcagggtaaaagccggtcgccagatttcacctccgtcggttgttgtgaccatttcaccgccgaaactaacatcaacattcagttgtatattgcggtaaaaccatggataggtattgcgctcccagtcatccggagtttcaatttgtaacccttgctcgaaggattgccggaacagcccatactgataattaagaccgtagccgattgccggttgattaatggtcgccattgaatcaagaaaacaagccgccagacggcctaaaccgccattgcccaaggcaggatcagtttcttcttccagcacatcacttaatgccacaccatattcggctaaatacgcctgaacatcatcataccagccaagattcagcaggttgttacccgttaaacgaccgatcaggaactccattgaaatatagtttacatgccgttgcttgccttttgagccatcggtcggcggaagattatcaatttgatggtgattgttttggtggtgattgttttggcgataagcaggcagtaattccaaaagagtggcactgatcgtttgccaccactgatgtgttgttactccctgtgctaaatcaaggccaaagcgctgcaactgccgggtcagcgcagcctggaattcggctttatcaagttggggctttttcatggcgtcttcatcctgtcactgaataaggaaaatatggagatgattgagtctgatatgctgaaggttcagtggacaagaaacatcatcctgtcaggatattcgcggggatgagtattagggcgtagctattttttcgtgcgctttcgcaatttattcaggaaaaagaaacgtttcagttaaagaatgtgacagggtgcaacttaacacaatctaatcaatcaacctaattgcaaatagctcacgtttctctaaatttgggtgtttatttatgaatgttactgatttgtatttctcaataacatgacaacaaagttacagggatcagttctactcattgcttgtgaggggaggaaatcaatgcttatcccatcgaaactcagtcgcccccttcgcctcaatcatatggtcatgcgtgagcgcctgttagcgcagctcaatgaagcacagaattatcgtttggtattggtaaccagcccggcagggtatggtaaaactacgctgatgtcacaatgggcggtagggcagggtaatctggggtggtattctctggatgatagtgataatcagccggagcgttttgccagttatctgattgctgcgattcaacaggccacacaggggcattgtgtcaaaagtgaggttctggcgcagaaacaccagtatgccagtttatcggcgctgttcgcacagttgtttattgaattgaatgaatggaaacagtcattgtttctggtgatcgatgattatcacctgatagtaaataatcttatccatgaagccatgcgtttttttctccgtcatcagccggaaaatctcacgctgattattctttcccgtcaattaccgtctctgggggtcgctaacttacgggtgcgtgagcaattgctggagtttgacagccagcagttagcgtttaactatcaggaggctcagcaattttttgataaacggttgcccagcccattggacgcggataattgcaggcagttatgtcatgacgtggcaggctgggcaacagcgttgcagttgattgctctgtctgcccgtcaggctggtaatacagcagaaatatcggcaaaacgcctctcaggcattaatgctggccatttgtccgattatttggtggatgaagttttaaaccgtgttgatcaggaaacgcgagaatttttattgcgcagttctatcctgcgttcaatgaatgatgggttaattgtttgtctgacgggcatggagaatggtcagcaacgccttgaagatattgagcgtcaggggttatttatccagcgcatggatgatttcggagaatggttttgttttcatcccttgttcgcatcatttcttcgacagcgttgtcattgggaaatggctgctgacctgccgaagctgcatagtacggcggcagaaggctggttgatgcaggggtttccgggagaagctattcatcatgctttggcagcaggggatacgaagttattgtgcgatattttgctgcaatatgcgtgggaattgttcaaccagagtcaactgtcgctgctggaagagtgcatgaatgcgttgccctatgagcagcttttggaaaacccgcgtctggtgctgttacaggcatggctggcgcagagtcagcatcgtcattatgaggtgaatgcattactgaatcaggcagagcaatcgttgaagcaaaaacagataatgattgaagctgaactattgggggaatttgatgcattacgtgctcaggttgcgattaatgatggccgaccggatgacgctaatttactggctgaaaaagcactggctgctctgctgcctgataatgaatatggccgtattgtcgcgatgtcagtgaaaggggaagtgttgcactgtaagggggcgctgtctcaggcattagcattgatgaagcagacggaacagttggcccgtcgctgtcatgtctaccactatgctttatgggcattgctacagcaaagcgaaattttactagcgcaagggtatttacagggtgcttatgaaacccaaaaacacgcttttgatctggttcgtgaacaacatatggaacagctaccgatgcatgagtttctgttgcgtattcgctcccagcttctgtggtgttgggcgcgtattgatgaatcagaggaggcggcccggcaaggtctggaggtactgtctaactttcagcctcagcaacaattgcaatgtctgtctcaactggcgaaatgttccttaatcaggggagatattgataatgcccgccgccatttaacccgttgtgaaaatttgttgagtaatgggcattatcatcgggactggagaacgaatacggataaattgcggatcattatctggcagcatctggaagataatatttcagtgactcaatggctggctcaggctgaaaaacctgaaagtttcagtaatcacttcaatcagaatcagtggcgtaatattgcccgtgctcagatattgcttggtcagtatgaagaggcggaaagcattttaaacatgctgaatcagtatgcggtaaaactggagttggtcagtgacttaaaccgcaatttgttgctgtgcaacctgctctactggcagcttggtcgcaaggctgaagcgcaacaggtgctgatagaagcgctgaaattggctaatcgcacggggtttatcagtcactttgtgcttgagggtgagttgatggccctgcaattacgccagcttatccagatcaatatcctgcctgattttgaacaacaccgggcacagcgtattctgcgtgaaattaatcgtcagcatcggcataaatttgcgcattttgatgaaacatttgttaaacagcttcttactcatcccgatgtacctgaacttatccgtaatagtccattaacccaacgtgaatggcaggtattagggttaatttattctggttacagcaatgaacaaattgcgactgaactggaagtggctgcgacaaccattaagacacatatccgcaatctgtatcagaaaatgggtattactcatcgtcaggaagctattcaacaggcgcagaatttaatgaaaatgatgggattaggtgttcagtaaaattttttctaaggtgatattttcggtaatttcattaataaatatgaattggaaggattataacttaaaaatataagataatttttaaaaaatactgaatgtattttattcttttttgtgatcactattaagttttaaataggattacacctatttcgtgtagttggtggattcttcattgtttaatataactaataatagtgagtcattatggaaaataactatcacccagcagagaattctcttgaaggtatgctttcccgttatatcggtcacggcccttatttaatcattgatggggaaaaacatattgatgcggcatcgggcacatttaatttgccacttggttacactaaccacaggctcgccgaaaaattaaagcaacagattgatagatgcacacatttgagttcggcgtatacccgggaaatgtcccagtatattttaactaagttggttaaatacacacctaaaggcatagatcgcatgtggttacgcgatgtttccggctctggtgctgttgaatgtgcaattcgtattgctcaaaaggcgacgggacgttctggcatcgtctctttctttcttgcgcatcacggtcaatcgcttgcaacggcgcaggtttccggtaatgcgttcaggcttaaaaattttcatatcaatattgaaggctccataaaaatccccgctccggtcagtgtgatggctgaatctcaggaggaaaccccacaatatatcgatttggaacagttcattcagttgggctcaagcgacaatattgcatgtctgattattgaaccgattcaggggaacggtgggaatattgtttttccggtggagttctatcgtaaaatcagggaaatctgccatcagcacggcatcattatcattgccgatgaagttcagacagggttcgggcgtacgggcactttctttgcttcgacgggttatgccaaagagctggagccagatattatcgtttttgccaaaggtgctggtggcattggcattccaaccggtggtgtgctgatgcgcagttcactggatgtgctggaatcatttgagcattccagtacttccggcgctaatccgttgtctttggtcgctcttaacgaaatcatcaatattattgaagatgaacatattttagataatgtcatccagaacgaaacttttctgcgtgatggtttgctggatttgcagcataaatattctgaaattacgggtgttaggggcgttggctatatgtttggttttgatacgccaacacctgaatttgcagcacaggcaatcgcgacagcctcccgtcataaactgatcttgcggggatcccgttatggtaagggacgagcgcttaaggtacgtcctcctttaatttgtacacaggaacacttagctgaaattctccataagctggatctgacttttgctgatctgacagcttctgtacagcaccagcaggaggtggcataaatgaaagcgcttaaatttaatcagtcatgggatattgaagtccaacatgttgaaccactctcctgcattgaacctgatgatgtggtggttgatatcgcagtctgtgggatatgcggaactgatgtaggcattatcaccgggttttatcctgtcgcagtaccggggacgacgttgggtcatgaaactacaggtattgttgcgcaggttggcagtggtgtgacctgctttcaggctggtgatcgcgttgtcattaacccaacatattcttgtgggcattgcagaatgtgcctgaccggcagcccgaatcactgtgaaaagaaattgggaacagaagccggtgtctcctatgacggtgcgtttgctgagcaatatctggcaaaagagagctcgctgattaaactggagcctcatgtcagtatggaagcggcttcattaactgagccgttaagctgcacactgacaggcgtggataaactggggatcacccatactaatattcgtgctgtggtcgctggtgcggggcctatggggatgctgtacctttgggcattgcatgaacggggagttaacgcgttcatcattgagaaaaacccatatcgtatgcagtttgccagccagaatttacctgtgggatgccggttatatgctgattttgacgaagcactgatacaggaattcggagataaatctacattgatagacttatgtgtagatactaccgggcaactgactgagtatattttcgaccacttggcacccggtggtaagttgctgaatgtagctttgaaagataaacatgccagtctcgatatcttaaaaatcgcagataaaagcctttctgttattggttcgattgattccctgaacaacagttttgaacgggcttacgtcatgatccgtgatggagtgatccctgtagatcgtctggtcagtcaggtttttgattttgacgattaccagcaggcatttcttactgtcggatgtgatattgcagctaaacagcaagtgccactcagtaccccaaactgtaaggtattgatccgtttgtctgatcttaaataatggaagatgaatgatggaaaaattcaatatcatttttgatatcgatggggtcattgttgatagtgagcagctgcattttgatgtgctgcgtgagctggcacctgatcacacgcacgagattaggcctcagcagttgataggcttgagtctggcgcaaacattgagttctattggggttccgttacaggcacagaaaagtattaccgacaggattatatcgacttatcaggataaattatctccgcactacctacggtcaggtgttactgatctgatatcagccttacagcaaaatgagattgtttttggattcgtttcgactgccccacgagaagtgtgtttgctcaatcttgggttgttgaatctaagggaagagccagcgttgatttctggtgacgatgttaaacaaaccaaaccttttcctgatccttatctggcgatgctgaaattgaaagctatggatgtcaggcagacgctggtgattgaagatactgatttgggtattttggcggcaaaacaagccggtattccttggatatatgcctggcctcatgctttgtcaggagcagaaaaatatgaacagtccacagggatcattagagagctggtggatattccccaaatattcggtttactcaatgaatattaagccaatgtaattaccgggataaataatgcagatgccctttccaagaatttgggagggggcatatctgagtaaatatcgtttttttataagagaaatatgttaggtgacagagattgatggagtaaacagatgtctgaagagtatgcagtatctttgataaaacagcctgttatggcgacaaggttctcgttttttattgcaggtttcagtatggcgagttgggctccgttgattcccttggtcaaggagcgactatcacttgataatggtgcaatgggattactgatgctggcatttggtatcggctctttcatcatgatgcccatcgcagggatgttgtctgcgcgggttggttgccggaaggtttttattctcttcacgttactggcaattttaatgttgccgggactgagtattttgccaactcccctgactctggcttgtgtgctgtttctgttcggggctggtattggggcgatggatgtttcggccaatattcatgcggttaatattgagaaaagagtacagcagccggtgatgtccggttttcatgccttgttcagtctgggaggaattgcgggggcaggttcggtgagtttgctgttgttgatgggaatatccccatttttggtcatgatcgcggtgacattattcactattttgttattgtttccggtatggaatggattattggatgaggcagaagccggggataccccatttttttccgtaccccgtggtattgtgatcctgattggttttctctgttttgtggtttatctgatggaaggctcaatgctggactggagcgggatcttattaagcagtgtgcataatatggcgagtcatcaggcggggctgggttataccctatttgctattacgatgacatctggccgatttttcggagacaaaatcattgctgcgtatggttatcgaagggtttttctgggaagtgctattttggcgacttcaggatttgtgctgatttatctggcatccggtgtaattacattagcggtggcatttatgatgattggtgccggcttatccaatctggcgccaatgtttttcaccgcatcggggcgacaaaaagtcatgcctgatgctctggctgtttccgccgtttctacgatgggttattcaggtattttgcttgggcctgcgattattggtggtcttgctcaccaaataacattacatggtgcttttgcctgtattgccatgctgtcactttcattactagcggggtatcggttgattactcctgagcgtaagtaaatagtgtcgagcataaataacatcgacggcaaatcacacaggagatattgatgaatttattgcactgtcattggattaatgagcctgcttcatggcagcgtcaggataatgcactgagcgtggtaaccgataataaaaccgatttttggcgtgatacatggtatggctttcagcgccacagtggtcatattttcggctgctatgttgacgatttacttattaaagaagggttcatgtttcagctctgtattgaagggcgttttgagcagttatacgatcaggcaggcgttatgttgctggtggatgaacaccattggctgaaagccggtattgaatatgccgatggtaatgcaacaatcggcagtgtattaaccgcaccttattctgactgggcgatggggattttttcgggtaactctgaaaaattctggttgcggctgacttatcgggaaggtgctatccggctgcaatattccaccgacagtaagcagtggcctttgttgcggttatccccttttgctatcaaccaacataatgggcaacgagtgtttgttggtgcgatgtgttgttcaccagagcgagaaggattacaggtgaagttctctgaattcaaactgatgacagccttgaacaagcctttgcatgatttgagttagtataatggctgcaatccggtcagatgaaatgcttttatgatggattaatacccgaatatagaaagtaaaataaaggtattacggaaaaggagatgcaaatggaagatttgttggagtttttcgcggcactactggagtgtatttatcacatcataaaatgcatatttacatttttaaaatggataatggaaaatatctttaatttttttatggttatcggggttttattctgtattgtcattgcgggaagtatcgttaaatttattttttatagtagcttcttggtattggttttatcagcctgtaaataccgaagaagaataaaaagatatctgaatgaaaaaggtctctttaaataagtgttgaggcgatgatctatccctcatccaatgtgcaatgtgcaatgtgcaatgtgcaatgtgcaatgtgcaatgtggatgagggacgtaagcttattttttatccctgccttcccaaataactatcccaatctttccagacgggctgtaagcccgatctgaccagcgcttcggcaacctgttgtacagagcgatgatcattcggagagaattgctccagttcgtgatggtcattttcgacataaccacccggctgagttttagaaccggcactgacactgtttattgccagaggtacaacgtgatcgcggaaataaggtgactcacgggtagaaaaaaaaagttcaacatccggtgccagcaggcggaatgcacagatcagttgtaccagttctgcatcattcatcagggatgcaggcttaatcccgccagcacaggggcgcaggcgtggaaaggagatggaataacggcttttccagaactgtttttgcaggaaaaacagatgctctgccaccatatagcaatcagttcgccagtgaggtgataagccgattaatgcacccagaccaattttatcaatgcctgcccgtcctagccgttcaggggtttccagtcgccagtgaaaatcctgtttttttcccctgagatggtgtaactgataactcggttcgtggtaggtttcctgatagaccagtacagcatctaatcccagtgttttcagttcggcatattcctcttgtgccaatggctgaacttccattgtgactgaactgaaataacggtgtattaagggaaggtaatggcgaaaataatccattccgacttttttctgatgctcccctgttaccagcaggatatgctcaaaccccagttttttcagggcctgacattcagccccgacctcctgttcattgagcgttttacgtttaatgtggttactcatggaaaaaccacaataggtacagtcattggcgcacagattggaaaggtaaagtgggatataaaatcccacggtattaccgaatcgctgacgggttaattgctgtgcccgcctagccagtggttcaaggtagggaagggctgcgggtgagagcagagccataaaatcattcaatgtcaggcgctcactatttagagcgtgctcaacatcatggcgggttttactattgatgctcagcgtgatgtcatcccagtccaactgttgccagcgatggaggaaagtctgttcggccacggtattgctgttcataaagcctccagaaaatcggtcagcgggctggaggcttctgcatgggatttctggcttgccactcctgcctgatgagctagttcgccggcctcaatggcggttttgaatgcctgcgccattttgaccggattacgggcaacagcgattgcagtattgaccagtacagcatcggctcccatttcaatggctgccagtgcatggcttggagcaccaataccggcatcgataaccacaggaacattggactgctcaatgataatttgcaggaaatcccgggtgagtaagcccttatttgaaccaataggtgctcccaatggcatgacagcggcacaacccacttcttccagacggcggcacagaaccggatctgcgccacagtaaggcagaaccacaaaaccctctctgactaactgttccgctcctttcagggtttctatcggatcgggtaacagatatttcacgtcagggtggatttccagcttgatccagttagtgcccagcgcctcccgcgcaaggcgggcagcaaaaactgcctcttctgcggtttttgctccggaagtatttggcaggagtttaacccccagctcctgcaagggaaggagaatgccatcatctttgccttgcagatcaatccgtttcatcgccattgtgattaactggctaccggaggcgcgaatggcttcaatcatcagcccggcattggcaaattttcctgtgcctgtaaacagacgggaatgaaaggtggtatcagcaatttttaacatggttaacctccggcattagccccctgcaatggcctgaaacagcaggatattatccccgtcactgagctggtgggtatgccattctgagcgggggatgatggtctggttaatagccagtgcagtacctgactggggacgttgcatatgttccagtaactgctgaactgtcatgggattatctgtcggcgtatccagtgtgatcgtttgatcgttgacaataatgttcatacgatttctgttcctgaaacggttttatctgtacccgcagttttatcaatgatggggggcgttccgcataccggacattgtggtgagggtgtcagctgtaacgtactccagttctgttttctgccatcaaacagtcgcagttttccattcagataagaagggagacccgccagcattttaatagcttccagcgcctgtaacgtcccaatcacaccgaccaccggccctaaaacacccgcagtgcggcagttacgctgtggctcttcctgatcgggatagaggcaggcataacagccatgctggtaaggcggttcgaataccataagctgaccactgaaaccgacggcgctgccgctgataagcggtttaccggtttcgatacaggcggcgttaatagcatggcgggttgccatgttatcgctacaatccagtatcagatcgacctgccggacgaggtttgtcagtgattttttatccagtcgttcattaatgacggttgtattaaccaatgggttcagatcagacagtttttgtgccgccagagcggctttacctgcgggaatatctgccgtgcgatagaggatctgacgttgcagatttgagacatgtaatttgtcatcatcggcaagataaagatgccctactcctgctgctgcgaggtagagtgcggcgggggagcctaatccccccatcccgacgattaacaccttgccgttttttaatttttcctgtccgtccgggccgatatcttccagtaataattgacggctgtatcgcataaattcctgatcgttcaacataagcgcctccgattattttcttcaacgtttttgtcaggtgtcccttcaactaaatgaagcaatctggctgttgcctgtcgccagtctttcgctttggtgatggcactgaccagcgctacaccaccgacaccggtcgcgaccacatcaggtactcgttccagtgaaataccgccgatagccactgtcgggaattcaggtgtgatttctacctgatgtttcagagcaattaaaccctgtggcgatgagggcatttctttggttgtggtcgggaaaatatgccccagtgcaatgtaggatggacgcaaggcttttgcccgcgccagttcctgctcgtcatgggtggagatccccagccgaagcccggcctgtcggatagcactgagatcagcaatatctaaatcctcctgacccagatgaacgccataagcacggtgtttgattgccagccgccagtagtcgttgataaacaggcgcgcgttgtattgcttccctaatgcaattgcctgccggatatcatgctctacctgatcttcgggcagatttttaatacgcagttgcagcgttctgacaccggcttccagtaaccgctcaatccatctcagtgagtccaccacgggatataaccccaaccggtgttcggttggcgcaaaggaggctgtttcagggccaacggtttcagataaaattgcttcagactgatttgacatcgttgatatcctcagcccggtgatacagttcgctgccatgagtccgaaattcttcggacatctgttccatacccgattgttgttccagttttgcggcatagtcccgcacatcctgtgtaattttcattgagcagaattttggcccgcacatggagcagaaatgggcaactttaccggattcctgtggcaacgtttcatcgtgataagcgcgggcggtgtcaggatcaagtgccagattaaactggtcttcccagcggaattcaaaacgcgcctttgacatggcgttatcgcggatttgagcaccgggatggcctttcgctaaatctgccgcatgagctgcgattttgtacgtgatgagcccttgtttcacatcttctttgtttggcaggccaaggtgctctttaggtgtgacataacagagcatggcgcaaccgaaccagccaatcatggccgcaccaataccggaggtgaaatggtcataacccggtgcgatatcggttgtcagtggccctaatgtgtagaaaggcgcttcgtggcagtgttccagctcttccgtcatattgcggcggattaactgcatcggaatatgccccggtccttcgatcatcacctgaacatcatattcccaggcgattttggtcagttcacccagtgtatgcagttcggaaaactgtgcttcatcattggcatcctgaatggagccgggacgtaagccgtctcccagagaaagggaaacatcgtaggcggcacagatttcacaaatttcacggaaatgggtatagaggaagttttcctgatggtgggagagacaccatttcgccataatggagcccccacgggaaacaatgccagtcagtcgtttggcggtcatcgggacatagcgcagcaacacgccggcatgaatagtaaaataatcgactccctgttccgcctgttccagtaacgtatcacggaacatttcccacgtcaggttttccgcaatgccattgactttttccagcgcctgatagatggggactgtaccgattggcaccgggctattacgcagtatccattcacgggtttcgtggatatagcgcccggtggaaagatccattaccgtatctgcgccccagcgggtagaccagattagcttttcgacttcttcttcaatggacgaggttacggaagaattaccgatattggcattcactttcaccagaaagttgcgtccgataatcatcggttcggattctgggtggttaatgttggcaggaataatcgcacgacccgcagcgacttcctgacgaacaaattccggcgtaatgttttctggtaaattggcaccgaaactttgccccggatgctgctggagaagtacttcactgcggatacgttcccgccccatattttcccgcagagcgataaattccatctccggcgtgataatgcctttacgagcgtagtgtaactgggtaacgcgttcgcccactttcgctttcagagggtggggacaatggtgaaaacgcagatgatccagcccggcatccgctaggcgctgttgggtaaaatcagagctgagagttgtgacaggctctgtgtcattgcgctcttcaatccacggctggcggattttctgcaaacctgcgtgcacgtccagcacggcttcagggtcgccataagggccggaagtatcataaacaggtacgggttcattttcctcaaattgaggctcttcttttgtcccgccaatcagcgtaggagatacctgaatttcacgcataggaacctgaatatcctcgcgtgaaccttccagatagatacggcgtgaattggggaaagtgacaccctgaattgaattgatgaattcctgtgcagcatcccgttgggccttacgtggacgtgccggatgggctttaggcgcgatatccgttgtagggataatatttgtgctggaggtgacggtatcattagtaatagcattagacatagcaaattcctgactgtgtgatcgcctgtcatcaggcttaagttgagaaaattgcttgtctggagctcgcagggagtaatgatgattgctgaacggtgttatctggcagaagatctggacagaagcaataaagcatatcagcagagggattactcttgttcccttcgcgggtattagcccgatcaggttctgcggatcccgaataaacggtctcagcctgcgtccaccgtgatatacgctgaacgctaggcactccgacaagaaaacaccccagagtataaaggggattatggaaactgcaaccggaaaactgagccttttgtattggcccgatgtcaggtattaactctgtggcgctaacgcccagctcaattgcttccagccatgtttttctgctgctgactgcaatttcatatccggattcacggtaaatacttcactggcaaagaaacacatcggtaagtcgtttgctgagtctgtgtaaaaagagatatgttgtggcgataaattctgttctgccagccattgctgtaagcgggtaactttcccttcacggaaagtcgggataccgtcaatatcaccggtataacaaccctctttcatgaccatatcaatccccattgcggtatttacgccaaatgcagccgcgatttttttcaccacgaaagaaacagtagcagaaatgataatgacgggaatatcttgttggcggtaaatatctaattgtgttttcgcagcgggatagaagagaggcctgattgttgtttccacaaaatctgtcagccagatatcaacttgttcatggggtatttggcagagggcttgtaaactgactgacagatattcctgcatattcagtttccccgcactgtaatccgatatcattttctggtctgcttctataaagcgggggtcagtaatgatctgcttttcccataaataattcgtccagagtagactggaatccccacggatcagggtgtcgtccagatcaaatatggcaatttgctgtgacatagtcgctattcctcaaacccaaaatcgatagggttggttggctgaaagagaatcaagcatttagtgaacatccagaaacgtcgttaatataacagattgcaggcagaatacgataaagagggtggattgtaagcgaatggcgggcttactctgctgagtttctttcctgattatcatgtaagtaggtgtgatattttatcaaaaaatatattacgcattttatatttaatatatacattaatggttttaagaaatagccatattgactgagttaaaaatacacgataaagttattttgacttagattttccgtaaaatacgttatcacgaagtaacgtatcgttatgtaattacatgcccatgataaaagtttaacaatttaccagtgaaatggtgttttaaaaaataataatatttcatgttagaggaatggaataattataattaattaatgtggtaatgaaaatgttaactgaaaaatataataactgaagctgaaagttttaattgtaaattcaaatttactgatagatatgcttacttattggaaagtttgaaatatgatattttcatatccgatatttcaaaagtaaccaagaaatgatttctgaattacacaataaacactattacataataggtgatccggaatgctgttcacaaaaatatcttattccagctcaaatgaacattgtaattatcatcttgtttgagcaagggattgatcatgttaaattatttggaagtgattgaaaatgaataaacaggataatctagatgtcgcattttctggtaatataataagtaaagcagttatgttagcagaacatatgaatttatttgaccactttgataaaaatggccgaatagttgaatctgaacttagagaacattataagaaaaagccttcttatgttgatgctgtaattacgtctttaaaagacggtggtatattgactgttgtcgatggtatatgccaattacaaataagtattgaggagataaaaaagaaattacctattttcaaattatggttatatgcatatagagatttattatctaatcaagaagaaatatttgatgggaattacaatgttctcccttatgatggcgctagtgtagccaaatactcagccgagataggtgggtattttattgataaacatatggaaaagatttttagtcaacttgatattagtggcaccttgtgtgatatgggatgtggcgcaggtttgaggttgattaatatttgtcgccaatttggttttaatggtattggtatggatattaatgctaatgccattgagcttgcaaataaaaatctgagagaaacatattctggagcaagtgagataaaatttaaacaacaggatgttactataattagtgagattaacccatccgttgaagctatattatttactttctttacacatcatattgagccaaatgaaagattagaaaaactatttaatgattatcggaatttattccctaatctgaagtttattattttatttgatactgttactaatgagaaagggaatagcatcaataatattttcgctagagggtttgattatattcatcgactacaggggcttgtaccaagaactcgtgcagattatatggcaattttcgaaaggagttgcctaaatgtaatagaagaaatagtactggaggttgataatagctacgtttggctgtgtaaggtaaattgatatgaaaatactgagcctgggttgtggcacaacagggagtacttgtgcttatcatttacagccagtctcttgttagccaatagctattacaacgtcgttttgtattcatggcttattcctttcacatgggtcgccagacaatgataaacgccagtgccagtatgctggcgtaattttgtgctgattaatcgtattttccactcaatgacggtgatggtataaaccgttatcaatcttcttatccgattttcgcttgtttttccgataggaataaccagtgttgctctttcttgtttgactatttccctgaaacatttgctatcgtaatccttatctgcaatcacaaaaaccgaggttaactcaggtgtctttattaaactaaaattattcctattagtgaatgcaatgtgtcagggatggttatttgtaaaatgtcacctactaatgtgatcttatgaaatatataagaaatatcggtctctgatgaagtacatcgtcaggcattaataaatgtcaacgcatatcaggacgaggtctatgtcagaatgcgttcatatagatcctgtatatgaatgctggttaacatttaattaacactgacttggttaagatattcttaatgagcacagcatatgacacaacacatgatggaaccaatgatgcaaaaaaaactgacaggtatagaacgaggctggtggattgtcagtcttgaaaacagagtttggcttccgcagggagacttaccactgggaactgccgagagctggtcattgcagggccttgtcgcctacgctatcggcgagtggttgggagaagtagtgtggcttgtccgtcataagatggcatcagatatgtattctccccgccggattgcagagcaggaccctcaattatttcagctggtagggcgcggagtccagttggctgagttttaccgctcacatcgttactgtgggtattgcggtcatgaaatgcagcagactgagcacgagtgggcctgcctgtgtcaccattgcgatgaacgctattatccgcaaattgctccctgcattattgtcggtatccgccgtgaagatcacattctactggcacaacatcagcgccatcgcaatggtatgcatacggtgctggctgggtttgtggaagtgggggaaacactggaagagacagtacaccgcgaagtgatggaagagagtgggataaaaatccgtaacctgcggtatgttacttctcagccgtggccttttccgcattcactgatgatgggatttctggctgattatgagagtggagatattgagcacgaccccgttgagctaatcagtgcggattggtatcgatatgatgatcttcccctgatccccgggcctgatacgattgcccgtcgtctgattgaggaaacggtcgcactatgtcgtcagtattgatagtgaatacttaaaattcatgagagttacccggtgttttatatcaggtaactctcagcctttagctatacttggttatttttgttccgtaagaccccggtttttcagcatagattcagtacttggtggcttacctcgccagtctatatacagtttttccaaatctgtactattaccgcgtgacaatatcttatcgcggaagatctgaccattttctcttgtcagaccgccatgctcggtaaaccatgcaaacgcatcgtccgccagcatttctgtccacagataggcataataaccggcagcataaccaccgccccaaatgtgtttgaagtaactggaacggtagcgtggcggcacgtagttgagatggatcttatcttcttgcaaagatgcggcttcaaatttattcacgtcctgctgcggcttatctgcggccagcatatgccagtgcatatccagtagtgcggctgacagtaactcggtcatttgataacctttgttaaacttatccgcctgattgattttatccatcagtgcctgcggcatgacttcaccggtttggtaatgtctggcgtaattcgcaaataccttgggatcacgggcccagtattcattaatttgtgacgggaactccacaaagtcacgggcagtactggttcctgacagcgtcgggtattcctgatcggcaaacatgccgtgtaacgcatgtccaaattcatggaatattgtgatcacatcatcatacgataacaaagctggctggcccggagctggtttggtaaagttggcaacgttataaattaccggtttggttccgaagagtctggactgatcgacaaaattactcatccaggcgccaccggctttattgtcacgcttaaagtaatcggaatagaacaacgccagttgttgcccgtccttatcgaaaacttcatacacgtggacatcgggatgataaaccggaatgtctttgcgctctttaaaggtaatgccatatagcaggttggcggcgtagaacacgccgttattcaggacgttattcagttcgaaatagggcttaatctgggactcgtccaaatcataccttgccttgcgtacctgttcggcatagaacggccaatcccatgcttccactttgaagccgcctttttgctggtcaatcacggcctgaatatcttttgcttcacgttcagcgcgtgcagttgcagcagggacaatatcacgtaaaaacttcaatgcgacttccggtgtttttgccatctggctttgcagcttccatgatgcgtaatctttgaaacccagcagcttagcctgttcagcacggattttcgccaatcgggacagcgtttggcgggtgtcgttatcatcccctttttcagcccggttccacgatgcttcgaataacgctttacgtgtatcgcgatctttcagatcttgcagaaccggttgctgggtcgtgttctgtaatacgaacagccattgattatccagcttacgctcactggcagcctgtgcagccgcagccatttcgccatcggatagcccggccagcagagttttatccttaatcgtcagagcgccatctttggttgctgctaacaatttgttggtaaattgagtacgcagggttgccgcttcctgatttaatgctttcatttttattttgtcggcatcagataaattggcacccgctaattcgaattgcttataaatgacttctaccagacggagcgattctgagtccagattcagtgtttcacgctgctggtaaatggttttgatgcggttgaacagtttactgttcagcataatctcatcattcattgccgccagttttggtgacatttcttcactgagtttttgcagcccgtcagtcgtattggctgaggtcatcgcccaaaatacgtttgttacccgatccagcgtcgtgccggttttctccagtgcgataaaggtattttcaaagtcaggtggggcgggattattggcgatcttctccacttcttccagcttctgtttaatgccggctgtgattgcaggtgagtaatctgtttcttttattttatcaaacggaggagcctggaaggggagtacgctggtatagaagaaaggattattcttatcttgttgttggtcaactttatcggtcacacttacctcctttatctggccacctgatacgctagtgtggtcagagccccgtttattttcttcggcttgtgcctgagtgcttaatgctaagccaatagccagtactaaaatggataaacgcatcagtcgaaactcctccatgtaaactttataggttatttatcaataaaaatgactttataagagctttgagacagtcgattgactatggccgcttaacgaaagcccatgaacgaccgtcaattaactaacgtaaaccaattcatccaacgattaactgaaaagcgcgaacggtgaaggattatggcaatgtgagataccagattgccaacgcgctacatacctgtaacacaaggttaacataatgagagcaatagaccggagtgcctagctcttgttcctggttttgtgagcccatacataaatttttttcatcttaggttgttgattgatgaccgaacgtttatttattggcagtcacgacggaagttaggcttttgacgtgttatcatgcgggcgctttttgtcgataatcaagggagcctgtcatgaatgagttgaaaaacgaccgttatctgcgtgccttattacgtcagccagttgatatcactccggtatggatgatgcggcaggcaggacgatatttacctgaatataaagcaacacggcaggaggcgggggatttcatctcgttgtgcaaaaatactgaactggcctgtgaagtgactcttcagcctttgcgacgttttcctctggatgcggccattctgttttccgatattctgaccattcctgatgcaatgggattagggctgtattttgaagccggtgaaggcccgcgttttcagtcgccaatccttaaccatgccgatgtagcaaagttacctgttcctgatccggagatggagctgggttatgtcatggatgctgtccgtgcaatacgcaaggcactggcagggcaggttcctctgattggtttttccggcagcccgtggacactggcaacctatatggtcgaaggcggaagcagtaaggcgtttactaagattaaagccatgatgtatgctgagccgacgacacttcatctgttgctggataaattggctgatagcgttattctatatctgaatgctcagattaaagcaggcgcacaatctgtcatgattttcgatacgtggggcggtgttttgtcccagcgcgattatcaggagttttccctgcgatatatgcataagattgtcgatgggctgatccgcgagcatgaaggccgccgagtacctgtcaccctatttacaaaagggggagggcaatggcttgaggcgatggctgcaactggctgtgatgcgcttgggctggactggacaacgaatattgctgatgctcgtcgtcgtgtcggagataaagtcgccctacaggggaatatggacccatctatgctgtatgctcagccagcacggattgaacaggaagtttcgaccatcctgcaagactttggtacaggtaatgggcatgttttcaatctggggcatggtattcatcaggacgttccgccagagcatgcaggggcttttgtcgaagcagtgcaccgattatcagcgaaataccatcaataggttctatgtacaacactcaagcactacgtcaagagcagatagaaaaagcacagcaggtgattcgccatgatgtgcttccagcttcttttatcccggaattcattgcaggcgctgacgttgggtttgaagaaaacggcacgataacccgtgccgccatcgctgttttacattatcccactcttaagctggccgaataccaaatagcgagaatggcgactgtacttccctatattcccggtttactctcatttcgtgaatatccggcattgatcgcagcatggggtaagttaaacttacgtcctgatctggtgatggttgatggtcagggaatagctcacccaagacgtttcggcattgccagccattttggtttgctggtagatgttccgacaatcggggtagctaaaagtcgcctgtgtggtgaacatgctcctgtcggagaagtagtaggaaatcgtcagccactgatcgatcatggtgaacagataggtttggtctggcggagcaaaaaaaggtgtaatccactctatatttccattggtcataaggtcagtattgacagcgccattggttgggttgaacactgtatgaaaggatataggttacctgaaccgacccgttgggctgatggaatagcctcaaatagagcgttttttaggcaaacaatgcagaaaagtctttaattgaggcggaaatatgtggatattcttgattttcaggtaaacttcggcgcaaattaggcatcatgagtaacgactaatgttaagaaacccgattcacctgaggttggagaagcttgaaagttggcaacatctaacttttatggctagtcctttagagcgcac

SEQ ID NO: 424 - DNA, 24270 bp, Xenorhabdus sp.; identical to SEQ ID NO: 302
  CDS (9429)..(9977)

SEQ ID NO: 425 - DNA, 824 bp, Xenorhabdus sp.
  CDS (168)..(803)
gctctaaagttttactgcgtatcggtgttggtccacaacgaaagctcaatacaaattcatgaacatgctaccttatactgccggtgcgactgaaacaacattgtcgatgtttcactcctttggttacagactcattccccgcattcacaacctcgggagtcgcagacttgtacgtcattactccctctgaggagtacaggccacttgatgccctgattgcaggaagggctaggatggatgttatagagcaacactgggatgaggtgctgcggcttaaggcttcgatcggagcaggtctggtgccaccgtcggtgatactgaaaaagctggcggcttcccccagacaaaaccggctcaaccaggctctgcgtgaaatgggacgcattgaacgctctatttttatttgtgactggttgcttgatacccgcttacgtcgcagatcacatgccatcctcaacaaaggtgaaagccgtcatgctcttgcccgcgccatttttcttcaccaacttggcgaactccgtaacagggctgccgaggctatggcttacagggcatctggcctcaatcttgttgttaatgcaatagtcctgtggaacacggtctatctcagccgggctgttgattacgttcgcagccaggggatcatcataccggaagagttgttgtccagcgtggcgccgctcccttggggtcatatatcgctaaccggagattacctgtggaacgaaattgaccgcccccttgaacgatacaagccagttcgcactaagcgctttaatccaaagaacttcacttttccttagcgtgtgttattacagaaatga

SEQ ID NO: 426 - DNA, 2319 bp, Xenorhabdus sp.; identical to SEQ ID NO: 138
  CDS (3)..(809)

SEQ ID NO: 427 - DNA, 5466 bp, Xenorhabdus sp.
  CDS (1)..(1434)
ctttaccgtcatctggtagggctgccactgccctatttcaaacagcgtcagacagggcaaatcatcgcccgcgtcagagaaatggctcagatccgccagtttctgaccggttctaccctgatgttattgctcgacctgatcttcattgtgctgttccttggcgtcatgttccattactccagcctgctgacgtggattgtcaccggatcactggttctctatttcctgctctgggtaaccgtcggcccgattatccggcataaagtggaagccgaatatgaagcagatgctcaggcaaccagtttcctgactgaagcggttaccggtatcgaaaccatcaaaaccacagcaacagaaaagcgctttctgcaccagtggcaggccgtactcagccgacagttaattcagcgtttttccgcccagaaaagcgggcttgcggccgggcaagggatcgcacttatccagaaaattgtggccgcattattattgtggtggggtgtcaaaagtgtgctggccggagaactctctcccggagaactgattgcctttaatatgctggccgggcatgtcacccagccaatcctgcgtctggcacaggtatggcaggattttcagcataccctgatcgccctgagacgtgtcggcgatattcttgatgagccgatggaaaacagtaaacaaggattggtttcttcccctgaactggccggacaaattgaatttaaaaatattcgtttccgctatcatgaggatacccctgaagtactggcgaacctgtcgctatcaatcagtgcgggggaatttatcggtattaccgggccatccggctcaggaaaaagtactcttacccgtttattacagcgcctctatataccacaacatggtcaggttctggtggatggtatggatttggctattgcagatccggtatcgctgcgacgtaacatgagcgtggttttacaggaaagcatcctgttttctggcagcattgctgacaatatccgcctgtgtaaacccaatgccaccgatgaagaactgtatcgcgctgcggctctggctggagccatcgatttcatcaatcagtttccccataaatttgctcatccggtcggggaaaaaggcggtaatctgtccggcggccagcggcaacgtatcgctctggcaagagcattactgaatgatcccaagatcctgatcctggatgaagcaacctctgcactggattatgaatccgaagccgccattatgagtaatatggatgagatccgccagaacaggactatcatcagtattgcccaccggctgaatacgcttcgtcatgcagataaaatattcgtcttagatcagggaagaattattgaatccggttcacatgccgacctgttacaacaacatgggctttatgctcaactctggcatcagcaaactgagtgattattacggcagaaaattcattgaagatatagattgtttcatcttaaaattaatttcataacgaaattaacacagcattgtaaaatgttcttaaggaagagaatacgactatgaaacaaatctctatcacggccctggttttttcacattcatcagtcacatcggttactatgccgattgaaatactgactatcgccgccaatgctattggcggccccacccctcacgttaatgttatttccccctcccttaagaaaatggatgaaatccatgataggctgattgaatctatcccggtgtctcacagcagcctttatcaggttgagaatcccgatctcatcttgataggctcgctgggttttccaaaatggcagccagaacactgctcgccggaaataatagactggcttaaagcgatggatgaaaaacatattcctatcgtttccgtatgttctggcaccttcatgctggcaaaagccggtctactgaaaacaagtgcaaccattcatccccatttttctgctgaatttaaggcgttatttccccatattcccctgtatatggataaaaaaatcacttgtgacgataaccgtttttgtatttccagcgcttatggcaccgccagcgccatgatgaatatcgtcgagctactctatggtaaatctgccagagagcattgcgcacactttctgttcggggaaaacgaaaaccaaagttcgtatgattcagtcagctttgttccttaccgccagcattctgatctgctcattcacaagttacaggactggatgcactctttcccttctgagattttatccgtcgctgatttagccagtaaaattcacctttgtgaacggcagatgaaacgcagattcaaaattgccacagggcaaacccccatccagtatattcagaaaatacggttatcacaggccaaacactggctggaaaaatcacaaaaaaccattgaagagatcagccatgaagtgggttatgaagatacccgttatttcagggagttatttaaacgctgtaatggcctgacgcccaaagagtatagacagaagtatcatcatcataccggtcgattttcggttgagtgatttttaccactaagattataggaatacataagtaaatggatataattgatcatgtaagctgattagttacattatgttattacattgatatctgagtttcttgtactgtacactgggtgtgggaatcattttttgataaaaaaacatgaagaataaaaagaccatccccacacctcatgatgctgcgttcaaaggattcatggctcagattgaaaatgcccgtgatttttttgacatccatctaccggaaaaaattaagaagctatgcgattttaatacgttaaagctgactaactcttcatttattgatcgtcagttacggtcaaaaatgtctgatgtgctttattcagtgaaaactcaacagggtgacggttatctctatgtattggttgaacaccagtccacaccggataaaatgatggcatggcgcatgatgcactacgcttttatggcgatgaatcagcacttgcagcagggaaataaggaattaccactggtggtgccggttttgttttatcatggcgataccagtccttatccgttccagaaagtctggacacagtgcttttcattgccggaattggctaatgagatgtatttcaatccatttccgctagtagatgtgacggtgattgatgataacgaattggtcaatcatcgcaaaatcgccgtgatggaactggcaatgaaacataagaatttgcgggaaagggttgaagctgtgaccacgttattggcacaggctcttaagtacaattataatagtgacaatgatgtcgttactattcttaactacctgtttgtcacgctggattcgccacattttgaacaggtgcttcaacaactgattgaacaggcagacagccatcaggaggcaattgtgaatattgcacagcgattgcaggaaaaaggccgggaagaaggtatacaacaaggtatggtgcaaggcatacaacaaggtatagagcaaggcattcagcaaggtgaaaaacaagcttcaattaacattgcccgaaacctcttaaaaaacggtgccagtattgaactggttatgaaaagtactggtctcagccgcgaagaacttctgtccttacaataaccctgcttctcttttgttctcttatctgtttttggcgctggtaagagaacaaaaatgtcaatcccatacataatttatagttaatttcgtacaaagcaattcagagtagaatgtggttaaaatgtttgcgctcgatttttagatagactaatctatctaaaaatataggcgctaatttaggcattctgctcattagtaaggacgataaatggcaagaaatttgttaccctttcttggcttttgtttttctattctcattttcaatacaaacgcccagacatccacggaacagatgtatgtttcaactacaacaatccaatctgttccctttgttcccaccgttaatatattagggtctatcgtcgccaaaaatgaggttgtcatcagccctacactgactcaacttatcattacgcatgttttggtcgaagaaggtgatcatgtcaaacaaggggatgttctggctatgctggaaacacccattcaggatgaaaaagtcaagcaggccagcgcaaaactcgaacaatctctgtccctgataaaacagaacgaagctgtaaacgataaggcacaatctgaactgaggcgagtaaaaccgctgatcagcacaggcgtaatttcagccagtgaatttgaaaaatataaaatggaagcaaactccgcactggccgccctgaatgcagcaaaagctgagtatcgccagttacaggctctattgcaggaagaaaaaagccagcgggccaaaacaacgatccttgcccctaatgatggggttatcagtgaacgcgtcgctacagtggggatgaccactgataataattacctgtttaaacttatcgctgataaccagtacgaattttctgctgaagcctatatcactgaattaaagcagatccgggtcggtttcccctcaacaataacgctcactgaaggtgaaaaaataacgggtaaagtcaggtatatttcgcccaaaattaatcctgtcactcagataggaactatcaggatcgctcttgaaaatgttcccgcagatatcagaccaggtgatttcggttatgctttttttcagtttaagcctgaaaatattaatgccattccttatagtgcggtcaatattaccaacggaaataaagccagtgcctttattgttggtaaaaaaaatgtggtcgaaaagaaacaacttaatataggacgtatttttggtaattgggtggaaataaaatcaggattatcagcaaacgataaagttgttatttctgcatctccattcttacaggagatggataccgtttctattaagccacagggaaaataaaatgaagtttcaattatcagaatgggccatcagaaagccaattcccactattgttattttcctggctctgacaattgccggattattctctttttctgagttacccattaatgccaatccggtgattaatttcccgatagtgacggtcactgctgcacaaaatggggcttccccttccgaaatggagaatgccgttaccaaacctatcgaacgggcagtttctggtttacccgggatccggcatattaactcaactattactgatggtgtctctattactattgttgaatttaatttgaccgttgatcccaatgtcgctgttaatgatattcgggaacaaatcactcaaatacgggcagaattaccacaaactatagatgagcctctgataaaccgtattgatgtagagggaggatctattctgaattacgttgttcagtcaaaggataaaagtctgactgaattatcctggtttgtggatgacaaattaagtaagcatttagagcacatggtcc

SEQ ID NO: 428 - DNA, 10384 bp, Xenorhabdus sp.
  CDS (2)..(4801)
ctttaaaagaacacccacatcgggagtaggatttttatatgaacaataccaaattaccaaaaagctggaagcacaagcaaaaggtgcacccgtcaatatccccttagctagccgccgcccagatatttctgagactattatcgataatgatgcctattccaaagaagtacccgttcttaaattgaacaacgaagtgcttaaggccactatccagaaatatatcaatgaaactaaacctgttggcactactgttgatgatgtattggctgaaacctattacccgttcggtttaccttatgagcgttaccagcatcaaattaattatgtcctggataagaagcgtgaaacacatacagataaatcattaactgaaaaaaatgagtcactgggcgatattatccgcacttgtgatattgcttacccttggtttaagcaaccgggtttacattccgataaaaccaatgatgctcagatgctggatacctttatggggccggcacaagcagaattgttgctggaaaaaccgttctttcccacttcacaaaaatccgttcttaatgaatatatcgccagtcctcgtaccgcccttattagcaaaaccagcgatcggcagaaagatttttataaaaaatgctatggagtagagacctcagcagacttagtgaacacaaaagatttttgcattaaggtgggaattagccacgcagaacttgaatcgctattatcgattgaaaacttcatgccggtacgttctgattatgtgagtaataatgttgccgcacctgcctcacccactgtttttggttccgtttttatcaatgccggtaacagtgactttataactattgaaaccgtcactagtggtacgggtgatgacaagagtacccatcacattttaacccatgtgactgatgacagttttgacagaatgcagcgtattattcgtctcagtcgttggttaaatctaagctttgaggaagtcgatcagttgctgatggcgttattacgcgccgaaaaccccaccgaacagaatattgctctactgtggccgacacataataccttgcgagggctggggttgttccagcgtttcaagaaaaaatacgatttatccgcagcgaaatttgccgccatcattgatactgtttccgtctatgcccgtggtgacagtacttctcaattggatacattatttagtcttgaaaatcaatttgataagcaatacattattgataatagtgaattctatatcgttggccgtacagagactgagcaaaagaaaattgcattgctgtgcgctgccctgggaattgataacgatacctttatttttatcggcaggttgattgccaaaacgttaaattcatcaaatgctcaggcagatgacttcattccggaaaaactaacctggtctattgaggtgatttcagccttttatcgcgttgttacgttttcacgttgtgttggcgtggagccggtaactgctctggctctgctgagtattatcaatgatggcggacagcaattcctgaccaaactctgtcgggtagaagtaagcggcaatcaatatagctctgtgactgacacattcaatattctggacaacttagccgatgccattgaatggtgccagtctaatcaaatagatattccctggctttatcatgtcttgttgcctgtcagtaaaatgccggtggcgaccgatcgggaacttaacttagttaaggaaatgaatgccaaagtcaacccgacgttgatcacggagaaatctttctctgatggtggcgttttaccccctgaaggtagtaatggcggtactaaaacctggatgcaaactctgtctgattttattgatgatgggagtagtaaagggaatattccgggaatatcagggttggttaaagatttgggctacacggatcccctctcttatcaaagcatgttagcaacagaactggccaaaaaagtcagtgaagaagataaaacgcgtgatccggatattatctataaactctcaaccatcatcatgtcagcgaaagcgaatcaggaagcgctagtttgggaaacgttctctaacactttcagcctggacgcggatcaggccagagaggttttgttctggtccgatggtaatttctatcaggtattgaaacatgtgatccgtattgcctcttcatcggaagcccgtatcagtatcgtggaaggcgatgcgttcttaagtctggtaaacagaataagtaaacgggctgagatttgtcaggcttttaatttaagtgcgggttttctacaaagtttcctcaagtatccgcagcgttatctgtttaagcagtatgaattaagtaatcctaatgcgttccgtgccaaagacaatgtggtcgaagaactggattttattaccctctattcactggcctgttatgcaaccacattgaaagcgctggggcgtgaggaaacgttaatccttaactatttgcagcttgcttcagccattcctgacttgaacgaattgtcagaatctgaattacagctataccgtgaagattgtgcgctaaaagtttcagaatttaccgattttgcggtgaaagaaattatcgatctgtttgactcactttatcagatgaatgggactatcgtgacaacgatggagcaactggcttttatgatccgtctgcgggaggctaagatcaatattaaggtgggagttagtgaacttattgccctctcgcatctgacgatatttagcgacaaaatgtcctaccgtgaagccgccgaagcggctctgagcagtcttggtacaacaggtaatgaaaccacggcaatatctcaattgggtgagttgggacaaactgatacctcgtttattactgtcgataaagaggcattggtggcaattgacaagagcaagtatccaaacgcgctggagcaagtcgccgtatttaccgcaaaattgcttgatccgtatggcaatccacgtgctggtatccaaatccgttggcaaacaacattagggacactgcgcgcagccactacaaggacagatgaaaacggggtgagtcaggtttctttgttgggaggaagtttgataggtgaagccaaagtcacggcgatctatagtctggagcgggaacttgttgcaccgccagttatgttgacttatgaccaaaataatctagttatgtccgcagtaggcgatattgttggccgtcagataaaagcgaatgggaaagataaagcactgtttactgtttcgcttaaagatatttatggcaacgtaacactggatgaaaaagtttcatggaataccgataagggcaggttaacacagcaactaacatccattaatgagaagggagaatcgtccgtttatttaacagcaaataatgttattggtaatgctaaaattgtctgtgaagcgcttaatgaaaaagttagtttttatccggtactcattaatgatgtgccttatgttgaatacgtaaaagtacttgctgttgataatttaacaccgggttactttattcttgaaaaagaatatccagtggaatgtcgtttattgagagtgaatggagaacctttagttaatgaacccgtagagttcggatttttggatgaagaaagcggaatatttaatcctgttactggtagaacagataaagagggtaagtttagcagcagccttacttttacgaaagtgggttcatgtgtaatcacagtgaaaggagaagatactgaattaaaacaatcagagtctgtcaatgtgatcccacccgttaaaattgttgagcaaagccagtcatctgaagcaatatatacaccagatcaaagcagtgtagattgtagcgttactatagagcccaaagttgcaaactatcctattcaatggctagctaataatattccaattatgacaacagtaaccgattcagatggtactgctaaatttacttttactccggctgattatggcaaacatcaattacaagctaagacacaggatgatgatgctgttattttcaccatcaaaaaagaacgtcgctatgtggtagaaatgtttacaacagatgaagaagcacagcaagatattcctgatacattaagaacaaaaatttacgacaataatacgggggagtattttgataaattctttattaatttcaaatcaaatcctatggtcggtttacaattccatgacaaattaaaaggtgatgttaataatctttcttatatagtcataagttgtttattagattcgactccagctgaacaatttaacattaacataccacaaaaatattatgattcttatcaagatattgacgataatgggaaaggaagcatttctatagacgttaaaaatgtcgattggaaaaatgttaatacaaaaaatattacgttgagccttcaactccaaaatggagagattattacagaaacattctctgtagctatatttattaatcttaagggcgtctatgagaatgtatacattcatgcctatagtcgttatccatttactcaagaggaatggaggtgcaatgatgactattgggataatatggttaaaattggaacaatgagagtacccgtttcaggccctccaacttctgagcgttatggaaatttatcttactatggagggggtggctggcctgctagcgaatttaaaatcttggctcaaggatttggttgggaattaaaaataggggggcttaaaaatcttggtccagatgaatattgccattcagcactttatacaaaaatagctctaactgacccgtctacaattcctattgagaactaataataaaataaattattaactatgtttgcaggcagagtcaaacactgtctgcgagcaacatactagcaaagaattttaataataaggtagagactatgccaaatagcctttccgtaatcaaacaacttgatgaaagttaccgcgatgccttgctggactacaaccttgggcaagtattctctaatgataaaaaacttaaaatatttaacatcgataccgttgatgagctttatgaatatctgctggttgacccaaaaatgaatgtggaatttaaaaccacgcgtgtcgcccatttgataagcagcctgcttcagcgcaatcatgctgtctataatggtatggagccgggtttttcgaataatttttctaaacaagaacttgaacaatggaataatatctccagtgatatgtcaatctgggcatcgaataaactgttacaaaactacccggaaaattatatcgatccgaatcttcgtctgaataaaacccatctattttcaaattttgttaatgaaatcaatcaaaaccgtatttctgaagaaagtgtaaaaaaatcggtgatgagttaccttagccagatggaagaattatgtaatatttctaccgtctccagctatatggacaatgcgacagtaacggatgccaatttctggtttttaggccaaaatccgctgacacctaatgatctctattggcgtaaagccgataatattatctacgagcaggataaaaataattgggcaaccaacccggctggttggagtgaatggaaaaaaatcaatctcgccgcccaaagtatattttgttctcgtctggcttattttaataaccggctttatttgttctatttttccagtacgccagaacaatctgatagccaagagataaaaaataagcgttatactacccgtctggaaaccgtttatctggggctcaatgaccaatggtctgaaccgaccgtattgaaaacttacacaggcatggaggttcccaatgggaattatgaacaatccggtattgtacttcggggacgttatgataaagacagaagcagcgaagtcctggatgttatttataaaatagaaaaaaatgacattcaggcattatcactcaacggatggatggggtctaaagcgattagtgatctgtcgaacaatcctttatataaagatatttatggtttaatgagttcacgtaaattacagctatatggctttatttatgaagcgacagacaaaaatatgtttaatctgagcattataccgcttcctgatgacccatggagtaataacgaaaattataaatgccgggccagattatatgaccctaagttggaatttaaaaaagaaaaagtatccggaaatgatgcctatgtcccttatgtctctgtgagtacagattatgaggatgatttcagttatcgtgctgcgaaagaaatgcactatcaagccaatccctggttgtctatttttggtgtcatgcgggttgatttatgttttcagcgcagaacacaggatggccgttatatcgctgatattacgccatactctatttggggaataatcccctttgatataaaaatcattgttaataataaggttatttttgataatgaaaatctattattagttaatggttctagatacgctcttgaaaatacagatgcagtgaatgaggctggaaaatatttaagcaatctgggtacaaatatccctgccggagcaatccaaatctctttgtcagaaatagtttctgattttgtgttgacatcctttattcctgaaacggtatatcaggacgccacggtagtgagttatttttttcccagtgaatcgggtgctgacagaacgaatcagaagaaaaaaatgggtacgataacggcaagagggcgacatgaattcagctctccatttactttttctttacgtaaaaagaaaggggatggtgatcttctcccaatcattggccgttatcatatggaatcttatgttacccccgggcgagattatgacgccggaaatggcaatacgcccttgccaagcaaaccaaatcattacgcttttcagttagaaattacgcaggctcaggctttgcagctaccggatattgaatatgcagccgatggtggtcaatatcttgcccttagtgcagagggtaatcatggtcttacccatattcgtctgaataccgtatttgcttcagaactttattcccgtgcttccatctcattggagaatttgttcagttgggcggcgcaaaatatactggaagcgattccacccgcagcgtcaaatctgccaaaaacgcttgattttcatggtgctaatggccgctatttctgggaaattttcttccatattcctcatgctgtggccaaccgtctgcatcaagagttcaactaccgtgatgcggaaaactggtatcactacatctttaatccacagatccgggtgcatgaaggcgaagataacgctaacaaaacgccatactggcgagtacgtccgttgctggaacccggcagttatgcctgggagcaggaaacacggcgcgtggccgatcccaatgctatctgctattccacaccggaacgctataaaaaagcgatatttatggagtatgcccgcaacattctggcgcagggagatgcactgtaccgacgtctgacgcgtgacgcgctgacggaagcacgggtacattattcccgtgttgcctcattactgggacctcgtcccgatgtgctggtcgcctcgcgttggacgccgaacactctggaaacgttgtcaacggatgcaactgtactggatggctcgctggaacgctttttaccggagatgttgccggagatgaacaaagtgcgaaatgggcactggaaagcactgaatgatcccaaagcctttcgcacaccagtcaatccagacttgataacactgtgggatacgttgcaacagcgtttggacaccttgcacaacaatctgaccatcgatggcaaaccgatgttgcttgagatgtatgcagccccggtaaacccacgtgacctgctacgagcacaaaatagtgcttcaggcctgtcacagcgagctgtcagcgcattggcgccgatattgccgtatcgcttccgtgccctgttaccacgggtacagagcgcggtggagacattgacccgctttggtgatctggtcaggcagtaccgtgaacagaaagaacgggcattgcaggaagaactggttcagtcgcagatggatgaattgtcggcctttgcggtacaactacaagaagcggcattggagcaacagcaggcggctatagatgctttggccgaaagccagaaatcggtgcaacaacgccaaaaatactatgcggcactgtatgacgaaaatatttcagcggctgaatctcagtctatggatcttttgaccgaatcttcaacacatgaaatcgcggcatcctcttttgacaccatcggagccgttgccgatttagcacctaatgtatttggctttgccacgggaggaatgaattttggtgccccgctccgggcgacggccagtggcttgcgtgcgaagagtatttcgttgcaaatgagtgcggacagactctcccaaagcgaacaataccggcgccgtcgtgaagaatggcggtttatgcgtgatcagtcatcagcagaaatagagagcattcaaaagcaaattgatgccggcaaactcgccaaggaaatgattcaaatacagatgaatcaggcccagaaagcgcaggagcacgctaaaacgcattatcagttcctgttaacacgtaccacaggatcaggtttatatcagtggttggttagccagatgtcgaccttctattttcaggcctatgatgtcgtcacctcattgtgtctgtgcgcagaagcgtgctggcagtatgaaatgggcgattatgacacccgttttattcaacccaacgtctggttggataactactttggtctgacagcgggtgaagccctgaaactgcaattacttaacatggaaagcgctcatctgaaacgtcacgaacggcgtctggaaattgtgaaaaccgtctcattaaaacaactcctcaaaaatgcgactaagaacaatctcagcagttgggacaaaatgcttgaaagtggtcagttagattttgaactgaacgcctctctgtttgaccatgattacccaggccactacctgcgacagattgtcaatgtttctgtcacaatgccaggattgattagcccttatcaaaatgtgaaggcaatgctgacacaggtgactagccatactctgcttaaaccggatgtatccgcgctcgattacctttataggctgacgacagctaaaccgaccagtttactttctaatccacgcgtcagtcagagtatcgccttatcttctggtttcgacgatcacggtcaatttatgctggattttggtgacgagcgttacctgccctttgaaggaaccggggctatgtctcagtggcgattaagcttcccattacacgatcaggaagagcaacaaacatttctgaattcgctggacgatatcatcattcaccttagatatacggcccttcagggaaacagctcttttacccaagcgattaatcaacgtctggatgctcaggaaaaagagattttctctgatgaaacagaagaagccgaggcaaggtaaaaatgctatttggccagaaaggtgtcctgataaacatattcttataagtaggtaaacaatgtctgagacttttattaacacactggaggagagttaccgcgatggtttgctggcatattgcctcggccaggtttttcctcacacaggatctttgcaaaaattcaacattaataccgtcgaagaactttacgattatctgctcattgacccattgatgaatgcggatgcgaagacaaccgttattgcacacagaatcagcagccttcttcagctcaatcatgcaatctataataatatggaaccgggttataccaacgggtttaataagaaagagctgaatcagtggcagtatattgacagtgatatgtcggtttggggagccaataaactgcttcttaattatgccgagaattatatcgatccagagctacgtttaaataagacagaagcatttgctgattttttatcagaaatcaaacaaaaccgtatctcaacacagagtgttcaacgtgcagttcagaactatctcaataaactggaaaagctctgtaatatttcaacaatagcaggatatttatacggaaatacggttactgatggcaaacttgtttttcttgggcaatcgcgtttgcagcccgatcgtttttattggcgtgctgcggaaaatattattcaggatatggatggcaggatctcactctctcctgccgcttggggggagtggcaagagattcaattttcaacaggtgaaattatcaatcctaaaatcatttggtttaatcatcgtattcatgttgtctatttcaccaaaaaattagagcaatcaacagacagtacagagccatctgatgcaacaagtacatatcaacttgaggttatttatcagaaattgctgtagagcaca

SEQ ID NO: 429 - DNA, 10384 bp, Xenorhabdus sp.; identical to SEQ ID NO: 428
  CDS (4897)..(9480)

SEQ ID NO: 430 - DNA, 13731 bp, Xenorhabdus sp.
  CDS (1)..(2928)
gttatttatcaaaaattggataaaacctggtctacaccaatagtgctaaaaactttatctgatagacctaataccgagcttgaattaaatgccattgtgctttttggcaataaaaataaacagggtaaagatgactcaattgaagtgatatatgaattaaatatatcaactcaaaaagtaagaaagaaattactacttaatgcgaaattagcctttcttcaagaagaaaaaagcttaaatggaacagaagaagaaaaatatgcaaaattttataaatctaagataaatgtttgtaactcagcatataacagggccccaaattcgatattccccaatattatccaggaaaacggcggggaatatctcgctctgcaagatcaaaagttacctgaccttactcatatccgccttaataccacttttgcagctcaacttgttgcccgtgcttctttatctttggacaatttattgagttgggaagcacaaaatacacgtgaagtagcgcctccatcgaatgctgtaggtgttccgaatacactggattttcatggcgccaatggccgctatttctgggaaatcttcttccatattcctcatgccgtagccaaccgtctgcatcaagagtttagttatcgtgatgcggaaaactggtatcactacatctttaatccacaaatccgtgtgcatgaaggcgaagataatgccaacaaaacaccttattggcgggtatgtcctctgctggagcccggcagttatgtctgggagcaggaagcagggcgtgtggctgatccggatgctatctgctattcaacgccggaacgttacaagaaagcgatattcatggaatatgcccgcaacattctggcgcagggagatgcattgtaccgccgcctgacgcgggatgcactgacggaggcacggatacactattcacgcgttacagcattactggggcctcgtccagatgtgctggttgcctcgcgttggacaccgaagaccttggaagcgttgtcgactgacgcaaccatattggatggatcgctggcgcgttttttaccggaaatgttgccagaagtgagcaaagtgcgaaatgaacactggaaggtactggatgatcccaaagcctttcgcgccccggtcaatccagacttgatagcactgtgggatacgttgcaacagcgtttggacacattgcacaacaatctgacaatcgatggcaaaccgatgttgcttgagatgtatgcggcaccggtgaacccacgtgacttgctacgagcgcaaagcagtgcttcaggcctgtcacagcgagccgtcagtgcattagcaccgatattgccgtatcgcttccgtgccctgttaccacgggtacagagcgcggtggaaacactgacgcgctttggtgatctggtcaggcaataccgtgaacagaaggaacaggcattacaggaagaactagttcagtcgcagatggatgaactgtcggcctttgcggtacagctacaggaaatcgcgttggaacaacagcaagctactattgatacgttgatttcaagtaaaaaagtcgtcaccgagcggcaagcgtattaccgcaagctcaaggatgatgacatttcttccgcagaaagagactcaatggataagcgtaaggaaactatcccttatgaacaagcttcatcgggaatggaatctgcggcatcgattgccgatctcgtgccaaatctattcggtacgagcgtaggaggctcggtttggggaggacctgccagagcactcggctgggcgcagcgtatttccgctagcggaaaaagagtgatgtcttatgtgacttcagaaagtgagcagtaccgacggcgccgtgaagagtggcaatttcagtatgatcaatcggttgcggaaagtgagatgcttgatgaacaaattaaaagcgcccaaaacgcaaaacgcatggttcaagtgcaacttgatcaagttcgtaaagaacaagaacacgccaaagtgcgttatcaacttttgctgacacgtaccacgggttcggcattgtatcaatggttgatcagtcagatgtcgaccttctattttcaggcctatgatgcagtcacttccctgtgtctgagtgttgaagcgtgctggcggtatgaaatgggcgactatgaggctcgctttattcagcctaatgtgtggttcgataactattttggcctgacagcaggtgaggcgttgaagctacaactattaaacatggaaagtacatatttaaaacgccacgaccgacgtctggaaattgtgaaaacagtctcattgaagcagtggatggaaaacacgattgattctctgacatgggatgaagtcgtggaaaaaatcagagaaacgggacaatttgatttcagtttgtcacccttagattttgatcgtgactatcccggacattacctgcgtcagattatcaacatatcgattaatatgcctctgttacttggcccctatgaagaaataaaggcaacactgactcagacatcaagtgaaaccctcctcagccctgatatggccgctctgaagtattactatccggagcaagacggagatatccccattaagccagccagtattctttccaatcctcgtgttagccaatgtatcgttatttctaatcaggagaataaaactggggtgttatacaccaatataaatgacgaacgttacctgccttttgaaggaaccggagcgatatcgtcttggcgtctggattttcctcgcgcagataaatctcaacaatctaggctcattaatgcactgaaagacattgtcatagagtttcgttataccgctcagactggtaatacagcatttactaatgaggtgtctggtttggttagagaaagtaataaacgcttgcgtcaacataagtggcaaggatctgatctcatgtaatttctgcatattcctcacgattaactcatacattataaatacaggctccgtgtggaggagcctgcatggagctttatatgcaaaatagtcaagatattacgataacagcaccgtcactgcccaaaggcggcgggacactccggggaatgggggaaacctttaccgggggcggtcccgacggaatggcctcactgtcattaccgctgccgatttccagcgggcgcggcactgcacctgccttgtccctcacctacagcagtggcagcggtaatggcgcttttggcatggggtggcagtctgcgcccatggctgtcagcctgcggactgcacagggcgtgccccattatgagggcaacgatacctttttatgcccgatgggtgaggtgatgaatgttgccccaaatgaacggggcgagccggatatccgtaccacaaaccaattgcagggtatcacgttaggtgagagctggcaggtgacccgttatcagccccgtctcgttcaggatttcagctggctggaatactggcagccggaacagggtaatacgcaaaaacctttttggataatgttcagtcccaatggtcaagtgcatctctttgggaaaaacgcccacgcccgggtggctaatccggcggatgataacaagatcgcccagtggctactcgaagaaactgtgacacccaccggtgagcatatttactaccaataccgtgccgaagatgacgccggctgcgatgaacatgaaaaagaacaacacccgttatccggtgcacaacgctacttgatgcaggttcactacggtaatatcacgccacaggcaagcctgtttgccctggataaggcgctgcctgccaatgaccaatggctgttccatctggtgtttgattacggcgaacgggcaggctcgctgtatgaagtgcctgcgtttcaggcaggatcggcaagctggacggctcgccccgattgtttctcccgttttgaatacggctttgaaatccgtacccgccgtttgtgccaacaggtactgatgttccatcgcctgaatgcgctggcaggtaaaactgaggccagcgaagtgcctgccttagtctcacgtctgatgctgagttacgatttcaatcacagtatcagtaccctggtttctgcccgtcaggtagcgcacgagaatgacggaacacccgtcaccctgccgccgctggagctggattatcaacggctggatacggcatcgttgccggcctggcagcccatgccacagttggacaagtttaatcacttacagccatatcagttcgtggacctgtatggcgaaggtttgccgggcatcctttaccaagatgctccccacgcgtggtggtatcgttctcccgtacgtgacacccaggtggaagaacccgataccgtggcctatggtgaaataaagccactgccgcagatccccgcccagcaaaataatgcctcactgatggacctcaacggggatggcaagctggattgggtcgtgacctctgccggagtcaatggctatcacacactggcacccgatggacagtggtctccttttatcccgctatccgctttgccggtcgaatattttcacccacaggcacaattggccgacctgaccggcgcggggctggccgatttggtcatgattgggccacgcagtgtacgcctgtatgctaatcaaccaacgggctggaaaaaaagcaacaccgttatccagtccgacgggatgacattaccgatccccggcgcggatgcacgaaaactggtggcctttgccgatatgctgggttccggtcagcaacatctggcagaaattgcggctgacggcgtaacatgctggcctaatttgggacacggccgttttggacaacctatcaggctggccggattgacggtttcagccaaaaactttaatcccgatcaggtgtatttggccgatatagatggttccggcacgaccgatattctctatgtccacagcacctatctggagctgtttatcaatgaaagcggcaatcaatttgcggcgccggtgcgcatcaatctgcctgagaatgtccggtttgaccggacgtgccagttacatattgctgatacgcaggggttgggcgtatccagcattattctgacggttccccatatgactgtgcagcactggcggttggatatgactgaatacaaacccgggttactgaatattatcaacaacaatatgggcgcggagaccaccctgttttaccgcagttcagcgcagttctggctggatgaaaaacaccaggccgaaagcgcggggcgtgctgtgaccagttatctgccctttcccatccacgtgttgtggcgcactgaagtacgggatgaaatcacgggtaaccggctgacgtcagagcaggattatgcccatggtgcctgggatggcagggagcgtgagttccggggatttggccgggtcagacagaaagataccgataagctggcccaggcaacccattcgtcagtcaccgatcccctgtcgcccgctatcacgatcagctggtttgccacgggagttcccgccgttgataccctgttggcaaatgaattctggcacggggacaaacaggctttcccgccctttacctgccgttttacgcattttgaccctgataaagaacaggatgtcacactcgttccttcaacagaggaagcttactggctgcaccgggcattaaaaggccaaccgttacacagtgaagtctatggtgacgacggcactgcacaagctagcattccgtatactgtcatggacagccggccccaggtcaggctgattgcggggttgcccggttattcacccgccgcctggaccagtgtgattgagcaaagaacctggcaatatgaacgtgttgccgaagatccccaatgtcaccagcaggtggtcctgaacagtgaccgctacggtttcccacgggagaccgtcgagattgcgtatccccgtcgtcctaagcccgctgtctcgccttacccggatacgctgccggaaacattatttgacagcagctatgatgatcagcaacagcaattgcggcttacccggcaacggcaacgttaccatcatctgacggacacggaatatcagggactggggttgactgatgttgtacgaagcgatgcctgggcctacccggcagaacgggtaccccgtgaaggttttacagtagagaacttgctggccgcaaacagtctgatagcgccggggacgcccctgacctatttggggcatcaacgcgtggcctatatcggccccggagaaaacccgacccgacaggcattggtggcttataccgaaaccgcggtttttgatgagctggcgttgcaggcctttaatggcacattagcccctgaagccttggaaaaaaaattaattgaggcaggctatttgtgtgttccacgcccgttcaataccggggcggaatcggcggtttgggtcgcccgtcagggctataccgattacggcggggcagaggcgttttaccgtccgttggcccagcgtgctacggtgcaggttggaaaaaacgtcattcattgggatacccattactgtgccgtcattcgcatgcaggatgctgccggcctatacacaaatgccacctatgattaccgcttcctgacccccgttcagataacggatgcgaatgacaaccaacaacacatcaccctgaatgcgctggggcaggtatcatccagccggttctgggggacagaggcaggcaccccgcagggttacaccccgcctgaaaagcgcccatttacaccaccaacctcagtggaggaggcactcggattaaacccccatctgccgatcgctaactgcatcgtctatgcgccgctgagttggatgccgttggcgcacacctatcaggaatatatagccggctttacgaggcaggcactgcttgacgcgggagtagtgacggaagataaacgggtttgtgcgctgggtttccgtcgctgggtacaacgtcagggcattgtgctgaatgggcaggcattggccgattcacgggaacccgtccatgtcctgacgctggccactgatcgttatgacacctatcctgagcaacaactgcgtaagagcgtcacttacagcgacggctttggccgtttactgcaaagtgcggtataccatgcgccgggagaagcctggcaacgcgccgcagacggcagcctgatgacggacgagacaggaaaacctatagttgcccatacaacaacccgctgggcggtctcgggccggactgaatatgacggtaaaggacaacctgtcggaacctaccagccctttttcctggatgcctggcagtacctccgcgatgacagtgcccggcaggatttgtatgccgatacataccgttatgatcccctcggccgggaataccaggtaagaaccgccaaaggctatttacgtcaaaaccagctgacgccctggtttgtcgtgaatgaagatgaaaacgacaccggctctcagctcacacaataacgtcaaataatcacaccttcccccagagacgggggaaggttaacgaccctataaaggcaatggcttatgactttaaacagaggcaataacctgcatcaaaacacgccggaggtggctgttctggataaccggtggctgaccatccgtgagctccgttatcaccgccacccggatacccccaccaaaactgatgaacggatcacccgccatcggtttacgctcgcgggtcaactggcgcacagtattgatccgcgtctgtttgacttacaacaaacggataatacggtcaatcctaacatagtctatgagacggcactgacaggcgaagcagtgcgcataaggagtgtcgatgcgggtaataccctgatgctgaatgatattacggggcgccccgtactggccatcaatgcaaccggggtcacccgtacatggcagtatgagcatgaaaccttacccggacgcccgctcagtatcaccgaacagcctgctggcgaaacggcccgtatcacagagcgttttgtctgggctgggaacagtcaggcagagaagaacaacaacctggccggagagtgcgtgcgtcactatgacaccgccggactaaaccagacggacagtattgcgcttaacggcgtaccgctgtccgttacgcgccggctgctgccggacgggacggacgcagactggcagggaggcaatgaatccgcctggaacgaccggctggtgccggaaagcttcaccaccctgagcacggtggatgccacgggcgcattactgacctgcacagatgcgatgggtaacgtacaacggctggcgtacgacgtagcaggcctgctgaccggtagctggctgcggctggcgggcgggacagagcaggtcatcgtgaagtccctgacgtattccgctgcgggtcagaagctacgcgaagagcacggtaacggcgtggtgaccacctacacctacgaaccggagactcagcgccttgtcggcataaaaaccgaacgcccacagggacatgctcaggggacgaaggtgttgcaggacctgcgctatgagtatgacccggtggggaacgtactgcgtattaccaacgatgccgagacaacccgtttctggcgcaaccagaaagtcgtgccggagaacacctatatctatgacagtctgtaccagctggtcagtgccaccgggcgagaaatggcaaataccggtcggcagggtagcagcctgatttccgtcaccgttccgcttcccgcagacagcaccgcatacaccaactacacccgcatctacgcttacgataccggcggcaacctgacgcagatgcgccacagcgccccggcgacaaacaacagctacacgacggacatcacggtgagtaaccgcagtaaccgaggcgtgttaagcactctcacccaaacaccgtcagaggtggacgcgctgttcacggcgggcggacagcagaacacgctgcagccgggccagaccctgagctggacgccacgtaacgaactgctgaaggtaacgccagtctcgcgtaacggcaacgctgacgacagtgaaagctaccgctatgacggcggcagtcagcggatcctcaaagtcagcacgcagcagacgagaaacagcactcaggcgcagcgggtggtgtatctgccggagctggaattgcgcactacaagaaatggcgaaacagagaaagagagccagcaggtcatctgtatgggggagtcggggcgtgcgcaggtgcgggtgcttcattgggatagcggaaaaccagcggatatcgtcaatgaccaggtgcgttacagctatgacaaccttaccggcagcagccaactggagctggacagcgacgggaacgtcatcagtatggaggagtactatccgtacggggacacagcagtctggacggcgcgcagtcagacggaggcggattacaagaccatccgctactcaggcaaggagcgtgacgcgacagggctgtactactacggataccgttactaccagccgtgggcgggcaggtggctaagcgctgacccggcagggacggtggacggacttaacctgtttagaatggtcaggaataatcctgttaattactacgacgaacaaagtaccgtttcttttcctattgataagtttaacttaatgactattagttctgcagggacgcacgggaatagaaaaaatgaggtagaccgtttgtatggaaaaaaaggagtgcctatgatacctcagacgagggccggtaattctaataagaagccaccagaaccgaggcctgcattaagttctgagcatacaattcttcatacagtctcagcccatgggctaggccgaggggataacataaaagcaacgaatgctttaaagaaggcggttaataatattgaaaaattcggacatgcctatcaagaatacgatgaggctcatcgtaaacacatcggcagtaacaatggaagattttatcgaaacactgaaataggtgttaatccaatgacggaagcagaatatttatccaaagaaacagtcactaataattataggacatacgctgatacacagcgctcattattgctcaacaatgatgtatcatcggcaattcaaataaaccaaatggcatatttttctgattcagccgaactagctaatttagtaaaaaacaatagcgaatcacaaaaaacgaatgattcgttttattattccgtaagcgtaaaggatacctattactatttaaaaaatgattctgaagtagcgagtattgatgtaacaaacaccaataagatagaaatgatactgtctagacttatgggggtacttggaagagctccatctaataaggaacttagagatgtattaggtaagtataatttgactcctccaaaaaacctattttcgctattgaatgatcccagttttaaaaacagaagtatatttgacccttcggtaactgcctatataagtaaaaatgcaaaaaacaaggccaaaaaacaagccaggaaaaatgcagcgaagagtttaccatgaggggttagtgtaggaaaaacatcttacacacgtaaataaatctggaaaataattaatcactgtccatcctgtatacatgggcagtgaaaatttccaggataatttatgacataccttgtgcactccagtgacattttcaaagagactgaactacacaaactggatgatggtacattccattgccggccctccagtgacaacatcggttcgctgccaacacttttttggcaagatggcatattcaatcacgaaaccaacagttacctgttttacctcaaggccgtaaagaaagctgaagacttatctccctgcgcacgggcactgcgggcctactatcaatttcttgaggacaaggggttacagtgggataaatttccaccagttagcgtaatataaatgctgggcactatacttttatcttgccagaagggattagaaatggagaattgagaccactaataatattaatttaaacagtaaattatcttcttattatcttcttaacgtggttttttacatcattgaacctcaaaccccgttaacatcaccgaccagccatacctgctgctgttctatacgcccatgatccccgtcgacacaccggtttcggtcatgtgctatcccggtgaagtgagtggccagatgggtatctaaaaacagtttgatatccccataaaattcgccttggttgcctttcaacgccaacatataatctgcctgacctgccacaatctgatccgctatctgatactggcagtccatcacatcagtcgtgattgttgcctcttcaatatcaagcaaggtcaacaatttggggatcgcggtgatctcattggatttgtccgatactttcacttggccaaaacaaagctgattggcgactgaccaagcactcaccagatggatagccgggccccccttggctttatccagcgtgcctcgcatcgttttaccgtctaacacaataatctcttcggacaggtgagccagacttttcacccacgcggtaaaggcgtggtcaaactcgtgaggattgagtcggttgaggacatcgttgaaggtatcatgactgggtattccgttaggtaactccaaaaattgcctaaaccagtcttctttggttttgccatattcttcaatgtcattgaaattttcacagccgcagatgatggcgcaaattgagatagtgagaatatcgataagcgagtgacgcaaagttcggttgactcgcggatcgctgaggtgcccgaaggcgtgactgatggaggtggctttcattatgggggttcagggtgatttgagacggaaaatagatgataaaccacaatgcgctattaatgacacattgaatgaacaaaagtatctcaaaaaattaattggttaatttagacccgtttgcctggattactatcccataatgacatgataaataatctggaaaatggtacattgaaaagagtttttagaaaaaaaacagcaattcctcattttttctggaaaagtacagaagccgtcagttaatggttttccagaaatactccagattctacgtgtgaaggtagtttgtaactatcattaaataactccctgtccgataggacagggttgtattcacttattaatactacaaccgtatttgtttttctcaatcggaaatctgcccgtagaacagcttgaaatgatacgatttctcagtttattgattatcagataacacattaattttgggatgattacggctgtagtattaggcactgttgtaaataaggattgtaagccagatccccagatttttctgtgtgtgagctttctgagttttctatccaatatagcctcactcatcatcactattccggtaatacacctgccagatatagcgcccgcgcccgtcgccatgccccaaatccatcgataccagcgccagcgcttctcgttcactaaaaccctgcgctatataatgctccccggattgctgagcaaaatgataacgcatactgtgtggcgctttattgccgtgcagtcctgcatatctgacaatatagcggtaacggtcgatggcctgcgtgatcgtcggcttatcaatcagtttaccgccatgcccggcctgctcgcgttcagcataagcaatcgcgtgttgcagggctgcccgatccagtatgaccgtctgtctggggcgtccacctttagtaccgaacaccactcgcacagacgtatgcccgttttccagtgctttcttccaggtcgctaacgatttgtaggcttccaccgcttctttggtacgcagtcccagcacatacgccagttgcatcaccgccgcgacacgccggtctttttgttccacctgcaggaaaaccgcctgaaactccgcaggcgttaatgccgttttagtccctgtgcgactcgtcccgacaatacccagtgcccggttactcagacgagggttatccggtgcggccagtttaggtttgcccgcctgcctcaaaatcgttcgcagtgctgacatctcattttgcagggttcggtggctaattttgttggccttacgttcagcaatatagcgctcaatatattttgctttgaggctgtccatttgtcgaagcctgatacccttgtctttcagaaagtgaaggaactgccgggcaatccgttcacgatccgacacggtggcaaaacttccgcgtccttttcgggcatgggtgataaattcttttctgaaccgttcgattttcgaccgtgccgatttctgcgtcatccccgcaccccctatcaatttgcttattttttattcgtttttaaaccagtccctgcgtgtcggttcaggttcaccgttccgtagtgcgtcagataatgtgtagcaggggaaaattgcgttgagtttttgcaggagttcgctacgtgctgagcacggcggtgaagtactccccgttcagtgcctgaggttactcaggatgaacgcctcattaatcatgacgtggtgtgatttctccttttttactgcatcagcctgttgccaggcatgaggtcaaaaataaactaataacgggttcaggatcagaaaatgcccgaaataacgggtgactttgagtaacgcgtggatcaaatcggtcgtaaagtcaggctctacgtgctctggacgttgacgcccggcggcgtcacttggtaatcgctgcgcttcaacacaagtgacgccgcacaatattcgggacgtttaccgtgatgaactgctctaaagctttagagcacatggctc

SEQ ID NO: 431 - DNA, 13731 bp, Xenorhabdus sp.; identical to SEQ ID NO: 430
  CDS (3006)..(7454)

SEQ ID NO: 432 - DNA, 13731 bp, Xenorhabdus sp.; identical to SEQ ID NO: 430
  CDS (7521)..(10481)

SEQ ID NO: 433 - DNA, 29835 bp, Xenorhabdus sp.
  CDS (3006)..(10160)
gattaaattcgccccccggtggaggactgttcaggagaatactgtatctatccgtttcccgctggacaaataaagctgcagtggaatcaactaactttcctaatgcatccgcactgacagaacgtagcagaaccttagttccattcagtttccctttttcagcctgacttaggagatcatcccaacttttggcattacttaaattgacgagtgcatttttcagccggttacaatcgccttccttgaagcaaagcgcattcgtcttcaaaataatctgaggaaaattgtcgagtaatatcattcccgacttagcaatcacttcattcaggccgggattatatttccgggcatgatccataggacgcaattgctcattcactgttgtcagtaacgccgaagctttattaataatctccgattccggaatgggtaatgaactaccattgttccaatagacaccaaagcaatcaaacggtaaaaaagaaaaatcatccggggaagaaagtgtccctgattttggtggcatgtaacacattcccgtacctttaaccctcagcacatccccttgtcgtagtggcatattcgataactcaccggcatcagtaatgactgtggtgttattgccatgcagccacgcgaaacttaatcgcatcgatagactaaccggctgataaagatacagtacaagcatggctaagatagaaaataccaccagcatctgattcttctggtaacgctgataagggtagagcctttcctcctcattcaatgaaagatgctgcccctggcggacaacttggccattggagtacatttctacatcagtatttttatcaagttcatgcgcaacatacggctcccaatgaacaggataaatgagatcaacgcctccaagagagatgttctttttgttttcctgctcaaattcactgaatactccccagcgtttcagaattccgctgaaacagcttatattcaaataattacgtgcagaaggtaacctgaaaaacggccagaaactggcaagaataaacagcacagaaaccagcatcagccacggcaataatggcgaaggaacaaaaagcgccagaaaccacaacgataagccagtacacatcagcacaccttcctgaatacctgttgagtggcgcaggcgatactcttccggggtttctttacgcaggtacagcagattggcattcgaattaccgtttttctgaattgaagcgtgctctgcttttttgatgctcggtgtcaccagcaggtcttgctgataatctgtcagactgtgaccatttaccgcaatgaccagcggaattgaagatgttttaacaatatcgattgtatttcgctgattaacgaaaggttcaagcaaggctggaaaatagatttctgtttcatcgagatagtaacgccagtgctgcgtttccccggaaacagcagaaaaacgggtgatagtatgactgatggtataaacgttattatccctgatgggaaataccggatagccggatacgtagcttctgtctaatttcgtctgaggtaggatatttttcaaataagattcaataatttgaaattcgactgcactcaacttacgactgactgtgttagtcttcaatgacatataacgcgcgttatcagaccgcctccatctgaaagtcagaaaggaagccattatagtcaggctaatcataaaaatagccaatataatgaccagtgagctcatttgttctccacgcccatgacagctgtaagaaactgacaaaataacaatcgaaagaaacccacagatcaggttattcctattctcgacttctatttttaattttatttacaacatgttatataaattttctcacaccaattcacaaaaaacagcattttctgcaaagtaggaccataacaaaaatacatacaagcgataatcgctatcatttactaacataatcagccatattaaagcaaagtttaaatacgcaacaaccatcaggggcaagcatgattgaactgaaaaagcctaaaatattgaatataagtgatattgcccattctcgtttattcaacatccagtccgttgatcttgaattcagtaatggtgccagacgtatttatgaacgaatgaaacctaccaatcatgaagcggttctcattattccggtaattggtgatgacttacttctgatacgtgagtacgcagtaggtattgaacaatatgaattgggttttcctaaaggcgcgattgatgcaggggagagtattcttgaagcggctaatcgtgaattaaaggaagaggtgggattaggtgccagaaaactggagctgttgacaaaattgacgatggcgccttcttatttttccagcaaaatgaacatcgtgattgcacaggatttataccccgaagatctggaaggagatgaaccggagccactggtacagatccgctggcctatagctgacatgatgtcactactggaacatcctgatttcaacgaagccagaaatgtcagcgctttattttttgcacagcgatacctgaatgaaacatgttaaaaccacgtttacagcagcgctgattgcttatctgaataatagaaattaatgatataactttatgaaaaaggggtattggagacaaccatctttaatacccattttttcactatacggagcatacacaaaagcattcactttattaaaaataataaataaacatatttattattatttaaaaattaatacccgcaatctcaatattcccctgataatccctttatgattcattcaataaactcaactttttaaaactccattgaaataaaataactttttaataaatgatcagatccgaaatatattttaggctggatagctcacaataacaggccatagtgtaaccgtttcaatagcgccagaaacataacttaatgttatgagaaaggtgttacgaagaatagaagtgctgttttcttttaatcgaatttctatttcaaaggtaatcatgtatggcaaataatataaattcacagattagttataagacactctttaacgataatcaggatctttattgttttccgggtttacccgaagccaatgacgggccgttagcctatctggttgagctgtaccaacagattcagatgtttgaaaaagatgcagacaaagaaagtgcccgttttctcagccaacggcgggctgatatcgaaaaattattgctcgatagcactaacctcaatcagaccagcagcctgttaccactcgtcattgaagctctggctgaaaaagtcaaaaatcatatcaataataatcagcctttgacgcattctctggctgatattcattacccactttcattgccattccattttccgctaaagcaaactacaaccgtattggcaaaaaaagagatcccattactggatttgatccaacgggcagacagcaagtatcccaattttatcgatgacaatctgagtgctgactcgctgcaaacagccatgatgataagcagcacactggcaccgaaacttcaggcgctattactggaaacatcgcaaagcagccaaaaagatttcttcgaaaaatattacggcctaaaaggagatacagccaaagccgcaggatctctggagcgtcttactgtattcactcaacaaaccggcctgacttctcaggaagcggaattgttgtttgcggttaacggaatagccgaagaaactaaaactcacagtatcgtcacctactccggtaacgtcactaaaccggataatgcggataaacaatttccctccggtgccaactatgcggcttcctatatcaacgcaggtaaagctcccgctctctatctggaaaaaacaaaagataaagacacggcaaaagatgttatccggattaaaggggccagtaacgataactttgaccgtattcagcgtttccttcatatccagaaagcattaaaactcagctatgaagagctggatctattgttggtaacagcaagtaaagcagaaaaacagactgagtttttaataacagaagcaactctgcgcacgttgggggtatttctgcattttcagcaggaatataacgtcagtgcagagcaatttgccgcttttatcggccaagtaaccccctactctcttgagaacaaactctctttctttgatcagcttttcaatgctccgggattgtcacaacaggcatcttcctcatttgtgctggttctggatgataaagaatttgatcccgctgcgaccgaaggcattgatgcattaactgtcaatcagttatgccggggattgaatattgatgatgcaacctgccaaatattgctttctttcgttatgcaggcacagaatctgagcaaacccaaacgttcgctggatgtggtttccgccctgtaccgtctggttgccttaccgcgcctgctgggtatgtcagtaaaagaaagtctggggctgttgttattattgaaccgagataacccgaactatctgcaacaactggcaggtattccggtattggctaacgatgctaaagccattgatattctcgatattctgatcgctgtaatgaatgccgcgcaatggataaggcaacataagctatctcccctgtcccttaacctgctgctgataccttatcagtctggcggtaatgttaccgcagatattgaaaatattgattggattaaaaaaatcagatccattattcccagtgcaaacaatgcattactgagtgaagataaaatcgcttctgccatgcagggttttcaggcgaaaaacacatccgtcatttggatgacagcgctcgccaaattggtggatacacaattcggtattgttctggacagtgttatttcaaccaatgatggtggtgaaaaagcactgttcaatgaagtgaataaaatactcaaagatctggctcaggaagccgcatggaaacaacagggagatatctggacacaaaatctggttacattacttatcaatgcgtttgttgctcagcaagatctgattattaacgccgttaatcatgtatttgacatcgataatacgctttccctaccgctattacgctggacaaacaacaaacaagctgattttctgcgtaataccatagcactgtcccgcaatttaggtgatcaacaacacaaagataaagctgttgctgcatggtacgatctcagccgttactccacgatttgtaatatattcaaactgacagaaaaaagcatagaaaccctgattgaccatccggattggttcaaactgcaaaaagatggcaaactccgcgctcttgatctgaccttccttcatcgcctgagccgctatagcgactggctgaatttattacctgagaataaaacggaagacgatgttatttattatctgcgtcaggccaaccaaatcggtcaaaactcacctgccacagacgtctggagcgtagaacaggcggccgctaatctggctgaattgataggctggtcagataaagaaatccttcgggtaacacaatactttacgccgaaagtggcacaaaatattgtcggcatcagtaacgtgatgcggctaaaagcactagcagagaaaagcgaaatatcagttcagccgctattagatgcggctaaactgagcaccgcatccggttatgatcactggcatcaggtcagtagtgctttatttgccgctattaaccccgaagatcaatcccaaccggaaggcttactcaatgaactctggcgtgatgcactggtagattaccttttacgacgctgggcaccttctgatgattcattgtcagatatcgtcaccattgaagacctttcaaactattttctgactgatatacaggtagccgcagaagttgataccagccgggtagctttcgctattgccagtttgcaacgctatttattccgcctcttctctcatctggagactggatatgatgccattcccatcactgatgaaagaattgaatactggaatcgctatctgagtcaatatagccactggcaggtctggcagcggcaaagaaacttcccggaaaactttattgacccgacacgcaggttacgtaaaacaaaggcatttaatgatttagaaaatgatttgggccagtcccgtttaaataacgatatgctgcaaacagctattctgcgttatctcaccgaatttgaacggatcagcaatcttcaactcatcagcggctatattgatggcacagatcccacgagtgatcgctaccactttattggcaaaaacaattctgaaccagtggagtattactggcgaacgcttgatatcagtttgcgtgacagcaataacatcattagcccactggcatggagtgaatgggaaaaaatcactctgtctttatcaggcaccttactggcaatccggcccattgtgatttctggtcgccaatatgctatctgggttgaacgtgaagccacaccgctaatgggagcagatcaaaaacccacagattaccgtgctatcaacgtaaaatttactttcaagcaaagcaatggggaatggagtgcgcccaacgaattattccgtctggatggcaccgatgctaacggtgaatatccaactaaagacggtaagcggatccctgataatgaaaaccattatttgaaggatgaaaaatacaagcccgctctaatcgcaatggtagacgtacaacgtgaagaagatccctggatgggagttctgttatacgacaccaaagaaaaagacagcagcacatgggtaaaaaacaaagattattatctggagctacgagatttattattagtagataaaaagacgcttgatgatgaaaggaagattgtcgaaacgtggtataaactgtttaacaatcctgataccttacaacatcattatgctggtacagagaaatttgtaactgttaaagaaattgagacaaaaaccaaacataacttctttaatcttaagccatttagatctccaatactgactttagatgtcagattagatccaacgaaaaccaaacttctattaatgggtaagaactcgctaatcaagtttgacactaataatcaggctgcgtcagttaattccaataaactccctaccaaagaactccaatgggtaatcaatactgatgacattcatattgaagctcaaatatcggccagtgacacaggtcttaagacctttaattttcaatggaaagggcaaaacatcccaacagaagtattcactataagttatggcgaaacaaaacttttccagttattacccaatgagtggaaagaaaataaaattattaaaagttgtgatctttcatgggttagcggaaaagtattccaacaaagtattcaatgggatgctaaaaatgacaagaaactctcaatctcaattgagggaaacaacacttctatcgccagtaagcaataccagactaaaaatgaaaagtttgcaaaatctttttttgttatgggaacttatccacaagaaaaatcactatttggccaagaagtatatcttaatggccaggcgtcaacgggagaaatacaattttctcttaagccaaacactaaaaaatattattttatattaggttcaatttttatgttggatcaaaataatccagaagacacctcaagatttgtcgagaatgtatacgaggtcactatcggggaaagcgacaaaatcccctccatcacattgcagcgaagcaaacaacaggcacaatatctcgatatcaaaacattaggattcaattccaccgccatcagattaaacacactatttggcaagcagctagttgcaagggctactcaatctatagaacgagttctggcatgggactcccaatcattacccgaacccgccttagatgacaaatcatcactaaccaaagtcgattttaacggggctaatggacaatatttctgggaactgttcttccatcttccatatctggtttcagcccgactcggtgacgaacaacgtttctacgattcacgccgttggtttatcaactatctgtttgacccttatggcggcattcggatgtggaattctcgcccaattattgaaagtggcagtaatcttccatcatcattcaacgagatcgatccggatacagtcgcttacagccagcctgtctattatcagaaatccctattccattacctcatcaaactttggatgcaggagggagattacctttatcggcaactgaccagagacagcctcaacgaggccggtttactttaccaacaggcgcagcaattgctcggggcattaccagaaggcatagatgcaacgcgctggcatcctgtcactctggacaagataaaaacgagctttaaaccgaatgtgcgggctattgatagcttatttatatctcctttcaatacccaactcatcgaactccagcaaacactgaaaaataggctgtataacctgcgtcatgggctgacaattgatggcaaagcatcatcgttgtcactttatgccagtgctgccaatccagataatttaacgcagagaaatacagggtatgccaccagcaccctcagcaacatgcagcagcaaattccgccatatcgcttcccaatcatgttaaaacgcgcctgtgacgccgtgaaacaactaactgagatgggacaccgattacttcaggcgacagaaagcgaagtcaatgcagagcaagaggtactggaacaatcgcaattgattaggttgtctgaatttgccattgaactgcaacaagaggctgtccagatgacccaaatgggtaaggcaacactggaagaaagcaagaaaatggctcaggagagatatgatcattatcacaacctgtatgaagaaaacctttcttctttggaaatctccgccatcagcatgaaaaccatgtcagaagttgccaaactggctgccgctcctttctacgttactggtgccgcactggaagttgtccccaacatttttggtatggcaatgggaggggctaaatattcagcaccagtcaccacggcggctatcatcgcacaactcactgcggaaggattagatattgccgccgaaaggttgcaggacggcgcagattaccaacgtcgccgtcaggattgggaaattgaatacaagcaggctcaaagcgaaatcaatatcattgagatgcagttgaaagagcaggatctgttaattaagagtgcccagattgctctgaaagaagctcaggctcagcaatccacagcccgcgagctgtatgaatttatgaccaccggattcctgatcgttcccacctaccaatggctgatggggcgtcttgctgccctgtatgctccggcttatgacgcagttctctccatgtgtctgatggcagaaagtagctggcgctatgaagtcggagattacaaacgtcagggctttatcaaaacgacggcatggaacgactcttatcgtgggctactggctggggaatcattacagctggatctgcttcaaatggaaaacacatggttacagcgcaatgagcgccgtttgaatattaagaaaacggtctccctcagttcactactgacgagcggcgggttaagaaaacagatcgataataaacaatccatcagctttaccctgaattcaaaactgtttgatgacaattatcccggccattatctgcgtcagattaaacggatttccgtttcaatctctctggatactctgaatcttggctctgtcctgtcatcagagattagtgcgatcctgacccaaaccagtagttctaccttaacccatccagatatggaaggagttaactggctctatgatccaaacaggaaagccggtaacagcaaaaatgtggttaataatctgcgcgctcaacagcaaatcgccctctcttccttgagtgaggatgatggcagtgtggcgaaagagaattggctatataccctgatgtttgatgatgaccgttacctgccgttcgaaggtacaggcgctatttccacctggacactggaattccctgatcaggatgtgatcgataacatattttattatccggggcttgttcctgtgtggcggttgaaagatatcaatattcatattcactacaccgctgtggatggcggcaaaccattcgcaaaagcggtgaaagataaaataaataaatagcccttatgctataaaaattgataaataacctataacaaaaggctccgtcagtttcctgacagagcctttttatctcggtttaatacctgcaatacaagcatctaaaactgatcagaacagttcttggctttcaccattctcgatgacagtcgtacccgcctctggtacggaatattctgtcggttgagtgccctcaataaaatattctgaacgggtattttttccaccgctagagagcttacccgtagcccgatcaatcgtgacagacacaatgccttgaggagcctccatcagtttttcaggcactccttctaatgccattttcatgaagtcatcccagattggctgagccgttttcgctccaccttctcctttcagagccggagtacgtcccagacttctgctgtgctcatcaaaaccaatccagactgttgccaccatatccggcccgtaaccagagaaccatgcatctttcgaactattggttgtcccggttttaccgccgatatcacgacgtttcaaatcgcgggcggcgcgccaacccgttcccatccagcccggttcaccaaagatgttggttttcagggcatcatggattaaaaatgccagcggtgtactgataacatgcggagcatattgctgatcatcaacgtacagattaggcgcgacactttccagatccggctgtggtagtaacacggggttttgggaaacatcggaatgagctacgttctcaatcgaatcttcagacagctcaatagagcgcgttgtatccccgtagatcaccggaatatcagtacattgtgggcaggcaaccttaggcttcgcttcgtacagaattttccctgcatcatcctcaattttgttaatgaagtaaggatcaaccagatagccaccgttcgccatcactgcatagccgcgtactaactgcattggtgtgaaagaaggtgagcccagcgccagtgattctgtgcggacaacattctctcccggtaagccaaagcgtttcagatagtcagccgcataatcgacacccatcgcacgcatagctcgcaccatcactacgttcttggactgccccagtccctgacgcaaacgaaccgggccatcataggtcggaggcgagtttttcggacgccagtccgtacctgcgccggcatcccaacggctgataggtgcatcattcagcaatgatgccagcgtcagccctttatccatcgcagcggtatacaggaatggcttgatattggagccaacctgacgcaatgattgagtcacgcggttaaattgacttaattcaaaattgaaaccaccaaccaacgcttctaccgcaccatttattgggttaatggagatcaacgccgcattcacttccggtaattgagccagccaccagacgttattgacctttctgacccaaatctgctcaccagcccggattacgctatccacactctgtggtgccggcccttgcaggctgtcagttttgaactgacgtgcccagcggactcccgccatcgtcagttcagctttgctgccatctgtcagcatcacttcagcctgggtggcattagatttcatgacaaccgcaggtaacagggggccatatttcggtaatgttttcagcttatcgataattttaggctggctccatgcaagctgacctgccttccataacacttcctgagcaccgcgataaccatgacgcatatcatagtcaatcacattagtacgaacggcatcgacagcagccagctggattttgcgtgtcaccgtggtatagaccttataaccatccgtatacgcactttcgccataacggttaatcagatcctgcctgaccatttcagtcagataaggtgcagaaaacgcaatctgcggagtgtggtaactggcaactaatttctcacttctggcctgataatactgccgctgagtaatgtagccctcttccagcatacgacccagcaccacattacggcgattggtcgcacgctcataagaatacagcgggtttaaagttgaaggcgctttcggcaatccggcaatcatcgccatttcacttagtgtcaattcattcacgtttttgccgaaataaacgtgcgcggcagcgccgacaccatacgcacgataaccgagatggatcttgttgagatacagctcaagaatttcatccttggttaacatctgctcaattctaatcgccagaaatacttctttcgccttacgtatcaaagttctttccggggtaagaaaaaagtttctcgcaagctgctgtgtgatggtactcgctccctgagaagcgtgtcccgaagtcatcataatggaggcagcacgaataatacctatcggatcaacaccgtggtgttcataaaaacggctatcctctgtggcaataaaggcttttaccaacaacggaggcatttcggatagggtaagcggtatgcggcgtttttcgccatattgagcgatgagttcgccatcagcactgaacacctgcatcggtgtctgtaatcggacatcctttaacgtcgcgacatcaggtaactgtggctcgatatatttgtacaaaccaaaaatcgaggcagttcccaagaaaatgcaaaaaacgacaaggatcaaaaaatactttatgaacttcacctgaaatttctcacgccatgttaatgaggcagtttataaacgattagtacgtagtataaaggctatacaacacgatgaatatgacctttcattaattactaatcactgataaggaaatcactatatgtacccagctacatggtatatcggcctggatatccataatcattacattcgtgcgcttgccgccactaaacgccgtcatggctggcaattccggcactgctggcactactctttatttaatgaaacatctttatttagtgaaactcccttattaaataaggtaccaaacacccctatctcagggggatggctacagtatccagaaaaattacgcaaaattttaacgcagtggcggcaaatattacctaacaaggttaaattaaggctggcactacctgttcaacaaacattacagaaacaaattcctctgcctcagcacatctcattacaggagccggaactcggttggtttgtccgtgctaatgccgaaaagcaattccccaccactgatctggctctcgattatcgggtacatgggcaacaaatctgtataagtgctacccgccaaaaagaccttaatttctggctcagcctgctcgcagaagtcggtttatcacccgatgccatcgatattgccccctgtgcattacgctatgtagccgaacttgccggaatttccggtaacagctggctggttcatcaacgaaaaactgactggctatggctggccccggcgagcctgcctttcagttatgggctgatatcaacccagtcacatgccagtctgacacaggtcattaaccagcttcccattactccggatggggaaaattacccgatttattacagtaatgaacaacccaccagccttattcgggtaaagcagcagccggcgccagcagaatctgttcaggtctggcacctactgtcagcattttgccattaccagcccccaataccggaaaacataagtgctttcatgatagcggcaggattagcactacgaccggatgaccaatgatgcatcaggtgaattttctaccctggcgacaggcaaggcttaaacgtcgatgtcataaatgggggctgtttctcgggttgcaactgttcctgtggattgccgctctggtaatcatttcaatagagcaaaaacaacaaattggacaatatcagaaccaatttactgaaaatagccaccaacttgcgcaattaaaacaaactatcagtgaaacagaacaggctgttcatcagcaacaacaactggctcaaaaattagggaaaaaacagttattcatggagcagaatcagcgatatttacagctatttcgtcagcttcctcacttattaccggaaaaaagctggttaaccacattcagtgatgattccggccaattggtttttgctgctaatagccagagttatgaagatgtttctgatttattggataacctgacaggcaatatttcacttatcaatgtccaactgaaaaaaatgacaacgacacctgaagactctctccgggtatttaccattgatgctgagtggttaatggggaacaataatgaaaaataattatctggtgtggttatttcgccctgcatggcaattatttttattacagcaattggtgatcgttcctcttattttggggttctatttttttgtctggcagggcaataaagatgccattcattcttttcgctccaaaatagcagagcagaaaaatgatattacattatctcaaacccgtttttccgaactaccggacttaaccgaacttcaccagcagctccaacagataaccgctaatctcgactcaaatagtcacataacatcatccccgaaaacgacggtacttaaacggctccaccagcctttaacccgttccggcagccaactgatggaatggaaaagccacaaagaaggtcatcaggttttatggcatatcatattgtcactgacctatgagcaattactccgctttctgagtgaaattcagcagttacggcccttattgctgattaaacacctcactatcactcccgacgataatagcctgaccgtccgcatggtactggcagatatgagtcatgaggaaaatataaattatgaggaaaagcagcaatgaagaattgtgtttacaccttactggtactcttgtttttatcctttttcagttgtgctgaagatactgaaccggaagaagcggctttttccataaatgtaagagatcctttccagccgccacacgaccctatcaatgaaaatacggcaaatgaagcaacggagttccatcagtcagaacaggatgatcaggaaatcgaatatcaggttattaccctgcaatacgccgatgccggaaaaataacagaacaattgcaaaaaaatacccctgccttgctgacaaaatggggaaaagtagaacatgatgctttaacaaacagtctgatattagaagataaatttgatgctattactcgcatcaaaaactggctgaaagaagtggacacaccacaacaacaagtacaaattacagcgcatatcgtcaccagcagtagagaagcactgcatgaattaggtattcactggggtatgaccgccgatccactaaatcgggctctggggtttaaccgcctgaacctgcatcagcctgcgggtagccagagccatcgtttagtgctgaatgcagcccgtatccatgccactctgctggaaatggaactcagtgcattagaacaagaaaatcaactggatatcattgccagtccacgactgacagcctcacatcagcaacctgccagtattaaacagggttctgatattccttatatcgtacagaataaggataaaacatcgattcagtttaaagaggctgtattggggatggaagtcactccacatattttaaagaacggaaaaatccggttaatactcaagatcagccagaatgcgcccggccttcccattaatcagggcggaaatgaaaatctggcgattgataaacaagaaataatgacacaagttaccgttagaaatggtgaaacacttattctgggcggtatttttcaacagaaaaaaggcgccagtctgcaaaaagtgccctacttgtcagaaattcctatattgggagcattatttaaccaacagggagaacgacatagccgaagggagctcgtaatttttattacacctcaattgactgatatttaatcacacaaaaatatgaatatacttatcagttagttaaatgcggtatatgtgattttatcgcccgattatcagccattttccttggtctgacctgtttatggatttgacgctgagagcaatttagcatacaaggattatctaattgagtgagcaggtctctcattaccagcaaaagcctaccaaaatattcatgggtagggttacagtcagccagaaaaaaagcatgaacccgattcaatcggttcgtgctgatttatatagttgcaatataggctgatgtgctgagataatttttccatctgatctcacatttcactcatgaggtttcagtttaggtcccgcggctaatctgattggcggggcgggttatcattaacaaatagtcttagtaataccaaaaacatggcagagaaacgcaatatctttctggttgggcctatgggtgccggcaaaagcactattggtcgtcagttagctcagcaactcaatatggagttttacgactccgatcaagaaattgagcgacgtaccggagctgacgtgggctgggtattcgatgtggaaggcgaagaaggcttccgtgaacgcgaagaaaaaataattaacgaactgactgagaaacaaggcattgtattggcaactgggggggggtctgttaagtcaaaagaaacccgcaatcgtctgtctgcccgtggtgttgtcgtctatttagaaacaactatcgaaaaacagttagctcgtacccagcgcgacaaaaaacgccctttacttcaagttgatgcaccagcacgtgaagttttagaaaatctggctgatgagcgcaatcctctgtatgaggaaattgctgacctgactatacgtacagatgagcaaagcgccaaagttgtagctaatcaaattattgaattattggaaaaaaattaatttccgcagattcaatccgttgcaaaaaataaggcgaaagctgatatggaacaagtgattgttacgttaggtgaaagaagctatccaattaccatcgcccaagggctgttttcgagcagtgaagcattcaggcccctgcaatctggtcagcaggtcatgatagtgaccaatgaaacactggctcccctgtatcttgaacaggtgaaatccacattgctgaatatgggccttcgggtgaatgaagttatcttacctgacggtgaacaatacaaatcactttttgtgctcaatgatatattttcggccttactggaaaataatcatgctcgggacacaacgcttatcgctctcggtggtggtgtcatcggtgatatgacgggttttgctgctgccagctatcagcgcggcacccgtttcattcaggtgcccaccactctactttctcaggttgactcttctgttggtggaaaaaccggagtcaaccaccccctcggtaaaaacatgatcggggcgttttaccagcccgcctctgtggttattgatctcaattgcttaaatactctgccagcccaagagctatatgcagggctagctgaagtgatcaaatatggcgtgatcctggacggtgaatttttcgactggcttgaaagcaatattgaaaaattattggatctcgatcatcaggctatggcttactgcatccgtcgttgctgtgagctgaaagcccttgttgtagcggccgatgagcatgaacgctcaggtatgcgggctttattaaatctcggccatactttcgggcatgcgattgaagctgaaatgggatacggagtctggctgcacgggcaagcagttgcagctgggatggtcatggctgcacgggcttctgaacttgttggctcattctccggtcaggatacacagcgcatcatcagtctgctggaaagagcaaaactgcctgtacatggcccctcagaaatgcctcctgaaaattacttacctcatatgatgcgcgataaaaaagtcactgcgggcaagcttcgtctggtattacccacagctatcgggaaagcagaacttcgttctgatatcagcaccgatatcatattagatgccatccgacgttgtagtgaatgatccctacttttctggctgtttgctataaaatagctacattgatagatatatccgatagatttttcaaataatgggtataatgtgaacagtttcagttaggtcaggccgccaaacctatcactccgttattagtcacatagcaattggtaatattatctcagctgggagggcatatggacgaattaaaatcagaaaataaacaaaaaacagaaaacgagtttaaacccgatacatctgatcgtccccctcagcgatcacgcccccagaagcagaatccaaaactggcaatatcccgtcaacaaatgatgattggggttggtatccttgtgcttttactgctcattatcgctatcagttctgccctgaaatcaccaacagaacatgaaaagcaacagtcatcaaattcagtcgagaaaagtatcaacctatccggcacttcatcatcttccgacaatgagcaaaatagcacacaggaagcaccatccacatctgcaacttctgccactgaccatccacatgaaatcggcatgccgccaatcagcagtacccctagccagagtatttccccgaccagcggaacgggtggctataaccaacgtatcgaattacccggtgacatttctgatgctttaaatcagcaacagagcaatatcaacaatgtggtacaaaaaaatacggaacaggaaaaccagccatcctcacaaccgacaccacaacagagccgtgtaaagcaaacgacagtaacaccggttgaacaacaaaaaaccgaaaaacaacataaggtagccacgaaacctgcaacgactgaccatcagacaaataagcaaagtacggcaagtatcggtgaagacctactgaaagtaccggcaaatcggtttacactccagttaagcagcgccagtcgcccggataccttgattgcttttgcgaaaaagaataacctttcccattacaaagtttatgaaactaaacgtaatgataagacatggtttattttgatctacggtagctacaattccgcttctgacgccaaaaaagcgattgcctcactccctgtagacgttcggacacaaaaaccctgggtaagaaaactacaacaggttcatcaagatctgaaaaaataaaactattttgattaggcgctgatatgctgtcctaaacagagtacaatctgcggctctgaaattattgaatactttattgacggcatgaaaaaaaaacgcgctttcttaaaatgggccggtggaaaataccccttggtggatgatattaaacgtcatctgccagagggcgatcgcttagttgagccatttgttggcgcaggctcggtattcctgaataccgattatgattcttatctcttatcagatatcaatagtgatctgatcaatctgtacgatacggtaaaatttcgtgcggatgagtttattgatcatgtccgtcccttattttcaccagcatacaatacgtctgaaaccttctatcgcctgagagaagagtttaacaaaagcaaagatccattccatcgcagcgtgttgtttctgtatcttaaccgtcactgctataacggtctgtgtcgctataatttacgcggcgagtttaatgttcctttcggacgctataaaaaaccttattttccggaagatgagctatattggttcgctgaaaaatctaagaaggctacttttatctgccagcattatgaagtcgcattaactaatgtcccaaaaggctcagtggtttactgcgacccgccatatgctcccctttcagcaaccgcaaattttacagcctaccatacaaatagttttaacctgacagaccaagaaaatctggcgcggcttgcctataatctttcgtctcaacatggtattccggtgctcatatccaaccatgacacgccgatgacacgtgaatggtatcatcatgcttccctttacattgttaaagcccgccggacaataagtagaaatattcttgcccgcagtaaagttgatgaacttttggcgttatactgccagaagtgattgaggtttcctgcccctgaaataacggggataaacaatgaattggagaagagaataatgaagaaagattttctgattgccccatccattctatctgcagattttgcccgtctgggtgaagataccgcaaaagtgctggcagccggtgctaatgttgtgcattttgacgttatggataaccattacgtaccaaacctgacaattggcccgatggtttgtcaggcactgcgcgattacggtattaccgctcccatcgatgttcatctgatggtgaagcctgtagatcgcattatccccgattttgctaaggccggtgcaacctatatcactttccatcccgaagcgagtgaacatattcaccggacactacagctgattaaagatcatggctgtaaagctggtctggtattcaatccggcaacacctctcagctatctggattatgtactggataaactcgacgttattttattaatgtcagttaaccccggtttcggcggccagtctttcattccggaaaccctacataaattgcgtcatgtccgtaaaattatcgatgaaagcggctatgatatccgtctcgaaattgatggtggtatcaaagccaacaacatcgctgcggcagctcaggctggtgcagatatgttcgttgcaggctctgctattttcagtcagcctgactataaagcagtcattgatgaaatgcgcagtgagttatcaacagtggcataacgacaggcaacatgatgaaaaaaaatgtagtacaagcaattcaggccattgcattcgatctggatggaacgctggtagacagcgccggtgggctggcagatgctctggatcaggccttgctcaccaaaggtctgcccgcagcaggcaaagaacgcgttgctgtgtgggtgggtaatggctcggacatcatggttgaacgtgccctgaaatgggctgtcggagagttttcccctgaactgttcagtgaaacccgcagtctgttcgataaattctatgaaactaccgtcacgacgggcagcaaactgtttcctcatgtcaaagaaactctggctgagctggcaaaacacaacctgccgatggcgattattactaataagccgacaccttttattgctccattactggaatctcttggtatcagtcaatacttttcactggtactgggaggagacgatgttaaacagaaaaaacctcacccggcaccactgtatctgacaatgggcatgtttggtttaaataaagacgaattgctttttgttggtgattcccgtaatgatattttggctgcacaggcggcaggctgcccttgtgttggcttaacctatggatataactatggggaatcgatagcactaaatcacccggattatgtactagacaattttccggatttactaccaacaattggattaccaactttgaacttacaggaagcgtaataaaatgaacgaacccacagcaacgaaaccaaaaacacagaaacctattgtattcagcggcgcacaaccttccggtgaattgaccatcggtaactacatgggagcgttacgtcagtgggttcagatgcaggatgaatatgattgcatctattgtattgttaaccagcacagtattaccgtacgtcaggatcctgaagaactgaaaaaacgcacgctggatacgctggcactttaccttgcctgtggtatcgatccaaagaaaagcactattttcgtacaatcacacgtgcctcagcataaccagctagcctgggcactgaattgttatacctatttcggcgaactcagccgcatgacacagtttaaggataagtccgcccgtttccctgaaaatattaacgcgggtctgtttaactatcctgtcttgatggctgctgacattttgctttatcaggctaatcagatccctgtaggtattgatcagaaacagcaccttgaattgactcgtgatttggcacaacgttttaatgctctttacggtgagattttcacgatcccggaacctttcattccgaaagaaggcgctcgtgtcatgtcattacaagagccgagcaagaaaatgtcgaagtctgatgataaccgcaataatgtcattgctctgttggaagacccgaaatctgttgccaagaaaatcaaacgtgcagtcaccgattccgaagagccacctcttgtccgctatgatttggaaaacaaaccgggtgtttccaatctgctggatatcctgtcaggtgtaacaggcaaaaccatccctgaattggaagcagagttcgaaggaaaaatgtacggccacctgaaaggtgcagttgcagacgcagtgtgtgaaatgctggttgacttgcaggaacgttatcaccatttccgtaatgatgaagctctgcttaaccaagtcatggcagaaggtgcagcaaaagcacaggctcgtgctcaggaaaccctgaataaggtttatgaagcaattgggtttattacccatccgtaatagtggttacatgtcaaagggttattaacgctgaccctttggcatatatacatggcttaagtaacaaccaattgaatatctgtttaaaaatagaaagttacttattttccaaataagcggtgactaaaactctctatttttccaagtaatatccgcttctgcatcgtgagattccagctggcagatagcccggcagctcccattaaacgacgatattgttcttcatcaaataggctatggaaagcaatggaaatggcttctttcacagaaacatcactattccgactgagaagttttattggttcacccgcacaggttacacctgaagagatcacacgatataaccatccgcaatagcctctgtcctgcatgatggcagcaaaattctcaataccggtaatgatattaagtttataacaaggcgaacggggctgagttacctgaataattgcctctccccactggaaaatgtctccgatataaacgctctcttctgtcatcccttccgttgatatattttcaccaaataaaggtggtacaaataattccattaattcaggaaattgccttttccaaaatagataatgttccatcggataatggcaaagtgcacgatctggcccgccatgaaagcgggcttcagcctgttcatcaccttccagtcccaaagaagtaagctgtaaactgccatttaccagcagcttattgattgcagaggaacccaatttctcggaggagattatttttcctctatatatctgcgggtaatacatttccatttctcctcaataaacaaataatgaacagacagtcagtaaaacaagcggttaattccgaccttcataaccatccaaataagtagcagatatagcttcagacattgccttacgccactttagtgaagggccttcgctgctctcataaactctaccctcaaaatgtgatgttctccgaattgaattcaagaattcatcaccttttaaataaattacccgttgctgcgcctcttcaggggacactcctgcttctctatcctttttacccaactgccagaattgttcaaaaaatggtactgaaagctcgatactatcgtagattttagttctgaaattggggtcaaaatcatcattagaagcataaacaaaatgcttggcattacgttcggcacttgttttgggctgtgcacagccagacattagtagagaggatactataagggttgtaatcgttatgacagcgttctttttcattatgtgcctttaatcgcgaaacaagaaaaaatcgaatgatagcgaaaattatgaccaataaaaatgctgaccacggttatgatcagcactttttgaaagatgaagataatagctattatttaattttttcttcgtaacgccttgctgcttcatcccaatttacgacatgccaaaatgccttaatataatcagggcggcgattttgatatttaaggtagtaagcatgttcccatacatctagccctaaaatgggataaccggaagtaccggaaatttcttgtcccatcaatgggctatcctgatttgcagtagaaacaacatcaagttttccgtcttctttcagtaccagccaagcccagccagaaccaaaacgggttgctgctgcctgttcgaattttgttttgaaagcatcaatactgccaaaatcccgttctatcgctgcttttaaagcaccagataacgttgtatctaatttcagccccttccagaacatgctgtgatttgaatgaccccctgcgttattacgcataaaagtacgtttatcagccgggatcttgtcaagctgctgaaccagatcatcaatgtccagaccagcgagttcagggaaattttccagtgctgtattggtatttgcaacgtaagtttgatggtgtttggtatgatgaataagcatcgtttgttcatcaaagtgaggttccagagcatcataagaataaggcaaggaaggtaatgaatgactcatattaaatctccagttgtttaaaatacatacaccctttatttattggggatgaagatcacaccttgtaagcaacaggattattatagtgaatcaaacggtaatgaaaatgattatcaattccatattatcactgtggtttcctttccttttgtgtttaatctataaataagaataaataaccgaatataatccaatagttagttaattttcccaaaaatgagattatgaataacggtatattttacataaagacaccgcattaaatgttcccttcataacattcattatctctattgcgtgatcttccgcgcaaaaaagaaacaaaaattcttcttacactttagttaaccttgttttgacatagtattaacaattgcaaggagataaaaatatgactcaaataattaagcaccctattcctgctgacatcgcagaaacagccctgataaacaaacaacaatatttgcaagagtaccaacgttcactacaggatcctaaggggttctggggagagaaaggtaaaattgtcgattggataaaaccttatacaaaggtgaaaaatacctctttcgaccctgggcatatcagtatccgatggtttgaagatggcacacttaacctaagtgcgaactgccttgatcgccatttacaggagcgaggccatcagactgccattatttgggaaggggacaatccggctgaatccagacatgttacgtatcaggagctataccatgatgtctgccagttcgccaatgtcttgaaaaaactcggggtcaaaaaaggcgatgttgtcgctatttatatgccaatggtgccagaagctgctgtcgccatgctggcttgtgcccgggttggcgcgattcactccgtaattttcggcggcttttctcctgatgcaatttccggtcgaattatcgattcaaatgcgaagttaatcatcacagccaatgaaggtttacgagctggccgagttgttcctctgaaaaaaaatgtcgatgaagctctaagcaatccggctgtgacaaatgtgactaatgttgtcgtcttcaaacgtactgataatgcaacaaactggcataccggacgcgatctctggtggcatgaattaaccaaagagattagttcagattgccctgctgaagagatgaatgccgaagatccgttatttattctttatacatccggttcaacgggtaagcctaaaggtgttctacataccaccggtggttatctggtctatgcatctttgacattcaaatatacgtttgattaccaccctggcgaagtttactggtgtacagctgatgtaggctgggtaaccggccatagttacttgctttatggcccgctctcctgtggtgcaacaaccttaatgtttgaaggtgtgccaaactatcccgatgtgaatcgtctctgtcaggttgtagataaacatcaggtcaatatcctctataccgcaccaacagccattcgagcgttaatggcagaaggggataaagccattgaaggcaccaaacgcacatcattacgcatcatggggtcagtgggtgaacccatcaatccagaagcctgggaatggtactacaagaaaataggcaacagtaaatgtcctattgtcgatacatggtggcaaacagaaacaggtggattcatgatcacgccgttgcccggagcaaccgatctcaaagctggatcagccacattgccattcttcggcgtaagtcctgcaatagtcgataataccggagaaaccttaagcggcgagagtgaaggtaatcttgtcattaccgattcatggccggggcaggctcgtacattgtttggtgatcatgaccgttttgagcaaacctatttttctaccttcaaaggcgtttatttcagcggtgatggcgccagacgtgatgaagatggttattactggattactggtcgtgttgatgatgtgctgaatatttcaggccaccgattgggaaccgcagaaattgaatctacattggttgctcatcccaaaattgcggaagcggctgttgtcgggataccacaccgtattaaagggcaggcaatttatgcttatgtcacattaattcatggtgaagaaccttctcctgatttgtatgcagaagtcagaagctgggttcgcaaagaaatcggcccaattgcgactccggacatcctgcactggactgattctctgccaaaaacacgttcaggaaaaattatgcggcgtattttacgcaaaattgcttccggtgatactggcaacttaggtgatacttccactctggctgatcccggcgttgtggaaaaattattggaagaaaagcaatccataatgatgccttaatgtacatgctataaggcacatatagtacacatgcacgccgccgcaaggcggcttggtaaacatcatcaaaaatacagaactgttcagggacgtggcagatagtcatgcattctctcgaatgttgctgtccgtatctggcaacccttaatgttgtttaaggttcgtcctttaatacctaaaaggagatcgcctgatgagtaccgatatttatcaagaaatcgaaaacaaccctcactttaaagagttaattgaaaagcgtgggcgctttgcatggttgttatctgccattatgttaatactctatgttggttttattttcctcatcgcttttgctcctggatggcttggcactcctctttatgagggctccagcatgactcgtggtattcccgtgggtgtcggtattatttttatttcttttatattaacggggacttacgtcatcagagcgaacggtgaatttgatcgtttaacctcagctattctcaatgaggtgagaaaatgagaaaacttgtcctatcaacaattgcgttattttcttccctctaccccatcctcactcaagcagatgccatttcaggtaatgtagaaaaacaacctttaaatattcaggcaattatcatgttcctgttatttgtcgggttcacactctacatcacttattgggcatcaaaacggacaatttcacgttctgattactataccgcaggcgggcggatcactggcttccaaaacggtatggcgattgcaggcgattatatgtctgcagcatcattcttggggatttcagcactggtttatacctctggttatgatggccttatttattctattggtttccttgtcggctggccgattattttgttcctaatcgcagaacgattaagaaatctgggtcgctacacattcgctgatgttgcttcttaccgactaaaacagcgcccaatccgtacattatcagcggtaggctcactggttgttgttgctttatacctgattgcacagatggttggagcaggaaaactcatcgagttgttatttgggctgaattactacatcgctgtagttttagtgggtattttaatggttctatatgtgctgtttggcggaatgctggcaacaacatgggtgcagattattaaagcaatcctgttattggccggtgccacatttatggcgttgatggtcatgaaagccgtaaatttcaatttcaatactctgtttaaagaagctattgccgttcactcaaatggccaaaaaattatgagtcccgggggattagtttctgatccaatatctgcgctttctttaggattagcgttaatgtttggtaccgcaggtttaccacatatcattatgcgattctttaccgttaatgatgccaaagaagctcgtaaaagtgttttctatgccaccggatttatcggctatttctatattctgacatttattatcgggtttggcgcaatactgttagtcagccctaatgctgcatttaaagatggtactggcgcattgctcggtggaactaatatggctgctgttcaccttgcgactgccgtgggtggtgatttcttcctcgggttcatctctgctgtcgcctttgccaccattttagctgtagttgcgggattaacacttgcaggtgcctcagcagtttctcatgacctctatgcaaatgtgattaaacaaggtcaggctaatgaacgggatgaattaagaatttcgaaaattacggttgtttttctggggattatcgctattgggttaggtattttattcgaaaaacaaaatattgcctttatggtcggtctggctttctctattgcagcaagctgtaatttcccgattattttgctgtcaatgtactggaacaaactgacaacacgaggtgcactcattggcgggtggttggggttaataatagccgttgttctaatgatcctaggcccaacaatctgggttagtattcttggacatgaaaaacccatttatccctacgaatatccagctttattttccatgattgtggcatttgccagtgcgtggttcttttctatcactgatacatcagaacaaggccagcaggaacgcgaaatgtttcgcagacaattcttgcgttcacagacaggaattggaattgaacaaggaaaagcacattaatttcttcggatttgaaatgcaaaaaagccatccggttaaggatggcttctctgtcaaagtgatgtctggcagtgtcctactctcacatggggagaccccacactaccatcggcgctacggcgtttcactgctgagttcggcatggggtcaggtgggaccaccgcgctattgccgccagacaaatcctgttttcaatcccgaacaagctgtgtcaccggctactttctgttttccggtcactcttcatctgaaacttttatcgtcttgctctcaatccccgcaaaacaccttcggtgttgtcaggttaagccgcacggttcattagtactggttagctcaacgtctcgcaacgcttacacacccagcctatctacgtcctcgtctcgaacgttccttcagtgtcctctagggacaagggaagactcatctcaaggcaagtttcccgcttagatgctttcagcggttatctcttccgcacttagctaccgggcagtgccattggcatgacaacccgaacaccagtggtgcgtccactccggtcctctcgtactaggagcagcccctttcaatcttccaacgcccacggcagatagggaccgaactgtctcacgacgttctaaacccagctcgcgtaccactttaaacggcgaacagccgtacccttgggacctacttcagccccaggatgtgatgagccgacatcgaggtgccaaacaccgccgtcgatatgacttagagg

SEQ ID NO: 434 - DNA, 33001 bp, Xenorhabdus sp.; identical to SEQ ID NO: 116
  CDS (12460)..(19449)

SEQ ID NO: 435 - DNA, 33001 bp, Xenorhabdus sp.; identical to SEQ ID NO: 116
  CDS (19902)..(20291)

SEQ ID NO: 436 - DNA, 45355 bp, Xenorhabdus sp.
  CDS (26555)..(31012)
acggtcctggaatattaatgacatcggtcaagcgacaaaaacgttgccagctcattcggtcaagcaattgatattccattttttcatcggaaagattatggaaatgtttcaggataatgatgcgaaccatcacctccgtcgggaatggcgggcgtccccctttgggggaaataatacgtgggacgatacggtctagggtgtcagccagtgccgagaaatcaacatatttatcaagaacaagcagcggatcacctaattcatcgatttttcgacggtgatattcggatgcctgtttgtctttttttaaagcagaacgaggcggtatcatgatggcgctaccttgcagagaggtactgtgcctacattttactcaattttgtggctgtgaaaagtttttagaggttcccttagataattttgaataagtaatcgttgctagcattttgcaagaaaacaggagatgtttaaaaaacaatcaattatgtgttttctatgaatttctctaagtcataactcctttcatacgaatttctgaaatcactatactgtcattttacggatcatttttattaacttgatggttggtttaatcatctattttggtatttttattttatctaaatccttagtaacaaaatatgttatgcttttcataaaaaatattatctatatatgctattattacttatatgatctatgttatcatttttaataatttattcttgtgattttgtttttattgctctacattataattgaaatatttaccaaatgttatgatggcagtttatttaatcttgaatgctttatatgggaaagtgtttttatttagttatcatgaaatgaaaaattaatattttattattcattaaaattttcatttggtgtttgattgtgctgtttttatatagttaattaaagggaatgtgttttttatctttatttatttgttgtgtaattaagtttaattttatatcattaatcatgaagatattttttgtgttttaaaagaaattttatatatggaattttttactgatctcttaaatatttcctaggcattgctatgtataaaaaacaaaaaatggaatacctgagaaaaaatttacagtatttacttgattctagaggggaaacccgggtgtcactttgtgaccggacggggcttaatcgaacaacgatctacaatattttagatggtcgggtacaaagtgttcactcctcaacaatccaaaaagtatctaatttttttggtatttcttacagtgagatcgaagcgattgatatcgcagaaaaagagcgcattgatgcaattgtttcttatgaagggaatatgaatccgtgtgctgtcccgctgtttatgcaatctgagtgtgttactgccgagttttatgaaagtaaaattggcacacttattgttggaagaacattaacttattattttggttctggccctaatattgtcgctattttacttgagaatgatttttcgggtaaatataatgctggtgatttactaatagtcaggagaggtaattatcagagcgacaatcctaaattatgtttcgatccaaaacagaaaaaatttcatatcaatgagtcttgtgttgagaattcagacgattttgcagtgattggagatataatggaagagcggtttgggtatgggaaaaaaatataaattattgggatttaacagttacgataatacagccaatgtattaattttatcaacaggaaaagttttaaaaatcaatgtgaaggagttagaaaagagtgaaatagtagatgatttcgatagtcacgaaacgaaatcgctctacagaaaaatatactctagttttccaaattcaccctcaatctatgaaattgaggagcgtaacgaaaagtcctgggttgtttattcacttctcgccctgttactaacaattttctatactttcagtaatatagcagcagcgaaacctgtctatattgaatattttgatattattgtgactccggggacgttcatttatccgttctcatttttagttattgacttgctcagtgagttttacggattccggctggcaagaaaagccatatacatgtctctggcttctaatctgattattgtctcgttattaagtatatcgacgggtctaccggctattccgggctggggattgaatgagcagtataatgctttgatgaatcacatcttgtcggcgatttttgcttcttcattgtcatttttagtctcagagctggttaattcgtatgtcttgtgtaagttaaaagacatgacaaattctcggtttctggctctaagggtgttttttagtacgtttatagcatcaatccttgatagttttgttttctgttttgttgcattttacggaaaacttcctaccaatcagatcattggaatgatggtagttcagatcttaattaaaatcttctttgctttgtttaacgtctttcctgcctatggctcgcgttatttgttcaatcgctgggttgttaaggctgcacattaatcaaccgcatggagagcatttctccatgctatttcatcgataaaatcctgcctaatgtagtataacatcctgctatatcccctgttttccatgttgattctttgttgtctgggcgcctttattgtcgtaatacaactcgaaactcatgggattatattgatgaaatggctgatggttagccttcaatttaaattttatcgtgattaaaaggatgctataaattccgtatatttatacagtagtacttttcatattcatgttatctatgcaataaattttgtaaaatatgcttatttttttgcgtttagtaataaacacaatattttaaatttttatttatataaatcaattatataacttaatgttaatcattttgtgttttttgatagctaaataaaaacgcgaatattgtgtagttaaatcaacatttgagcttttatttgttgattttatcatgagtctggtgtattaatttgtctgtaaaaatataagttataattaagattttgtcagataaccggggagtgagttatcactgccttttatttagacaaataattttcattattttgaatatacctaatggatttcgagttgcatcgggcggtaagggaaagactctcaggagcatagtcaactatgtgacagggggaagtgaacgaagccaacaaaatagcagcttgaaagacggaaggtaattagctttaaactaacccaacaccagggtaatctctgaacgttttttgttcttatggtaatcggtctcttggtcagcatcgctggctaagagaccgaaaaaccttcacttggcaacacattctaaatgaatcgttctgccattgttcgataacattcttcctgacctgaaatctcaccaaactcagctcttattatcattccttctataaatgttatcagtgcttctgctttgctctctgcattttcctgattggttgagaaaatagataacaacagtgattttatccatgctttatgttgctgggcatgtttgacgatagcttcatcgtgtcctttaaattcagccagagcatgcatgaacaggcacccttgaaaatcttccgtagcaaaccatgaaaaatgccagtcgaggattgcattaattttttttcaactccctcggctgaagatgcagcagcagtgagttcctgctgaaatctttggtggcgtctgagtaacactccttcaatcagcttatttttagaaccaaagtaacgatacatggatgtctttgatacatttgcctgatctctgatcaagtcgacaccaacagcgttataaccaaattgattaaatagtgactctgcaatatctaagatgtgctcttttttgctcatgatgtttcttcttagttattcaaaaaaattctattgatatggtttttaatataattctaatattgcctgtttgtgaacagatctgtacatttaactcaagtgtacagatctgttcacatgatatcatattattgggattgatggtcttcagctaatctaaaaattaaataacccatatttttgtaatgtagttaagagagcttataaggccattagtttttctactactcgctaaatgatacggagaaaatatgtctgcgttcgttgagaaaaagttacctattcctccatttaattatgaaacagctacacagaaagttcgtattgcagaagatagctggaatacgcgtgatgctgataaagttgtgttggcatacagcaaagatactaggtggcgaaatagaacagagttcgttaatggccgggatgaagcaaaaaaatggctagtccgacaatggataaaagaaaaaagctatcggttaattaaagagttatgggcgacggaaggaaaccggattgctgtaaggtatgcctatgaatggcatgatgattcaggtaattggtttcgttcatatggtaatgaaaattgggagtttgatgaacatggcatgatgataaaccgttttgcaagtattaacgatatccctataaatgaagatgaacgtaaatttcactggcctttggggcgtcgaccagataattatccggggctcagtgaattaggtttgtaattttaataagttaaaaaattaacttatggttttgaaaaattgtggggcttgtacaaagatctccgtacaggctcattagttttggatagatcataatctgtcgattttcggttgaattaacttacttgttcatttcagttcattttactgatgattttcttttagatattgcaatattttattttatactggttttttgagttattattccttcaatggcctatttttataaaaagataataaaccccactttttaacatttattgaaataatcaacattattcccccaccatataatatttgttaatgtgtattcactttgccctcctactgaactcccaaaaataaggaattaaagacatggaacgcgttcccttgcttgctcttttattcactctgactgtttctatctcagcatgtaagccagcagatccgtgtcaggttgatggatcttctttcctcacttgtctgagattagctgatgaaggtgatgcagttgcgcaatataagatcgggaaaatgtatgaaaaaggactaggagttccattagataatcaggaagcaatcaggtggtataccgaatctgctcagcagggaaatactgatgcgcaggcggatcttcatgagcgctattcactgttatttgacagtgcaattttcgcttcttcagcactgcgtaccagactgtagcccagtgtttcgtggtgaactttcagtaaccgtgccagtttttccggctcttgtgcatcccggtgtaaagattttaatgcggttaggttctggcgagagtaaaactctttttgtgcctgcacatcattgatggcaatcgggttccagaactgggtgaggggcatatcaatacctgatgcaaatttactgcctaagccgaaaggatgcatcagttgtttaaaagtcagattgatatccagatcgttaccgccaacacgttgaccggtgtgcgccagtaaactgtcactacgttcggatttaccacaccagtccggccccatctgaatgagcgaacagtctgttgttccgccgccaatatcaacgactaaaacgactttattttcagtcagggtggattcatattccagccccgccgcgacaggctcaaactggaattctatattgcgaaagcctgctcgtttcgctgcctgtaacaaaatcaactcggcctgctggttcgatttttcaccaccacgtccgtgaaagttaaccggccggccaataacgacttcttcaacatattgctgggttttgctttctacctgctgctttatgttggacatcatggcgcaaaccaaatcttcgaaaaagctgatttgcacttctcttagccccatggcaccgaggaaagattttggtgatttgacgtaataagtatcctgagggtcttccagatatcgtgtcagtgcagcctgaccgaatacgatatcttcaggtaaaagttcgatgccttcctcacgatttgccgtaattgcgctgcggagtaactgctcaccgacaggagaacccggagtaatatttctgtggcggaacaagtgctcagaaactgattctcgggttggtgctgccagtgcagaaggcatataaaaattgtcattttcaatagcgatcagctgtggtgtatttccgatcatttctgctactgcgcaatttgatgtgccatagtcaaaaccgatgaacataggtttcctcgtcttcaattgtcgaaaaatcgtaaaaagggcgcagatgctatcgcaaattaaattcaaaggcgagtgacttcgataagattatctggatggttttgtcaggctggtttccagtaagctgaaatatgtgctggaaaccagtttagtatcagaaaggcggcggatatttaccgttttcagaaaaggtagattatggcgtcaaagtttattgcgtttcagcccgtttttgcattgctctggcatgataggcgatatgctcttcaataaagctggcaatgaaatagtagttgtgatcataaccttgacgaaagttgattgttatcgggtaattttcttcattacaggcattcagtaataagtcggggcgcaactcgcgattcagaaaatcgtcacccgttccttgctcaattaaaagtggtaattgttcttttacttcaccatttttaattaattctaccgtatcatattgtttccatagcgttcggtcttcgcccagataagcagaaaacgctttttctccccacggaacctgactcggggctacaattggcgcaaatgccgacacactgcaataacgttccgagtttctcaacgcaataaccaacgcgccatgtccacccatagagtgcccactgatggcccggatatcgttaacattaaattgcttctcaattaactcaggtaactctgaaacaatgtaatcatacatctgataatgcgctgcccagggctgtttcagtgcgttgagatagaatccggctccttttccaagatcgtaagcgggatcgtcaggaatatcatcgcctcgcggactggtatccggaacaacaataacgatgccatgttctgaggcgtaacgctgagcaccggctttggtaatgaaattctgctccgtacaggctaatccggagagccagtacagtaccggtaatttcttgtcttttatctgaggcggcagaaaaactgcaaacttcatctgacaattcagagtactggattcatgttggtagacatcctgccatccgccaaaggatgcgcgatgttcaattctttccattacttttctctctaaaacggtagaatgtggagactgtgcaattagtagtgaattaccgtccggatagatttaccttcatgcatcagctcaaaggcttcattaatatcttccagtggcattttatgtgtcacgaaaggttccaactcaatttcacccttcattgcatcttcaaccattcccggtagctggctgcgccctttaacaccgccaaaggctgttcctttccatgtccgaccggtaacaagctggaatggacgagtagaaatctcctgtccggcacctgcaacaccgataataactgactgaccccagccacgatgagcactttcaagcgctgcacgcatgacgttgacgttaccaatacattcgaaagtatggtcaactccccatttcgtcatatccagaataacctgctgaataggtttgtcatgatcgttggggttgatgcaatctgtagcaccaaattgtctggctaattcaaacttagtcgggttggtatcaatagcgataatacggcctgctttggcctgacgtgctccctgaaggacggcaagcccgataccacccagcccgaaaacagcaacagaatctcccggttgaactttagccgtattatgtacagcaccgatacctgtcgttacgccacaacctaacaggcaaacatgttcatgatttgcttccgggttgatttttgccagtgaaacctcggctacaacggtatattcgctgaatgtggagcatcccatatagtgataaacaggttgtccgttgtaggaaaagcgggttgtcccatcaggcatcagaccttttccctgagtatcgcgaacggcaatacagaggttagttttaccggactggcaaaaatcacattgaccacattcagctgtatataatggaatgacatgatcgccgggtttaacactggtaacgccttcaccaacttcaataacgactccagcgccttcgtgtccgagcacaacagggaataaaccttcggggtcatcacctgaaagcgtaaaagcatccgtatggcaaacaccggtatgactaactttgatcagtacttcaccggctttcggtggtgctacatcaatttcaacaatttcgagtggtctgtttggcccaaaggcaacggcagcacgtgatttcataacatccctcttttcgatgagataaaaaaataaaggtgagattgtgtgcatatggctatgacgtacacagaaaaagttgtatcgcaaatttactcatcaattgattgtgccagatgaaaattatgcacgatattgcattcagtttacctgattgtgagtgataatcatcatgtactgtctaatcgctttgttgcgataattaccagcgctctttagccaaagatgatttgccagaatcaagactgcaaatgtctcgtctggataaatcctcccaagagtctacgattaattatctttgggaatttttgccccgccatgttttcctcataaaaataattatttttaacaaatgtatttttataattgatatggttttaactaatttaaccccaattctggataagaaattgacgagaagcctgttcaaggagccgtgttttggtgcaagtcgaaacagctccggggaggaacaggctatgaacaacttagttgaaattttcatcgatgtcgatgacttttgtcgttttttcattccacaatgggaacagttttgtctcaataagggatatcgcctacgtcgtagaaaaggtcacatgtatcccagtgaaatcatgaccatcctgatcctctttcatctgtcgcattatcgtgattttaaaaatttttatctggagcatatttggcgatatcatcatcacgattttcccaccttgctcagttatactcgttttatcagtgtcgcgccttccgttttagtgcctctgtgcagctatctgactcaattaaaaggaaaccctacggggatcgcctttattgactccacgcgtttgagcgtgtgccataatatccgtattccccgccataaggtatttgaagggacagcacagcgaggaaaaacctaatgggggtggttttacggtttcaaattacacctgattattaaccatcttggcgaaattctggccctcaaaatcacggctggaaatacggatgacaggaaagtggttcgggaattagcaaaagaattaatcggttccttgtatggcgacaaaggttatcttagtcaggaactggcaaacgatttagcacaaaacggtgtcactttcatcacgaaaaagcggagtaatattaaagcgagtgtgctggaagattgggataagataatgttatcaaggcgttttattatcgagacggttaatgggcaattgaaatatatctgtcaaatagaacattctcgtcatcgaagtataaaagggtttctgttgactgttttaacggggttaattgcttattgtcataaaaagaagaaaccatcactgaaagttttctactcagaagaagaagatattccagtgacagcttaaacagaattggggttaagttaattcttaatcgggaaagtggtcttaaatttaaaacaggcggtgttgtcagagtggttgataattaaataaagataattaaataaagataattaaataaagataattatacattaaaattttaactgggatttaaaacgccatgaataattgtgtttattcttaattttaatgtctttttttaaaaaaatatatcaaaataaaatcccttttatttaaaaatttggtgaagttgggagatcgacagttattgggaacggtagaggtcatggtatttgagataataccgagtaattttttttattgaatttttatctatgggttataaataaaatctatgtttttatcatttgattgcataagaaaattatcttcgagaattatttttttgaagattaggagttaattatgaaaaaatataaatggttagtattaatattgactgcggtatgttgttcattttctgctaatgttggaaatggagaaaagaaagctgagtctaataataaacctgatattagcatcgtcaaatcagtttctttattgacaaaatcaaatcaggaggaatatagaagtgcgattggatgtggttcgggttatgtggttgggttctttgtcgctccatttgataagaatacttgggcagtttggttatcagatgcaggaaggtgggcctccagtgccaagatttattgggcatacggccgagcaaaaaacgataatgatggtggaaaaagtatttatgcagcccttttagctgctcaggctagtggacaaaaggtaaatatccgtgatgatggcttcggtgatggagatatacaacatataaaatgtgaaaaagcccattttacgccagaaagcgtatacacaggctcaaaatttgactctgtagaaatttggttcccataacaatgaaaaaatatacttctcaacgataaaagtcctcacatagaatgaggactttttgttatttaataatcctttgttgtgtagtaaacgtgttaaccacgtcatttacaatgaagaatgctcaacaacaatcgtgccaatctctggattgctgaaactgataatgtgatccaatcttaactcacgggtttcttcatttgattcgacgagaatgtattcgattttttttctcataatcaattgaattgcttttccttcaaaaatctcaccacctcgcagttggatatgtagatgaagctgattctgacaggttagctcaaggctctcataatcatcacaattaatgggttgatattcagtatctatagacatattcgctcaccactatgttagtggcggttatcgtgccgcccgcgattgaccaaactcagatgcaaaaaaatgctacctacgactatagcacagtaagtttttcctgatgactgtgactatataagtttgttgagttacattgaaaaagccagtaggttaaagcctaaccttatcattaggcaacaaaattacgtcatattagcgggttttgcactgtgtattttgagatacggtaaagtaatgtcaaaactgttcatgtcttatgtgtaactcatgttaaaactggactttctgctgcatttattggatgaaaatgatgaataagaacatattgcttgctttggtcgcatcgggtgtactgactgcggttggatgtcagactaatcttcctgcacatcaggttgactcgacatccccaaataaatttacaatcaacgagaaagtgtttaaaggcgtgataccttgtgctgattgcgcaggtattgaaactaccttacaacttgcgaaagatggttcgtatattctggaacaaacctatctgaaatcagggcaagaagagcctttttttgatacaggccattggatcgtcaatggtaaaaaaataaacctgaccagtggagaagaaggtaaaaaagcgtattaccagatgaagggagaaaatctggttatgctggatataaatggtgagccaatccagtccaaattgaattatgagctgacaaaagtcacacctcaaaaactggccggagaatatatctattttgcggatagtgcgacgtttacggagtgtcgtacagggaaactctacgatgcatcggaaaatatcgatctggagcggggttacagcgcaacagggattgcaggtggtaaacctgtttatgttgaagtcgagggatattatacgcttcgcccttcaatggaagatggattatttgataacgcgataattcagacaggtaaaatccattttgataagtcgtcttcctgccagactaaaaagtaagtagtgatagagcgtattctggcatataaaaaaacctgcgcactgagtacgcaggtttttttattactgactttgcctgatcgcaagatcaaggcttaatcatgattgtttgatgttatttttcaggtaatccaccacgtcttccagttttagcatctgcttatcaccggtacgacggtatttgtattccactttgtcgttatcgagattgcgatcaccaataacgacagtatgtgggacacccattaattccatatcggcaaacatgacacccggacgttctttgcgatcatccaaaatgacatcaataccattagaacgtaagtctgcataaagcttttctgccacttctttgacacgataagatttatgcatgttcattggcaaaatggctacctggaatggggcaatggcatctggccagataataccgcgatcatcgtgattctgttcgatagcagccgcgacaattcgggtgacaccaatcccataacatcccatcgtcacaacttgattgtggccatcttcgttctgtacggtagctttcagtgcatctgagtatttggtgccgagctggaagatatgaccgacttcaataccacgcttgatcagtaacgtgccctgaccatccgggctggcatcaccttcaaccacattacggatatctgcaatttctggcagaggaagatcacgctcccagttaataccgaaatagtgtttatcatcaatgttggcgcccgcaccaaaatcactcatgacagatacagagcggtcaataattacaggcataggcagattaacagggcctaaagaaccagggccagcgttgacgatagcccggatttcttcttctgtcgcgaattgcagcgggctggcgactaaggccagtttttctgctttgacttcatttaattcatgatcaccacgaaccaacaaagcaaccagtttgtgttcgctttcttctgcagcatgaacaatcagagtcttgaccgttttttcaatcggcaggttgaactgttctaccagttccgcgatggttttcgcctttggtgtatccaccacacgcatatcttctgtcggagcagcgcgttctgcggatggcatgacagcttcagccagttcaatattagctgcgtagttagactctgtggagaaaacgatatcatcttcaccgctggcagccagaacctgaaattcgtgagatgcactaccaccaatggaacctgtgtcagccagaacagcacggaaatccagcccgatacgggtaaagatcttactgtaagcatcgtacatcttatcgtaagtctcttgcagggattcctgagtggtatggaaagagtatgcatctttcatgatgaattcgcgtgagcgcatcacgccaaaacgtgggcgaacctcatcacggaatttggtttggatctggtacagacttagtggtagctgtttataagaagtcacttcattgcgaaccagatcagtgatgacttcttcatgggttggtcccagaacaaaaggacgggcaccgcgatcttcaaaacgcagtaattccgcaccatattgtacccaacgaccactttcctgccataaatctgctggctgaactaccggcatggaaacctcaaccgccccggcattattcatttcgtcacgaacaatgttttcaacttttctcaacacgcggacaccggttggcatccagttgtacaaacctgaagcgagtttacggatcattcctgcacgaagcatcagtttatgactgactacttctgcatcagcaggcgtctctttcaaagtagacagcaaatattggctagtacgcatagtaagtttccattggacagcaaattgcttctaggtggcaatgaagacagtgccaccgaacccaaaaataaagtaaaccgttagtctaccagtgagtttgtgatgtcaaaaggagttttcagcggagttcgatagaaactacttctgttatggcaccattaattaaccaacggacattaaaatccagaatatgagcagcatatatgcggttttcctgctcttttttgcggtaggccggacgcggatcctgagccagaatctggcagataaagcgtcgtaattgcggataacttacctgatggcataaaagttgatgttctgcgtttgaagaaaaacagacctccatatctgtatttggcgcttcctgagcaaatcctgctttggcatcaggacgtgattcagcaaaaggcagataaggtttaatatcaagtacgggcgttccatccacgagatccaggctgccaagttgtagcagcacgcgattattctggtaatcaatcccttttagttcaactaaagacatcccaatcggattagggcggaaagttgagcgagtggcaaatacacccattttggcattaccgcctaagcggggagggcggaccagcgggttccagcccccattcatcgtttggtgaaaaacgaaaacaatccataaatgactgaactgttctaacccccgtatagcatctgcctgattataaggagcgagcaattcgagttgccccgtgccatcttccaccagacccggctgacggggaatggcaaacttctctttataaggagaatgaatggttcctatttgagtaaaatgaaaatctgccatgagtctttttcagtaccaaatttacaatgaataattaaccccaattctggataagaaattgacgagaagcctgttcaaggagcagtgttttggtgcaagtcgaaacagctccggggaggaacaggctatgaacaacttagttgaaattttcatcgatgtcgatgacttttgtcgttttttcattccacaatgggaacagttttgtctcaataagggatatcgcctacgtcgtagaaaaggtcacatgtatcccagtgaaatcatgaccatcctgatcctctttcatctgtcgcattatcgtgattttaaaaatttttatctggagcatatttggcgatatcatcatcacgattttcccaccttgctcagttatactcgttttatcagtgtcgcgccttccgttttagtgcctctgtgcagctatctgactcaattaaaaggaaaccctacggggatcgcctttattgactccacgcgtttgagcgtgtgccataatatccgtattccccgccataaggtatttgaagggacagcacagcgaggaaaaacctcaatggggtggttttacggtttcaaattacacctgattattaaccatcttggcgaaattctggccctcaaaatcacggctggaaatacggatgacaggaaagtggttcgggaattagcaaaagaattaatcggttccttgtatggcgacaaaggttatcttagtcaggaactggcaaacgatttagcacaaaacggtgtcactttcatcacgaaaaagcggagtaatattaaagcgagtgtgctggaagattgggataaaataatgttatcaaggcgttttattatcgagacggttaatgggcaattgaaaaatatctgtcaaatagaacattctcgtcatcgaagtataaaagggtttctgttgactgttttaacggggttaattgcttattgtcataaaaagaagaaaccatcactgaaagttttctactcagaagaagaagatattccagtgacagcttaaacagaattggggtttattacgttaattgacaacgataacacggtcaatggctttattcatttctctaattttaaaataatgccaaatttgttatccaatatcgtttcactcagtatcgttataccagtaatacacttgccagatatatcattctttcccatcactccgtcccaaccctatggcaatcaaatcaacacaaccaacccaatagaacctgaagtgatgtgatggacgctccctttttcagcggcaaacagtgccatctttctttccgatgccctgaatttcgagagaacatctaatgaatacgattaaagtcgttggcattgacctcgccaaaaacgtttttcaagtctgtgtctggatggaggacggttctgtcgcctcgaaccgaaaaatttcacagcaaaaattgcttgatactatacgcacttttacgccagggaccctcattactatggaggcctgtgtcacttctctctattggggcagaacccttcaggcgatctgtctcttgacctatgaaatatgatcaagagacagctttacttgggggctgggatatttaaaatcgtttacacaagaaaagaggccccgaaagcccgttgaaaatgtaaagatctttatcaaccgacgtaatatttaggtaagaggatgacggtactcttcccaatatggagaatatcgtatcaactgtgggtgggatattgtcattaacccataattttacatttataattttgaatgtgtatatctgatccttatcaaaatcagtgtaattaatctttacttcacgatcgattatgtaatttttattatctattgacagtacacctttctgtatcaataaacctgtcccattaccatataaaaataaaaaatttttttcatttaaattggcgagatcagtgttattaacttttctacgtaaagttaactcacccgcgcatcgaatctcgatgttattttttttattgtccacattgataatttcaaaggatgctattaacaaaataatggaaagtaatgaaagcccaatatataaccaatggttttttttcatcgatttgcaccaatgttgtttaatatgcttctgcagtctttaggtttgttattcttgtctaagccacatatgcctataaaactaacttgtatgtcctgactgccactgcgtgtttttttgtagtaaatattacccttcgcaaagtcgcaattaatggcttctttgtcgatatcttgtttggctatatcaatataatttccacccacatctattgggagatctcccaatgcataaacgtcacattttccaacgctataaagaaatgttgttttttcatcacgtacgtttaggtgtttgaatttaataaaagcttcataagaagcgtagctacagaggaaaacgaatgtcatacatataacgaatttttttatttgttgtttttggggccttgtgaaaatagtgttatcagcggggggctttaattgcacctcactttcattaataggaaaaacattattttcactctgttcaattactgactctacagcaccctcgaaacgaaaacctactttaggaatggtgatgataatctttggatcccttcccaaggattcaaatgattttcgaatctcgcttacagcgacattgaggctattgtttgaacatgtaaaaccataatcctcccatacccttttcaataaatcttcccgatgaagagtttcattgctgttagtgaccatttcaagcagcagtcgcgctgcttggtttgatagtgtgatttcatgattgctatcgttgagtaatgacagttgtttgtctgcaggtgagtatatgatggtaaagtttatgacgtatttcaatgacttaattccaaacagattaagatctttcttaaaaaaataacagatctatagattttcaatttgctcgtcaatggttttatttaaaaggagtgaatgatctatcctctgtttttaaagaggtattaactgctgctgcgtgtgttttttttattattattggcagttaattattataatatgcatttttaaggaataaaaatctttttaatgaaataaattagtataatgttttgtttgtttttttattctctatcattgtcgccgttgtcacagaggttctctgctttaccagatgcgcagtgtgactcgggaaaacggagctcaggttataagaggtcagtgttgagttcttcattcatcataggatgtgcttatggggtgacttatgcacttgatgtatatatttacaatctgagcgtatggagttacacaccaaaaaatagattaagccgcaagcaatgaattaaaaaatggtcactaaatatcgaattttattcttaacagtcatattatttttatttggatgcagtagtaacaaaaaacatgcatcaactaaaacctatgacagagttaaatacactgttgttaataacactcaatatagcctctctgtaattcgaaaaaatgtggagtgggatagctgagtttccatacctctatcaactactcagtcttatggaaaggattcattttctaccgatactgagagtaacgtaggatattcaatttatggaggaagctttgacgtttattggaacttgtcacattgggattctgttaaaaatcttttgccggtaaatgatccacacaaattgtacgatatatatcgtgtaaaaaatgcaagaaacacatatacagtctatgtcaatgaaaaaatgcagcaaaaaaatataatgttctcattatgtcagaccctcaaccttttcgtttagataccagcagtcataacccaaacaaggaccgttctgaatgggaatcatttaatggggtggtttcaaatagtataaaagagttaaaaaatgataaggatctcgtatttgggattgttaatagtgatatcactgaatttggtagatgagatagcagagagagcataaaaatcagtggggaataataagtgctccacagatttttatgccctcataggaaagtagtttacaaaatattgtctacccaactttctggacatcttccataaaataattaggattattatgtacagtgcgaatgtattactgaacaaaatcaatcaaactcgcgacggtcaatcaatgaccctcgccgatcttcagcctttctcattcagcgaattaagaaaaatgttcgaggaacagcttagctggggagaaacccgctatctccatcacgaagccgttgaacaaggaaaacgtcatcgtctgctggaagcccgtattttcacccgtactaacccgcaattatccggggctatccgcttgggtattgaacaagacaacctttcacgcagttataatgaaatgtttggctcccgctcttcttcctttgtcaacccaggctctgtagcttccatgttctcgccggctggctatctcacagaattataccgtgaggcgaaagacctgcatttcaacagttctgcttaccatcttgataatcgacgcccggatctggctaatctgacattgagtcagaataatatggatgcagaaatctccaccctgtcactgtctaatgagctgttgctggaacatattacccgcaagacgggaaaggactcggatgcattaatggagaacctgtcgacttaccgtcaggccattgacacgccttaccatcagccttatgagactattcgtcaagtcattatggcgcatgacagcaccttgtcagcgctgtctcgcaatccggaggtcatggggcaggcggaaggggcgtcattattggcgattctggccaatatttcgccagaactttataacattttgatcgaagagattacggaaaagaatgctgatgctttatttgcgaaaaacttcggtgaaaatatctcccccgaaaatttcgcgtcacaatcatggatagctaaatattatggtcttgagctttctgaggtgcaaaaatacctcgggatgttgcagaatgactattctgacagcacctctgtttatgtggataatatttcaacgggcttagtggtaaataatgaaagtaaactagaagcttacaaaataacacgtgtaaaaacagataattatgataaacatgtaaattactttgatttgatgtatgaaggaaataataagttctttatacgtgttaattttaaggtatcgagagagtttggggctactcttagaaaaaacgcagggaccggaattgtcggcaacctttccggtcccctagtagccaatactaatttcaaaagtaattacttaagtaacatatctgataatgaatataggaaaggtgtgaaaatatatgcttatcgctatacttcttccaccagcgccacaaatcagggcggcggaatattcacttttgagtcttatcccctgactatatttgcgctcaaactgaataaagccattcgcctgtgcctagctagcggactttctccgaatgaactacaaactatcgtatacagtgataatgcacagggcattatcaacgactcggtgctgaccaaagttttctatacgctgttctacagtcaccgttatgccctgagttttgatgacgcacaggtgctgaacggttcagttatcagtcagtatgccgacgatgataatatcagccactttaaccgtctctttaacatgccaccgctgaaagggaaaatctttgaagccgacggcagcacggtcagcattgatcccggtgaagagcaggcgacctttgtccgttcgtccctgatgcgcgggctgggtgtcaacagcggtgaactgtatcagctgggcaaactggcgggtgtactggacagcaaaaataacatgacgctttcgggctctggtatttcctcactttatcggctgaatttactggcctatgcccatcagctaacggtcaatgaactgtgtatgctttatggcttttcgccattcagtggtaaaaagatggcttctctgtcttctgaggaactagcgcggctggttatctggctgtatcaggtgacgcagtggctaactgaggcggaaataacgactgaagagatctggttattatgcacaccagaattcagtggaaatatttcaccggaaatcaataatctgctgaataccctcaaaatacgtattagtgaggatatcgcacagagtggtgatagagagttgcaggctgaaatcctagcaccctttattgccgctactttgaatctgacgtcaccggatatggcgcgttatatcctgttgtggacagataacctgaaaccgggtggtctggatattgccagatttatgacgctggcactgaaagagacgttgaatgacgatgaaactacccaactggtgcagttctgccatgtgatggcccaattgtcgctttccgtgcagaagttacgcctcagtgaagcagagctttctgtgttggttatctccggtttctcggtgctgggggcgagaagtcaacccgccggacaacacaatatcgatactctgttttcactctaccgattccaccagtggattaacacactgggtaatcacagttctgacacgctggatatgctgcgccagcagacgctgaaagcagacaggttagcttcggtgatgggtctggacatcagtatggtgacccaggccatgacctgcgctggggtgaataaccttcaaaactgggagaatatcaataccgtacagcaatggatggatgtggcctcagaactgcacactatgccgtcggttattcgtacgctggtgaatatccgctatgtgacggtaacgaataaggcagcgccagaattaccttcctggaatgagtggcaaactctggcagaaaatatggaagccgggctcagtacacagcaagctctggcgctggcggatcataccgcagaacgtctaagttcaatgctatgtaattggttccggcgtaatatccagcccgagggtgtatccctgcaaagtcggaatgacctgtacaggtatttcctgattgataatcaggtttcttctgccgtgaaaaccacccgactggcggaggccattgccggtattcagctctatatcaaccgggcactgaaccggatagaacccaatgcccgtgccgatgtatcaacccgtcagttctttactgactggacggtgaataaccgttacagcacctggggcggggtgtcgcggctggtctattatccggaaaactacattgatccgactcagcgtatcgggcagacccggatgatggatgaactgctggaaaacatcagccaaagtaagctcagccgggacacggtggaggaggcgtttaaaacgtacctgacccgttttgaaacggtggcagacctgaaagtggtcagtgcctatcacgataatgtcaatagcaacaccgggctgacttggtttatcgggcgaacgcgggagaatctgccggattactactggcgtaacatggatatctcacggatgcaggcaggtaaactggccgccaatgcctggaaagagtggacgaagattgatacggcgctcaacccatacggggatgcggtacgtccggtcatattcagggaacgtttgcaccttatctgggtagaaaaagaggaagtggcgaaaaatggtattgacccagtggaaacctatgaccgttttacactgaaactcgcgttcttgcgccatgacggcagttggagtgccccctggtcttacgatattacagaacaggtgatggcggttactgacaataagcctgacattgaacggttgggactagcggtatcaggttttcaggccgaggataccttgctggtgtttgtgtacaaaaccgggaaagattacaacgatcttggcggcagtaataaaaatgtggctgggctatacatatattcagatagcacttgtaatccaatgaatgtagaacaactgagccgctattctataattaaaaatactttcgatactattccatcgaatggagcgcgtattgttaagcgggcaaattataaatttgctcaggactttgatattcctggctctctggcgttgaattcctcatctaatcacaattcatctgtcgctatagacaacgcatcaataccacaaatatcttacgtctattcaagcgagagcttagttattacactaaacaatccggaatttaccctaaattatcgagtaaatgcaaacgatgatctcaggcgaagtcaattagttgcaatgaaggcttgtggcagacaaggcgataattttatttatgcagataaggtaacacaagggaactgggtagggctagaacgtatagatggaccaatttgtgtttataatgcaaccaatgacactattggtttaactctaaattatctttttaatcttcctgaaaactcttatagtttcataaatttatcgggggagaatacggagggacctttattctcctttagtataagtaatcatgagacggtaataaattttcctgttggttcaaaccgccagaatgattttaaaaaatgtaactatgctttctgtacagtggttagtgatgatgatccattagctatagctcattcttgggccacaacatcaaattggctctatttaaatacagatgtggatgcaaaaaatattttattttcggctaatgtaaccggagaggtttatacttttactgcagaggaaaacataaaagaactcccgtcccccagctttgaaggcatgaattacgtatttaatcctattgttttgaatgcgtcagatttaacctttattcacaatatagcatccatagatctttattttgaaattaaagatgaaaatggaagaaatattgggaaggcgagttctacgctgacaataaaaaaagtcaattactctccagatagtattcttcacctgtatgatactgatgctggtgtacagtatatgcagctcggagtttatcgcattcgccttaatactctgctggcacctcaactagtgtccagagcgaatactggcattgatagcattctgactatggcgacgcagcagctaccggaacctcagttgggcaaaggcttctatgctactttcactttgccaccttacaatccggcaacgcatggaaccagccgagcgttcaagcttaaccttaaacatgtcgttgataataatgttcatgttatctactcggggctgctacaagatatcgagcttgctgtccggctctttattcccctggatgatacaccgcttaataatgaatacattgccaaggtgtttttaaccacccagaagagtcccaatgacgttgccaagagtgggccacactttaagtatgataagagtaataacaatgaaatagtgatcaatcctgaccattcgaataccagtatgtttgccggtgtgcagatacacaacggcaccaccaccgaacccttggattttaacagcgcctgtgccctctattactgggaactgttctactacaccccgatgatgtgcttccagcgtctgttgcaagaaaaacaattcgacgaagccacaaaatggatgaactacgtctacaatccggctggctatatcgttaacggagaaatcgcgccctggacctggaactgccgaccgctggaagaaactacttcctggcatgccaatccgctggatgccattgacccggatgccgtcgcccagcatgatccgacccactacaaagtggccacctttatacgcctgctggatcagcttattctgcgcggcgatatggcttatcgcgaactgacccgtgatgcgttgaatgaagccaaaatgtggtacgtacgtgctctggaattgctcggtgacgaaccggaggattacggcagcagtcagtgggcggcaccgtctctttccgtcgcggccagccaaactgtgcaggcggcctatcagcaagaccttgcggtgctggacagtggagaggttaccacgcagtcccgtaccgctaactcactggtcgggttgttcctgccggaatataacccggcgctcaccgattactggaaaaccctgcgtctgcgcctgtttaatctgcgcaataatctttccattgacgggcagccgctatcgctggcgatttacgccgaacctgctgatccgaaagcgctgctcaccagcatggtgcaggcctcccagggcggcagtgcattgccaacaggcaccttatcgctataccgcttcccaatcatgctggagcgggcccgcaatctggtggggcaattaacccagttcgggacttctctgctcagtatggcagagcatgatgatgctgatgaactcaccaccctgttacttcagcaaggcatggagctggcgacacaaagcatccatatccagcaacggacagtggatgaagtcgatgccgatattgccgtattggcagagagtcggcgcagtgcgcaaaaccgtctggagaaataccagcagctgtatgacgaagatatcaaccacggagagcagcgggccatgtcactgtttgatgcagcggcaagtcaatctttggcaggtcaggtgctttcaaccgccggaggagcggtcgatttggcacccaatgtatttggtttcgcttgtggcggaagccactggggagcaccactgcacgccgctgcgtctgtcatgtcactttccgcgacggcttcccaatattctgcggaaaaaattagccgttctgaaacctatcgccgccgccgtcaggagtgggaaattcagcgtgataacgctgacggtgaagtgaaacagatggatgctcaactggaaaccctgaaaatccgtcgtgaagcagcacaaatgcaggtggaatatcaggaaacccagcaagcacagactcaggctcagttagaattattacagcgtaaattcaccaacaaagcgctctacagttggatgcgcggcaaactgagtgctatctactaccagttctttgacctgacccaatccttctgcctgatggcgcaggaagcgctacgccgcgaactgaacgacaatggcgtgacctttatccggggcggtgcctggaacggcacgaccgctggtctgatggcgggtgaaacactgttgctgaacctggctgaaatggaaaaaaagcctggctggagcgtgatgaacgggcactggaagtgacccgtaccgtgtcactggcacaggtctaccaagctttaccatcagacagctttaacttggcagaaaaactcacgcagttcctccgtgacggcaaaggcaatgccggcattaccggcaatgagctgaagctcagcagcggccagattgccgcctcggtacggctgtccgacctgaatattttcagcgactaccccgacaaaagcctcggccgcacccgtcagttaaaacaggtgagtgtcacgttaccggcgttgatcggcccgtatgaagatatccgggcggtactgaactatggcggcagcgtggtgatgccacgcggttgcagcgccattgccctctcccacgggatgaatgacagcgggcaatttgtgctggatttcaacgatacccgttacctgccgtttgaaggcattccggtgaatgacaatggcagcctgacgctgagcttcccggatgcgactgatcggcagaaagcgctgctggagagcctgagcgatatcattctgcatatccgctacaccatccgctcttaatttaaaacattgtgataggcaggctcctgcgggagcctgtttaaggagtttttatgcagggttcaacacctttgaaacttgaaataccgtcattgccctctggcggcggatcactgagaggaatgggagaagcactcaacgccgtcggagcggaggggggagcgttattttcactgcccttaccggtctctgtcgggcgaggtctggtgccggtgctatcacttaattacagcagtactgcgggtaatgggtcattcgggatgggttggcaatgcggggctggctttatcagtctgcgtaccgccaagggcgttccacactatacgggacaagaggagtatctcgggccggatggggaagtgttgagtattgtgccggatagccaagggcaaccagagcaacgcaccgcaacctcactgttggggactgttctgacacagccgtatatcgttacccgctatcagtcccgcgtggcagaaaaaatcgtccgtttagagcactggcagccgcagcagagacatgaagcaaagacttctttttgggtactttttactgcggatggtttagtgcacctattcggtaagcatcaccatgcacgtattgctgacccgcaagatgaaaccaaaattgcccgctggctgatggaggaaaccgtcacgcataccggggaacatatttactatcactatcgggcagaagacgctcttgactgtgatgagaatgaacttgctcagcattcaggtgttacggcccagcgttatctggcaaaagtcagctatggcaatactcagccggaaaccgcttttttcgctatgaaatcaggtatccctgctgacaatgactggttgtttcatctgatatttgattacggtgaacgttcatcttcgctgaacgccgtacccgaatttaatgtttctgaaaaatggcgttgtcgtccggatagtttctcccgctatgaatatgggtttgaaattcgaacccgtcgcttgtgtcgccaaattctgatgtttcatcagctaaaagcgctggcaggggaaaatgttgcagaagaaacaccggcgctagtttcccgccttattctggattatgacctgaacaacaaggtttccttactgcaaacggcccgcagactggcacatgaaacggacggtacgccggtgatgatgtccccactggaaatggattatcaacgtgttaatcatggcgtgaatttgaactggcagtccatgccgcagttagaaaaaatgaacccattgcagccataccaactagttgatttatatggagaaggaatttccggcgtactttatcaggatgttcagaaagcctggtggtaccgtgctccgatacgggatatcacagccgaaggaacgaatgtggttacttatgaggatgcgaaaccactgccacatattccagcacaacaggaaagcgcgatgttgctggacataaacggtgacgggcgactggattgggttattactgcaacagggttacggggctaccacacaatgtcaccggaaggtgaatggacaccctttattccattatctgctgtgccaatgaaatatttccatccgcaggcaaaactggctgatattgacggggcagggctgcctgacttagcgcttatcgggccaaatagtgtacgtgtctggtcaaataatcgggcagggtgggatcgcgctcaggatgtgattcatttgtcagatatgccactgccggttcccggcagaaatgagcgtcatcttgtcgcattcagtgatatgacaggctccgggcaatcacatctggtggaagtgacggcaaatagcgtgcgctactggccgaacctagggcatggaaaatttggtgagccgctgattatgacaggcttccagattagcagggaaacttttaaccccgacagactgtatatggtagacatggatggctcaggcaccaccgattttatttatgcccgcaatacttaccttgaattctatgccaatgaaagtggcaatcgttttgctgaacctcagcgtatcgatttaccggatggggcacgttttgataatacttgtcggttacaaatagcggatacacaaggattaggtaccgccagcattattctgacggttccccatatgaatgtgcagcattggcgattggatatgaccacattcaagccctggctgctgaatgccatcaataacaatatgggaacagagaccacgctgtattaccgcagctctgcccagttctggctggatgagaaattgcaggcttctgaatctgggattacggctgtcagctacttaccgttccctgtgcatgtgttatggcgcacggaagtcctggatgaaatttccggtaaccgattgacgagccattatgactattcacatggtgcctgggatggccgggaacgggagtttcgtggctttgggcgtgtgacgcaaactgacattgattcacgggcgagtgcgacacagggcgcacatgctgaaccaccggcaccttcgcgtactgttaactggtacggcactggtgtacgagaagtcgatgttcttctgtccactgaatattggcagggggatcaacaggcatttccccattttaccccacgctttacccgttatgacgaaaaatctggtgatgacatcgccatcatgccgaacgaacaggaagaatactggttgtttcgggcgttaaaaggacaacgtttacggagtgagttgtatggggatgatgattctatactggccagtacaccttattcagtggatgaatcccgcccccaagtacgtttgttgccggttatggcatcggacgtccctgcggtactggtttcggtggccgaatcccgccaataccgatatgaacgggttgctaccgatccacagtgtagccaaaagatcgtccttaaatctgatgcgttaggatttccgcaggacaatatcgagattgcttatccgagacgtccacagcctgagctatcgccttatccggataccctgcccgaaacacttttcaccagcagttacgacgaacagcagatgtgccttcgtctgacacgccagcgttcttcctattatcatctgaatcatgatgataatacgtggatcacagggctgatggatacttcacgcagtgacgcacgtatttatcatgcagataaagtgccggacggtggattttcccttgaatggttttctgccacaggggcaggagcattgttgttgcctgatgcagcagccgattatctgggacatcaacgtgtggcatatatcggtccagaagaacggcccgccattcctccgctggtagcatacactgaaaccgcagagtttgatgaacgatcgctggcggcttttaagacggtcatggatgagcaggagctgacaaaacagctgaatgatgctggctggaatgttgcaaatgtgccgttcagtgaaaatacagatttcagtgtctgggtgggacaaagggaatttacagaatacgccaatgcagacggattctatcgaccattggtgcaacgcgaaaccaagctcacaggtaaaacgacagtgacgtgggataaccattactgtgttatcaccgcgacagaggatgcggctggcctgcgtatgcaagcgcattacgattatcgattcatggttgcggataacaccacagatatcaatgataactatcacaccgcaacgtttgatgcactggggagggtaaccagcttccgtttctgggggactgaaaacggtgaaagacaaggatatacccctcaggaaaatgaaactgtcccctttattgtccccacaacggtggatgatgccttggcattgaaacccggcatacctgtcgcaggactgatggtttatgtccctctgagctggatggttcgggtcaatgtttctaatcagatcaacttttctaattatgaagagctgaaatcggctgggatcatcactgaagatggttatctcttgtcgcttgcttttcgccgctggcaacaaaataatccttcctctgctataccaatgcaagccaattcacagaacccaccccatatcctgagcgtaatcaccgaccgctatgatgccgatccggaacaacaattacgtcaaacgattacgtttagtgatggctttgggcgaacattacaaacagcagtacgccatgaaagtggtgaaacctgggtacgtgatgaatacggagccattgtggctgaaagtaatggtgaacctaaaacggcgatgacagatttccgttgggcagtttccggacgtacagaatatgacggaaaagggctggctctgcgtaaatatcaaccgtatttcctgaatagttggcagtacgtcagtgacgatagtgctcggcaggatatgtatgccgatacccattgctatgatccgttggggcgtgaatatcaagttatcacggccaaaggcgggttacgtcgatccttattcaccccctggtttgtggtgaatgaggatgaaaatgacactgctgatgatatgacagcataaagttcaatgatgcctgttcgctgaacaggcatcgcttcacttaggaatgaatcatgaagaattccgttcacagcaatacgccatccgtcacggtactcgataaccgtggtcagactgtacgtgaaatagcttggcatcgacaccccaatacacctcaggtaacagatgaacgcatcacctgctatcaatatgatgcccaaggctctctgacgcagagcattgatccgcgattgtatgaacgccagcagacagcgagtgacaataactcggttaaaccaaatcttatttgcctgtcatcactcagtaagaaagtactgcgtacgcaaagtgtggatgccggaaccagtgtcgccctgcatgatgttgctggacgtccacacttagctgtcagtgccaacggcgttagccgaacgtttcagtatgaaagagataaccttccagatcgcttgttaagaattaccgagcaggtaaaaggagaaaaagcctgtatcacagagcgattgatctggtcaggaaataccccggcagaaaaaggcaacaacctggccggacagtgtgtgcgccattatgaccctaccggactgaatcaaaccaacagtatctccttgaccggcatacccttgtccatcatgcatcaattactaaaaaatgatagagaggcaaattggcagggtgtggatgaatctgtctggaaaaacagtctggcgctggaaagcttcaccaccctgagcacagcagatgccaccggtaccgtattaatgagcacagatgctgccggaaataggcaacgtatcgcctatgatgtggccggtctgcttcaaggcagttggttggcgctgagggggaaacaagaacaggttatcgtgaaatccctgacctattcggctgccagccagaagctacgggaggaacatggtaacgggatagtgaccacatatacacatgaacccgagacgcaacgaattattggcataaaaacagaacgtccttccggtcatgccgctggggagaaaattttacagaacctgcgttatgagtatgatcttgtcggaaatgtgctgaaatcaactaacgatgctgaaattacccgcttttggcgcaaccagaaaattgtaccggaaaatacttacacctacgacagcctgtaccagctggtttccgtcactgggcgtgaaatggcgaatattggccgacaaaaaaaccagttacccatccccgctctgattgataacaatacttatactaattactctcgcacttacgactacgatcgtggggggaatctgaccagaattcgccatcattcaccgatcaccgataataactacacaacgaacatgacagtctcagatcacagcaaccgagctgtactggaggagctgacgaaagatccaactaaggtggatatgttgttcacccccggcggacatcagacccggcttgttcccggtcaggatcttttctggacaccccgtgacgaattgcaacaagtgatattggtcaatagggaaaatacgacgcctgatcaggaattctaccgttatgacgcagacagtcagcgtgtcattaagactcatattcagaaaacaggtaacagtgagcaaatacagcgaacattatatttgccagagctggaatggcgtacgacatatagcggcaatacattaaaagagtttttgcaggtcatcactgttggtgaagcgggtcaggcacaagtccgggtgctgcattgggaaacaggcaaaccggcggatatcagcaatgatcagctgcgctacagttatggcaacctgattggcagtagcgggctggaattggacagtgacgggcagatcattagtcaggaagaatattacccctatgggggaaccgccgtgtgggcagcccgaagtcagtcagaagctgattacaaaaccgtgcgttattctggcaaagaacgggatgcaacagggttgtattactacggctatcgttattatcaatcgtggacagggcgatggttgagtgtagatcctgctggtgaggtcgatggtctcaatttgttcagaatgtgcaggaataaccccatcgttttttctgattctgatggccgtttccccggtcagggagtccttgcctggatagggaaaaaagcttatcgacgggcagtcaacatcacgacagaacatcttcttgaacaaggcgcttcctttgatacgtttttgaaattaaaccgagggttgcgaacttttgttttgggtgtggggatggcaagtttgggggttaaggctgcaacgattgcgggagcgacgccttggggggttgtcggggctgcaattggtggttttgtctccggggcggtgatggggtttttcgcgaacaacatctcagaaaaaattggggaagttttaagttatctgacgcgtaaacgttctgttcccgttcaggtaggcgcttttgttgtcacatcgcttgttacgtctgctctatttaacagctcttcgacaggtacagccatttccgcaggaacagcggtagccgttggaggattaatggctttagccggagaacataacacgggcatggctatcagtattgccacacctgccggacaaggtacgctggatacgctcaggcccggtaatgttagcgcgccagagcggttaggggcattatcaggcgcaattattggcggaatattacttggccgccatcagggaagttctgagcttggtgaacgggcagcgattggcgctatgtatggtgctcgatggggaaggctcattggtaatctatgggatggcccttatcggtttataggcaggttactgctcagaagaggcattagctctgccatttcccacgctatcagttccaagggctggtttggccgaatgataggagaaagtgtagggagaaatatttctgaagtattattgccttatagccgtacacccggtgaatggattggtgcagccattggcgggacagccgcggccgctcatcatgccgttggggaggacgttgccaacgccgctagccgggttacctggagcggttttaaacgggcttttaataacttcttctttaacgcctcagcgcgtcataatgaatccgaagcataacaataatgttcatttccactttgtcatccatgacaaagtgggtttttccaatgtgtgggcagagaccccgtacagggtctctgttcagttaatctttggctcaagaacgaatggtgtaacggatatgcagaatgatatcgctcaggctgagcaataagcttttctgtttaccactgataccgggaaaacttagggttaatgtgcctgtatcgcccacaggaagtccttcaaatggcaggtatttagcatcattgaaatccatctggaattgaccactatcattcattccatgtgagatcgcaatcgctttgcagccacgtggcataattgtgctaccgccataactcagtattgcccggacatcctgataaggccctaaaagggcaggtaatgtcacactgatttgtttgatacgacgtgtattacctaaaccgtcaggataatcggcagcaatattcagatccgataatttgaggctggcctgtagttgtgttccttcgatgttcaaaccgttaagcgttgtgcctgcactaccttcacctgcattgactaactcagtcactttatctgttaaaatgaaactattctctgtcagaccagcatacacttcagccagagaaacggttctggtgacctccagtgcccgttcatctttttccaaatagcttttttccatctgtgctaaattcagcatcagggtttcacccgccaataaccccgcataagtaccatgccaggcacctggtttaataaagtgtgctgccttattattcaattcatactgataagtttgctctgtcattaaacagagtgagacagccaaatcataaaactgataataaatagcggacaaccttccacggagccagttatataatgttgcattactgaatttactttgcagaaaggctaactgtgcctgagtttgtgcctgctgagtttccagatagtttttttgtaatactgccgcttcacgacgtacagccagcgtcgctaattgggcatcaatttgttttatctcagcgtcagcattattgcgctgaatttcccactcttgccgacgacgacggtatatttctgattggctgattttgtctgcggcaatacgtgttgctgacgcagaaatttcgataccaatcgcactggcattgaaaagtgcgccaaaacgggaaccgccaacggcaaaaccgtaaatattggggacgagatctgccgccgcggcggccatatgcagggctgtgccgctggtgcttaagaccgatgaagagaggtaaagatccatcgcttgtttttcaccggcgttaacatcttcgtcgtacagtgtattgaaactgtcgaaacgagattgtgcgccatgacggctttcttgaagcgccaatttatcagcatcaagttcagcaatgaccttatcctgcattttaatactttgcagggctaactcgctgccttgagtttgcagtatttcagccaaggcttctgcatcctgccgttcaataatgctgagcagggtattgccaaattgtatcaactggctgaccccccacttggcattttccagcatcaccggaaaacgatacatcggcatcactgcataaggtaaatcgccgccgccttgtgaagcagtgacggcagcactgagtaacatggacggatcggcgggagtagcatagagagataatgacagtggctgaccgtcgattgtcaggttatggcgtaagttatagaggcgttgcgttaatgtctgccagtaaccttgcagttttttattaatttgagggaggaacaatgcggtaagcgaatttgccgtgcgtttcgtgggtaatgcagcacgctgacgcagttgcagcattttatattgataatcatgacgcattgtctggctggctgcttcttccaagcgtggctctgaccagtcattatccaatgaaaaataaggctcatcacctaacaaagtgagcgcctgtacataccacattttggcttcgtttaaggtatcacgttcaagctggcgataggcgctatctccgcgagtaatcagcaaatccagcattttcataaaggtagccactttataatgcatgggatcattctgggcaacagcgtccggatcgaccgaatccagcggattagcgttccaggacgtatcttcctccaatgggcgaacgttccagtaataatcctgcatttcaccctgaaccgaatatccggccggattccagatatagcgcaaccagcgtgtcgcttcggtgaagctttgttcttgcagtaggcgctggaataccatcatgggcgtgtaatagaacaactcccaaaaatagattgcgttggcaccattgaaatccatgggttcagtgttatttttcatgacagagacatggataaatcctttatactttttaatattttttactaccccctgttgagtcattcccgaatcatgatcagcatcattgattaacacaaattgctttttcgtttcatcaaaataaaagaaagcagattcccaagtgttgtcatagataattttcttgtacccaacccctaacctgacaccttcatgtgtgtaatatcctttgtcgtaaggaataaagagcgttatcgtggtttcagtatcagataacacgccttcgtaataaggttgtctggcagaattgccatcaatatttccaatatggatcttaaaccaacgttcatcaccatgctcttctttattgtagggtggcaacttaaatgtagcgtaaaacccttcacctaattgcggttccggcaagttttgagtttccatactcaaaacattatcaatgccaacattggctctctcagctaattttctggaaaataaagtatttaatcgggttctgtaagggccaatctgcatatattgtgtgcctgatggcattttatgcagtgatataacattgcttttgtctttgggttttagttttatatgaattggcgattcaataataataccattataaccgatatctgtctccttaataataaattcacccacaagatgaatatcatagccttcaatatccgcgcttacttgattaaaatcatataccattgggtcagattcaggtgaaggtttagaggctacatgatcttcagaatttaatgctaccaaaacatcattgccattttttagtgaaaacccaatatgtttatcctggattctttgttgcataggtaaaggtaaagttatttctatatctgtagccattaacaagagaaaataacatggttgttcatgcataaaaattactaaaagattctctatctcctttatatgtataacattatcaataaatgcctcaaatatagtatgccatattcctgtattatctttccaatccgttactatgtcagggtagaaaataaaatcagtaccatcactcatataaaatgctgcaccttccagcactgatgttttggaaattttttccttagttctgccatgaattaatactctaaaatattttggtttttttgaatatgtggaaataataaagtccaatgtgccaaatttataaatttcttcttcttttccaagagtgtcatcatgcctgttataatcaaataaaataacaatttcatcttctaccatcgatagcaggtatttaacttcatcattatatagacttccttttagaaaactgatttccattgaaggactgaaagttaaattaatatgactattttctggtgatgtatacgatagatcaaagatatttcctgtaaaactgcctaatttattttggaaagttgtggattccttatattcgactaaatagtctgtagcaaatcgattgttgactttgtattctgtcttggtatcaagttctgacaatgtacttttaacaatagcatctaaatcatttttcgtgagaatagaaaatgtcatatcaggattaattgtcattcctttgttcgcaggaagaccattaatagaatagctctcttttttctcatgaaaataaacaataagcacgtctttttcataatcagaagaacaatacataccaatgctggatttatgattaatcaggctttctattttatcagtcacattaaaattaaacggtgaactccagcttccgtcataacggatatgtgacagttttaatatataatcagtgatatctatcttgccattttcattttcatttttcagctctttttgttccagccacagtaaatacaaacgtgacttgtaaataacaggtctgatattttcttgccatacattaatgggtatttcaattttcttccattctccccaagcattggcagcaaattgaccgtgttggcacttttgatgatcgacattacgccaataatatattctgggttctgtctggctataaccaactaaataggttagtccctcattgacattgatactgtcatgatatccgctaatcacctgtaagttagcgacatcttcaaatgcggtcagataatttttaaagctatcttcaacggtatcgatatttaactgactttgggaaagttgctgtaacaggttgttcatcatacctgtctgaccaatacgaatcgtgggatcgatatagttttccggataataagccagttcagatacgccggcccaagtactgtaccgtcgattgtaggtttcccagtcgcagaagaactgacgggttttcactggctttgatactttcccttcaacattattcaacgcccggttgacatataactgaatgctggcaatggtttctgctatacgggtggttttcacttgagcggaaacttggttatcaatcagcagatagctgtacaactcatcccggctcttaatctgttgaggtgtaccattcttgatatagtaagcactggccgctgttgtcatggcttcatccagccatgcctgaagctggtcggattgttgactgttcagtcccgcctgcaacaaagtactggcggcttgccagtcatcaaatgttggcatcggggcttccggttcaccgacatattttaattttatgagtgcagcaacaccatccggggtaatgcccaatgttgcggcgacatccagccattgcagagtgacatccatggttctccagttggtaaaggtatttactcccaaacccgtctgttgcaatgcctgagatacgacctgagcatccaattttaacgccaccgccaattgttcggcagtcagcgctcctatatccaatgcagttaagatttctgtcgcgtagcgtccacaacgcatgatcaccgaatggaaacgggtcagcgcctgtagagtagggagatcatgttgcagtgccgttgtttctgattggaatttctccggttttgtcaccaacagggtcagttcgttttcgctgagtccaatattgcgcacaatcagagaaagttgtcccaatacctgacaaaaggccaccatgtttctggtttcattctctgaacgatcacttttaaccacaataatcatgaaatcatcgaatgtgagtccctgtggttttatctgattaatccacagcagaatagtttctgctgtcttagctgaatccatttgaatgctggcagcaatcagtggggcagcaacatggatcagttcgtcaccaccgaatgaaggcgttgataatccattacttaatgttgtgataaggttttcaatatccggtgtaaggacagtgctgtaattatctgtggtcatcagaaacacatcactgacaggccatttctgtgttgtcagccactgtgtgtattggaacagaaagctgattaattgtgttaatgccgtatcagaaaaaagggtaattttcgtgtccgcatagggagaaaccgacaacaacatggataattcattcacggtcagatgatgaatgtctgtcagcaggcgaacgcgataaagcagagacaggttctcgatcgaacaaataaattctggatttgttccgccattagccagtttccataacgtatacaattcagtgtcattcactctgaaagcacgtttcattattcccaaatgaaaatggttttttgactcaccgggtattaaatccaatttggtattatcggcagaaaattcctggccatttaataacggtgtattgaacagagcagtaaaatggctggattgttgcttagtggaatattggctgatatctgaattacataataccagcgcatcactcacgctaatgttatagtgctgcatataatattgaacataaaacagcttacccaacacattgctgtcaatggttaagtcatcataaatactttctattacctgccagatatcttccggagatatgcctgtggctttatacaaacgaatcgctttattcaactttaacaggaatatatcgccggggaactccatcattttaaagtgtgtgttggcattgatagcatgccacggatttggcttcactcgccataagcgaagtgttatgccgttggtgatttgctctgtcgtcagtttgataggaatactgtaatgggtgttagcgataggtacgaaatttttatcttgatagacatattctttatctccattctggagacgaaaatccatgtagtcaggttctgttttttttacgctgaaattatatctgtattcatctccttttattggaattagctctgcatagtttaaatgtgaatcgtagaaatctttgcgggttcgcttaatcaactttgcctttgccgtatcattaccattatttaccaatgttatcagttgctcattcttatactgttgattggtgttttttttaccgaaggagagattgacaaataaactgagttcatcataagacagatcatagtagcgggccaaagaagcataactcttaaagatcagtacatcatctgtaccgaaatttttcttcatcagctccgttacattttccggtgtaatttcttctacaaggatttggtatagttctggtgatatatcagccttgatagccaatagcgatgttgggtccattaatttcgctacgtctgtattacggctaaatgcggtgaggtttttatcttgtaataaaatggcctgacgtgctgactcatacggcagatgatagggtgtcatgcctgtctgccggtaagtggatagcatttccattacaccgttatagtcagttttttctagcgtctgaatattatgcagcagcaattcattggataaggataacgtggaaatttcttcatccatattatcctgtgtcagtgtgagggaagcgatatcgggacgtcgtttattcaggtggtattgagaggtttcaggatggagatcttttgcttcccgatataactctgttaaataagccattggtgaaaacatggaagcaactgaccccggtttcacaaaacggtgggcgcgcccataaaaccaactgttgtagctattgtttaatggtgacggtgtaatgttaaggtgagtagtattagtcaattgtgggttagcacgggacaaaatgcgtagttcttcaagtttattctgttttgattcctgatgagcctgttgatataaaaagtctgtttctcgccacgtcaaaatcccacttgttctatggcgaaattcactgaaggacataaatgcaatgtttgtcaataatagaatatcatcagatttttttttatttattttatctaacagttcattaatttttatcatgtaaatccttaatttattttcaattaaattattaattatttttagatggatagtgttaattatgattataatgcgatggaaaatattatgtttaattaaattagtactgatttatcgttctatccttccaataaaaaagagatgatttttggggtttcgggaaaaacgaaacaataaacgccgttaagcggtcatcttaaatagccatttaattataaatcaataagttaattattatcattgaatggtcttaactcccctctgctgacggcttctggaaccgtaaaggtgtagcgcccctgcatattaatatgttcacatagcagtggagacaacctcttcacatcctcgtcatgaaccggatatccctcttgcctgagttgttgcactgcggcgtccatgtaaatcgtattccacagaacgatcatatttagcactagccctaacgaatccagcagatcttcctgaccttcacgatatgcctgcctcagttcacctcgttttccatgaaacacatttctggctacggcgtgtcgtccttcacctcgattaagctgctgcaatgtcttacgtcgtttattttcatcatcaaggtatagttaaatcaaaataattagacatatttcacatgcgtcataaacagttcatcaattgaacacctttctcgtcttcttatcgctttgacttcagcccatttcggttcgatgggattcaaatccggactgtaaggaggtaaccattccaacaggcaaccgtggtctgctatcgcttttattgtgtcatgccatttatggaagagggcattatccatcacaatcacggctccgctggggggcttgggcagcaaatcttgtgtcatccaggcatgaaagacatccgcattaatgtttcccgaaaataaacttaaggtcacgaaggtctttttgaggatcgcgccaatgacattaatgcggcctttggcctgccaatcgtgtgtgccgaagcagcgtaaccctttcgccgaataaccgtgtgtgcggggcatagactgcgaaaaaccgctttcatccagataaacaatcggtttcatcgcctgttcgtagtggccgaggcgttcgacaaacgcctgacgagcctgagcgtcagcgttggggtgtcttagtgtttttttgacggttattttcagccgtttcaaggcgtaatggatagcagactgcgcgacacccaagcgttttgacctttcccattgatagttatcggggtaatttttgacatcagtgagaagcgcttcatcactgattttcgtgggcggcttattacgtgtcacacagggttctattttgtgactccaccgaaataaggtgcgcatagaaatgtcaaaatgggtactcgtttgttcgaatgtcaacgcatgcttgtctttgtatgccagtactctctttcgaaaatccagactgtagcctatctcactttatcctttgtcatatgaatccagttattatgtcatataaatatgattctgctatagcctcactcatcatcactattccggtaatacacctgccggatatagcgcccgcgcccgtcgccatgccccaaatccatcgataccagcgccagtgcttcccgctcgctgaatccttgcgctatataatgctccccggattgctgagcaaaatggtaacgcatactgtgcggggcgttcttacccgtcaatcctgagcttctgacaatatagcggtaacggtcgatggcctgcgtgatcgtcggcttatcaatcagtttaccactgcgcctggcctgctcgcgttcagcataagcaatcgcgtgttgcagggctgcccgatccagtatgaccgtctgtcgggggcgtccacctttagtaccgaacaccacccgcacagacgtatgcccgttttccagtgctttcttccaggtcgctaacgatttgtaggcttccaccgcttctttggtacgcagtcccagcacatacgccagttgcatcacagccgcgacacgccggtctttttgttccacctgctgaaaaatgtcccggaatgcagtcggtgccagcgccattttcgttcccttgcggctggtatccgcgatacccaatgcccggttactcaggcgggcattatcgggatcagccagcttatgctttcccgcctgcgctaaaatggctcgcagcaccgacatttcattttgcagtgtccggtgactgagattgttggctttgcgtccagcgatgtagcgctcaatatatttcaccttcaggctatccacttggcggagtttgatgccattgtttttcaaataatcaaggaagtaccgggcaatccgttcacgatccgccaccgtaacaaaacttccgcccgcctgtcgggcatgcgtgataaaaacttttctgaacagctcaacctttgaacgtgtcgatccctgcgccattctcgcctcttctgctactttgcgtttgttttattcatttttagtcgtttttaaaacaattccctgcatgtcggttcaggttcaccgttccgtggtgcgtcagacaatgtgtagcagggcgggattgtgttgagttattgcaggagctcgcgatgtgctcagcacagcgatgacatgctccccgttcagtgcctgatcagctcaggatgaacgcctcattatcttgacgtgattcattctccttaatctttactgcatcagcctgcaatcaggcagtgggttgaaaatccgataggacaatcgtttaacagggtggttaatcgtctgttttgcgtggtttcactgagtaatgcggggttcaaatcggtcgtaaaaccagaccggatgggctatggacgtttgtcgctttgcggcgtcacttggtaatcgctgcgcttcaacacaagtgacgccgcacaatatccgggacgtttaccgtgatgaattgaaaatgtgaatgaatgttgtaccggtgaaaacggtatcgtttgacgtaagacagagcctgttttgccctgttgtgtcagtagccggtgatgaatcacaccgggaaactttcatcctcagacggagggttaggtgtccggggatatctgcttccaaaagtgcgcagatgtaccgcaatttagctctccattgcaggctacaggagttttagttcgccgctttacgctgatccttacaggcggaagatcatcagttaacagaaagagagtagcgattgcctcaggcggagtcaaacggtgttttctgctattttttcgcggcgtattttaagccagcctgaatacctgtctttctaaaagaaataaaaataacttttcatcttttttatacccatattatttcatggtgatagttgttattatctaaaacaagcctctgatttgtattttaataagaatgaaatattatttttgtcaggctatattattttaggattcggtttagaaatgtgttcattattttaaacaaccccatttgtgatcgttatcataaaatgaaaatgatcatgatttttaagatacttgtagttttatatttataaataaatcaatacgttaattaattccccctgactttgacagccagtaatcccgg

SEQ ID NO: 437 - DNA, 45355 bp, Xenorhabdus sp.; identical to SEQ ID NO: 436
  CDS (31069)..(34116)

SEQ ID NO: 438 - DNA, 45355 bp, Xenorhabdus sp.
  CDS (3631)..(11139)
ccgggattactggctgtcaaagtcagggggaattaattaacgtattgatttatttataaatataaaactacaagtatcttaaaaatcatgatcattttcattttatgataacgatcacaaatggggttgtttaaaataatgaacacatttctaaaccgaatcctaaaataatatagcctgacaaaaataatatttcattcttattaaaatacaaatcagaggcttgttttagataataacaactatcaccatgaaataatatgggtataaaaaagatgaaaagttatttttatttcttttagaaagacaggtattcaggctggcttaaaatacgccgcgaaaaaatagcagaaaacaccgtttgactccgcctgaggcaatcgctactctctttctgttaactgatgatcttccgcctgtaaggatcagcgtaaagcggcgaactaaaactcctgtagcctgcaatggagagctaaattgcggtacatctgcgcacttttggaagcagatatccccggacacctaaccctccgtctgaggatgaaagtttcccggtgtgattcatcaccggctactgacacaacagggcaaaacaggctctgtcttacgtcaaacgataccgttttcaccggtacaacattcattcacattttcaattcatcacggtaaacgtcccggatattgtgcggcgtcacttgtgttgaagcgcagcgattaccaagtgacgccgcaaagcgacaaacgtccatagcccatccggtctggttttacgaccgatttgaaccccgcattactcagtgaaaccacgcaaaacagacgattaaccaccctgttaaacgattgtcctatcggattttcaacccactgcctgattgcaggctgatgcagtaaagattaaggagaatgaatcacgtcaagataatgaggcgttcatcctgagctgatcaggcactgaacggggagcatgtcatcgctgtgctgagcacatcgcgagctcctgcaataactcaacacaatcccgccctgctacacattgtctgacgcaccacggaacggtgaacctgaaccgacatgcagggaattgttttaaaaacgactaaaaatgaataaaacaaacgcaaagtagcagaagaggcgagaatggcgcagggatcgacacgttcaaaggttgagctgttcagaaaagtttttatcacgcatgcccgacaggcgggcggaagttttgttacggtggcggatcgtgaacggattgcccggtacttccttgattatttgaaaaacaatggcatcaaactccgccaagtggatagcctgaaggtgaaatatattgagcgctacatcgctggacgcaaagccaacaatctcagtcaccggacactgcaaaatgaaatgtcggtgctgcgagccattttagcgcaggcgggaaagcataagctggctgatcccgataatgcccgcctgagtaaccgggcattgggtatcgcggataccagccgcaagggaacgaaaatggcgctggcaccgactgcattccgggacatttttcagcaggtggaacaaaaagaccggcgtgtcgcggctgtgatgcaactggcgtatgtgctgggactgcgtaccaaagaagcggtggaagcctacaaatcgttagcgacctggaagaaagcactggaaaacgggcatacgtctgtgcgggtggtgttcggtactaaaggtggacgcccccgacagacggtcatactggatcgggcagccctgcaacacgcgattgcttatgctgaacgcgagcaggccaggcgcagtggtaaactgattgataagccgacgatcacgcaggccatcgaccgttaccgctatattgtcagaagctcaggattgacgggtaagaacgccccgcacagtatgcgttaccattttgctcagcaatccggggagcattatatagcgcaaggattcagcgagcgggaagcactggcgctggtatcgatggatttggggcatggcgacgggcgcgggcgctatatccggcaggtgtattaccggaatagtgatgatgagtgaggctatagcagaatcatatttatatgacataataactggattcatatgacaaaggataaagtgagataggctacagtctggattttcgaaagagagtactggcatacaaagacaagcatgcgttgacattcgaacaaacgagtacccattttgacatttctatgcgcaccttatttcggtggagtcacaaaatagaaccctgtgtgacacgtaataagccgcccacgaaaatcagtgatgaagcgcttctcactgatgtcaaaaattaccccgataactatcaatgggaaaggtcaaaacgcttgggtgtcgcgcagtctgctatccattacgccttgaaacggctgaaaataaccgtcaaaaaaacactaagacaccccaacgctgacgctcaggctcgtcaggcgtttgtcgaacgcctcggccactacgaacaggcgatgaaaccgattgtttatctggatgaaagcggtttttcgcagtctatgccccgcacacacggttattcggcgaaagggttacgctgcttcggcacacacgattggcaggccaaaggccgcattaatgtcattggcgcgatcctcaaaaagaccttcgtgaccttaagtttattttcgggaaacattaatgcggatgtctttcatgcctggatgacacaagatttgctgcccaagccccccagcggagccgtgattgtgatggataatgccctcttccataaatggcatgacacaataaaagcgatagcagaccacggttgcctgttggaatggttacctccttacagtccggatttgaatcccatcgaaccgaaatgggctgaagtcaaagcgataagaagacgagaaaggtgttcaattgatgaactgtttatgacgcatgtgaaatatgtctaattattttgatttaactataccttgatgatgaaaataaacgacgtaagacattgcagcagcttaatcgaggtgaaggacgacacgccgtagccagaaatgtgtttcatggaaaacgaggtgaactgaggcaggcatatcgtgaaggtcaggaagatctgctggattcgttagggctagtgctaaatatgatcgttctgtggaatacgatttacatggacgccgcagtgcaacaactcaggcaagagggatatccggttcatgacgaggatgtgaagaggttgtctccactgctatgtgaacatattaatatgcaggggcgctacacctttacggttccagaagccgtcagcagaggggagttaagaccattcaatgataataattaacttattgatttataattaaatggctatttaagatgaccgcttaacggcgtttattgtttcgtttttcccgaaaccccaaaaatcatctcttttttattggaaggatagaacgataaatcagtactaatttaattaaacataatattttccatcgcattataatcataattaacactatccatctaaaaataattaataatttaattgaaaataaattaaggatttacatgataaaaattaatgaactgttagataaaataaataaaaaaaaatctgatgatattctattattgacaaacattgcatttatgtccttcagtgaatttcgccatagaacaagtgggattttgacgtggcgagaaacagactttttatatcaacaggctcatcaggaatcaaaacagaataaacttgaagaactacgcattttgtcccgtgctaacccacaattgactaatactactcaccttaacattacaccgtcaccattaaacaatagctacaacagttggttttatgggcgcgcccaccgttttgtgaaaccggggtcagttgcttccatgttttcaccaatggcttatttaacagagttatatcgggaagcaaaagatctccatcctgaaacctctcaataccacctgaataaacgacgtcccgatatcgcttccctcacactgacacaggataatatggatgaagaaatttccacgttatccttatccaatgaattgctgctgcataatattcagacgctagaaaaaactgactataacggtgtaatggaaatgctatccacttaccggcagacaggcatgacaccctatcatctgccgtatgagtcagcacgtcaggccattttattacaagataaaaacctcaccgcatttagccgtaatacagacgtagcgaaattaatggacccaacatcgctattggctatcaaggctgatatatcaccagaactataccaaatccttgtagaagaaattacaccggaaaatgtaacggagctgatgaagaaaaatttcggtacagatgatgtactgatctttaagagttatgcttctttggcccgctactatgatctgtcttatgatgaactcagtttatttgtcaatctctccttcggtaaaaaaaacaccaatcaacagtataagaatgagcaactgataacattggtaaataatggtaatgatacggcaaaggcaaagttgattaagcgaacccgcaaagatttctacgattcacatttaaactatgcagagctaattccaataaaaggagatgaatacagatataatttcagcgtaaaaaaaacagaacctgactacatggattttcgtctccagaatggagataaagaatatgtctatcaagataaaaatttcgtacctatcgctaacacccattacagtattcctatcaaactgacgacagagcaaatcaccaacggcataacacttcgcttatggcgagtgaagccaaatccgtggcatgctatcaatgccaacacacactttaaaatgatggagttccccggcgatatattcctgttaaagttgaataaagcgattcgtttgtataaagccacaggcatatctccggaagatatctggcaggtaatagaaagtatttatgatgacttaaccattgacagcaatgtgttgggtaagctgttttatgttcaatattatatgcagcactataacattagcgtgagtgatgcgctggtattatgtaattcagatatcagccaatattccactaagcaacaatccagccattttactgctctgttcaatacaccgttattaaatggccaggaattttctgccgataataccaaattggatttaatacccggtgagtcaaaaaaccattttcatttgggaataatgaaacgtgctttcagagtgaatgacactgaattgtatacgttatggaaactggctaatggcggaacaaatccagaatttatttgttcgatcgagaacctgtctctgctttatcgcgttcgcctgctgacagacattcatcatctgaccgtgaatgaattatccatgttgttgtcggtttctccctatgcggacacgaaaattacccttttttctgatacggcattaacacaattaatcagctttctgttccaatacacacagtggctgacaacacagaaatggcctgtcagtgatgtgtttctgatgaccacagataattacagcactgtccttacaccggatattgaaaaccttatcacaacattaagtaatggattatcaacgccttcattcggtggtgacgaactgatccatgttgctgccccactgattgctgccagcattcaaatggattcagctaagacagcagaaactattctgctgtggattaatcagataaaaccacagggactcacattcgatgatttcatgattattgtggttaaaagtgatcgttcagagaatgaaaccagaaacatggtggccttttgtcaggtattgggacaactttctctgattgtgcgcaatattggactcagcgaaaacgaactgaccctgttggtgacaaaaccggagaaattccaatcagaaacaacggcactgcaacatgatctccctactctacaggcgctgacccgtttccattcggtgatcatgcgttgtggacgctacgcgacagaaatcttaactgcattggatataggagcgctgactgccgaacaattggcggtggcgttaaaattggatgctcaggtcgtatctcaggcattgcaacagacgggtttgggagtaaatacctttaccaactggagaaccatggatgtcactctgcaatggctggatgtcgccgcaacattgggcattaccccggatggtgttgctgcactcataaaattaaaatatgtcggtgaaccggaagccccgatgccaacatttgatgactggcaagccgccagtactttgttgcaggcgggactgaacagtcaacaatccgaccagcttcaggcatggctggatgaagccatgacaacagcggccagtgcttactatatcaagaatggtacacctcaacagattaagagccgggatgagttgtacagctatctgctgattgataaccaagtttccgctcaagtgaaaaccacccgtatagcagaaaccattgccagcattcagttatatgtcaaccgggcgttgaataatgttgaagggaaagtatcaaagccagtgaaaacccgtcagttcttctgcgactgggaaacctacaatcgacggtacagtacttgggccggcgtatctgaactggcttattatccggaaaactatatcgatcccacgattcgtattggtcagacaggtatgatgaacaacctgttacagcaactttcccaaagtcagttaaatatcgataccgttgaagatagctttaaaaattatctgaccgcatttgaagatgtcgctaacttacaggtgattagcggatatcatgacagtatcaatgtcaatgagggactaacctatttagttggttatagccagacagaacccagaatatattattggcgtaatgtcgatcatcaaaagtgccaacacggtcaatttgctgccaatgcttggggagaatggaagaaaattgaaatacccattaatgtatggcaagaaaatatcagacctgttatttacaagtcacgtttgtatttactgtggctggaacaaaaagagctgaaaaatgaaaatgaaaatggcaagatagatatcactgattatatattaaaactgtcacatatccgttatgacggaagctggagttcaccgtttaattttaatgtgactgataaaatagaaagcctgattaatcataaatccagcattggtatgtattgttcttctgattatgaaaaagacgtgcttattgtttattttcatgagaaaaaagagagctattctattaatggtcttcctgcgaacaaaggaatgacaattaatcctgatatgacattttctattctcacgaaaaatgatttagatgctattgttaaaagtacattgtcagaacttgataccaagacagaatacaaagtcaacaatcgatttgctacagactatttagtcgaatataaggaatccacaactttccaaaataaattaggcagttttacaggaaatatctttgatctatcgtatacatcaccagaaaatagtcatattaatttaactttcagtccttcaatggaaatcagttttctaaaaggaagtctatataatgatgaagttaaatacctgctatcgatggtagaagatgaaattgttattttatttgattataacaggcatgatgacactcttggaaaagaagaagaaatttataaatttggcacattggactttattatttccacatattcaaaaaaaccaaaatattttagagtattaattcatggcagaactaaggaaaaaatttccaaaacatcagtgctggaaggtgcagcattttatatgagtgatggtactgattttattttctaccctgacatagtaacggattggaaagataatacaggaatatggcatactatatttgaggcatttattgataatgttatacatataaaggagatagagaatcttttagtaatttttatgcatgaacaaccatgttattttctcttgttaatggctacagatatagaaataactttacctttacctatgcaacaaagaatccaggataaacatattgggttttcactaaaaaatggcaatgatgttttggtagcattaaattctgaagatcatgtagcctctaaaccttcacctgaatctgacccaatggtatatgattttaatcaagtaagcgcggatattgaaggctatgatattcatcttgtgggtgaatttattattaaggagacagatatcggttataatggtattattattgaatcgccaattcatataaaactaaaacccaaagacaaaagcaatgttatatcactgcataaaatgccatcaggcacacaatatatgcagattggcccttacagaacccgattaaatactttattttccagaaaattagctgagagagccaatgttggcattgataatgttttgagtatggaaactcaaaacttgccggaaccgcaattaggtgaagggttttacgctacatttaagttgccaccctacaataaagaagagcatggtgatgaacgttggtttaagatccatattggaaatattgatggcaattctgccagacaaccttattacgaaggcgtgttatctgatactgaaaccacgataacgctctttattccttacgacaaaggatattacacacatgaaggtgtcaggttaggggttgggtacaagaaaattatctatgacaacacttgggaatctgctttcttttattttgatgaaacgaaaaagcaatttgtgttaatcaatgatgctgatcatgattcgggaatgactcaacagggggtagtaaaaaatattaaaaagtataaaggatttatccatgtctctgtcatgaaaaataacactgaacccatggatttcaatggtgccaacgcaatctatttttgggagttgttctattacacgcccatgatggtattccagcgcctactgcaagaacaaagcttcaccgaagcgacacgctggttgcgctatatctggaatccggccggatattcggttcagggtgaaatgcaggattattactggaacgttcgcccattggaggaagatacgtcctggaacgctaatccgctggattcggtcgatccggacgctgttgcccagaatgatcccatgcattataaagtggctacctttatgaaaatgctggatttgctgattactcgcggagatagcgcctatcgccagcttgaacgtgataccttaaacgaagccaaaatgtggtatgtacaggcgctcactttgttaggtgatgagccttatttttcattggataatgactggtcagagccacgcttggaagaagcagccagccagacaatgcgtcatgattatcaatataaaatgctgcaactgcgtcagcgtgctgcattacccacgaaacgcacggcaaattcgcttaccgcattgttcctccctcaaattaataaaaaactgcaaggttactggcagacattaacgcaacgcctctataacttacgccataacctgacaatcgacggtcagccactgtcattatctctctatgctactcccgccgatccgtccatgttactcagtgctgccgtcactgcttcacaaggcggcggcgatttaccttatgcagtgatgccgatgtatcgttttccggtgatgctggaaaatgccaagtggggggtcagccagttgatacaatttggcaataccctgctcagcattattgaacggcaggatgcagaagccttggctgaaatactgcaaactcaaggcagcgagttagccctgcaaagtattaaaatgcaggataaggtcattgctgaacttgatgctgataaattggcgcttcaagaaagccgtcatggcgcacaatctcgtttcgacagtttcaatacactgtacgacgaagatgttaacgccggtgaaaaacaagcgatggatctttacctctcttcatcggtcttaagcaccagcggcacagccctgcatatggccgccgcggcggcagatctcgtccccaatatttacggttttgccgttggcggttcccgttttggcgcacttttcaatgccagtgcgattggtatcgaaatttctgcgtcagcaacacgtattgccgcagacaaaatcagccaatcagaaatataccgtcgtcgtcggcaagagtgggaaattcagcgcaataatgctgacgctgagataaaacaaattgatgcccaattagcgacgctggctgtacgtcgtgaagcggcagtattacaaaaaaactatctggaaactcagcaggcacaaactcaggcacagttagcctttctgcaaagtaaattcagtaatgcaacattatataactggctccgtggaaggttgtccgctatttattatcagttttatgatttggctgtctcactctgtttaatgacagagcaaacttatcagtatgaattgaataataaggcagcacactttattaaaccaggtgcctggcatggtacttatgcggggttattggcgggtgaaaccctgatgctgaatttagcacagatggaaaaaagctatttggaaaaagatgaacgggcactggaggtcaccagaaccgtttctctggctgaagtgtatgctggtctgacagagaatagtttcattttaacagataaagtgactgagttagtcaatgcaggtgaaggtagtgcaggcacaacgcttaacggtttgaacatcgaaggaacacaactacaggccagcctcaaattatcggatctgaatattgctgccgattatcctgacggtttaggtaatacacgtcgtatcaaacaaatcagtgtgacattacctgcccttttagggccttatcaggatgtccgggcaatactgagttatggcggtagcacaattatgccacgtggctgcaaagcgattgcgatctcacatggaatgaatgatagtggtcaattccagatggatttcaatgatgctaaatacctgccatttgaaggacttcctgtgggcgatacaggcacattaaccctaagttttcccggtatcagtggtaaacagaaaagcttattgctcagcctgagcgatatcattctgcatatccgttacaccattcgttcttgagccaaagattaactgaacagagaccctgtacggggtctctgcccacacattggaaaaacccactttgtcatggatgacaaagtggaaatgaacattattgttatgcttcggattcattatgacgcgctgaggcgttaaagaagaagttattaaaagcccgtttaaaaccgctccaggtaacccggctagcggcgttggcaacgtcctccccaacggcatgatgagcggccgcggctgtcccgccaatggctgcaccaatccattcaccgggtgtacggctataaggcaataatacttcagaaatatttctccctacactttctcctatcattcggccaaaccagcccttggaactgatagcgtgggaaatggcagagctaatgcctcttctgagcagtaacctgcctataaaccgataagggccatcccatagattaccaatgagccttccccatcgagcaccatacatagcgccaatcgctgcccgttcaccaagctcagaacttccctgatggcggccaagtaatattccgccaataattgcgcctgataatgcccctaaccgctctggcgcgctaacattaccgggcctgagcgtatccagcgtaccttgtccggcaggtgtggcaatactgatagccatgcccgtgttatgttctccggctaaagccattaatcctccaacggctaccgctgttcctgcggaaatggctgtacctgtcgaagagctgttaaatagagcagacgtaacaagcgatgtgacaacaaaagcgcctacctgaacgggaacagaacgtttacgcgtcagataacttaaaacttccccaattttttctgagatgttgttcgcgaaaaaccccatcaccgccccggagacaaaaccaccaattgcagccccgacaaccccccaaggcgtcgctcccgcaatcgttgcagccttaacccccaaacttgccatccccacacccaaaacaaaagttcgcaaccctcggtttaatttcaaaaacgtatcaaaggaagcgccttgttcaagaagatgttctgtcgtgatgttgactgcccgtcgataagcttttttccctatccaggcaaggactccctgaccggggaaacggccatcagaatcagaaaaaacgatggggttattcctgcacattctgaacaaattgagaccatcgacctcaccagcaggatctacactcaaccatcgccctgtccacgattgataataacgatagccgtagtaatacaaccctgttgcatcccgttctttgccagaataacgcacggttttgtaatcagcttctgactgacttcgggctgcccacacggcggttcccccataggggtaatattcttcctgactaatgatctgcccgtcactgtccaattccagcccgctactgccaatcaggttgccataactgtagcgcagctgatcattgctgatatccgccggtttgcctgtttcccaatgcagcacccggacttgtgcctgacccgcttcaccaacagtgatgacctgcaaaaactcttttaatgtattgccgctatatgtcgtacgccattccagctctggcaaatataatgttcgctgtatttgctcactgttacctgttttctgaatatgagtcttaatgacacgctgactgtctgcgtcataacggtagaattcctgatcaggcgtcgtattttccctattgaccaatatcacttgttgcaattcgtcacggggtgtccagaaaagatcctgaccgggaacaagccgggtctgatgtccgccgggggtgaacaacatatccaccttagttggatctttcgtcagctcctccagtacagctcggttgctgtgatctgagactgtcatgttcgttgtgtagttattatcggtgatcggtgaatgatggcgaattctggtcagattccccccacgatcgtagtcgtaagtgcgagagtaattagtataagtattgttatcaatcagagcggggatgggtaactggtttttttgtcggccaatattcgccatttcacgcccagtgacggaaaccagctggtacaggctgtcgtaggtgtaagtattttccggtacaattttctggttgcgccaaaagcgggtaatttcagcatcgttagttgatttcagcacatttccgacaagatcatactcataacgcaggttctgtaaaattttctccccagcggcatgaccggaaggacgttctgtttttatgccaataattcgttgcgtctcgggttcatgtgtatatgtggtcactatcccgttaccatgttcctcccgtagcttctggctggcagccgaataggtcagggatttcacgataacctgttcttgtttccccctcagcgccaaccaactgccttgaagcagaccggccacatcataggcgatacgttgcctatttccggcagcatctgtgctcattaatacggtaccggtggcatctgctgtgctcagggtggtgaagctttccagcgccagactgtttttccagacagattcatccacaccctgccaatttgcctctctatcattttttagtaattgatgcatgatggacaagggtatgccggtcaaggagatactgttggtttgattcagtccggtagggtcataatggcgcacacactgtccggccaggttgttgcctttttctgccggggtatttcctgaccagatcaatcgctctgtgatacaggctttttctccttttacctgctcggtaattcttaacaagcgatctggaaggttatctctttcatactgaaacgttcggctaacgccgttggcactgacagctaagtgtggacgtccagcaacatcatgcagggcgacactggttccggcatccacactttgcgtacgcagtactttcttactgagtgatgacaggcaaataagatttggtttaaccgagttattgtcactcgctgtctgctggcgttcatacaatcgcggatcaatgctctgcgtcagagagccttgggcatcatattgatagcaggtgatgcgttcatctgttacctgaggtgtattggggtgtcgatgccaagctatttcacgtacagtctgaccacggttatcgagtaccgtgacggatggcgtattgctgtgaacggaattcttcatgattcattcctaagtgaagcgatgcctgttcagcgaacaggcatcattgaactttatgctgtcatatcatcagcagtgtcattttcatcctcattcaccacaaaccagggggtgaataaggatcgacgtaacccgcctttggccgtgataacttgatattcacgccccaacggatcatagcaatgggtatcggcatacatatcctgccgagcactatcgtcactgacgtactgccaactattcaggaaatacggttgatatttacgcagagccagcccttttccgtcatattctgtacgtccggaaactgcccaacggaaatctgtcatcgccgttttaggttcaccattactttcagccacaatggctccgtattcatcacgtacccaggtttcaccactttcatggcgtactgctgtttgtaatgttcgcccaaagccatcactaaacgtaatcgtttgacgtaattgttgttccggatcggcatcatagcggtcggtgattacgctcaggatatggggtgggttctgtgaattggcttgcattggtatagcagaggaaggattattttgttgccagcggcgaaaagcaagcgacaagagataaccatcttcagtgatgatcccagccgatttcagctcttcataattagaaaagttgatctgattagaaacattgacccgaaccatccagctcagagggacataaaccatcagtcctgcgacaggtatgccgggtttcaatgccaaggcatcatccaccgttgtggggacaataaaggggacagtttcattttcctgaggggtatatccttgtctttcaccgttttcagtcccccagaaacggaagctggttaccctccccagtgcatcaaacgttgcggtgtgatagttatcattgatatctgtggtgttatccgcaaccatgaatcgataatcgtaatgcgcttgcatacgcaggccagccgcatcctctgtcgcggtgataacacagtaatggttatcccacgtcactgtcgttttacctgtgagcttggtttcgcgttgcaccaatggtcgatagaatccgtctgcattggcgtattctgtaaattccctttgtcccacccagacactgaaatctgtattttcactgaacggcacatttgcaacattccagccagcatcattcagctgttttgtcagctcctgctcatccatgaccgtcttaaaagccgccagcgatcgttcatcaaactctgcggtttcagtgtatgctaccagcggaggaatggcgggccgttcttctggaccgatatatgccacacgttgatgtcccagataatcggctgctgcatcaggcaacaacaatgctcctgcccctgtggcagaaaaccattcaagggaaaatccaccgtccggcactttatctgcatgataaatacgtgcgtcactgcgtgaagtatccatcagccctgtgatccacgtattatcatcatgattcagatgataataggaagaacgctggcgtgtcagacgaaggcacatctgctgttcgtcgtaactgctggtgaaaagtgtttcgggcagggtatccggataaggcgatagctcaggctgtggacgtctcggataagcaatctcgatattgtcctgcggaaatcctaacgcatcagatttaaggacgatcttttggctacactgtggatcggtagcaacccgttcatatcggtattggcgggattcggccaccgaaaccagtaccgcagggacgtccgatgccataaccggcaacaaacgtacttgggggcgggattcatccactgaataaggtgtactggccagtatagaatcatcatccccatacaactcactccgtaaacgttgtccttttaacgcccgaaacaaccagtattcttcctgttcgttcggcatgatggcgatgtcatcaccagatttttcgtcataacgggtaaagcgtggggtaaaatggggaaatgcctgttgatccccctgccaatattcagtggacagaagaacatcgacttctcgtacaccagtgccgtaccagttaacagtacgcgaaggtgccggtggttcagcatgtgcgccctgtgtcgcactcgcccgtgaatcaatgtcagtttgcgtcacacgcccaaagccacgaaactcccgttcccggccatcccaggcaccatgtgaatagtcataatggctcgtcaatcggttaccggaaatttcatccaggacttccgtgcgccataacacatgcacagggaacggtaagtagctgacagccgtaatcccagattcagaagcctgcaatttctcatccagccagaactgggcagagctgcggtaatacagcgtggtctctgttcccatattgttattgatggcattcagcagccagggcttgaatgtggtcatatccaatcgccaatgctgcacattcatatggggaaccgtcagaataatgctggcggtacctaatccttgtgtatccgctatttgtaaccgacaagtattatcaaaacgtgccccatccggtaaatcgatacgctgaggttcagcaaaacgattgccactttcattggcatagaattcaaggtaagtattgcgggcataaataaaatcggtggtgcctgagccatccatgtctaccatatacagtctgtcggggttaaaagtttccctgctaatctggaagcctgtcataatcagcggctcaccaaattttccatgccctaggttcggccagtagcgcacgctatttgccgtcacttccaccagatgtgattgcccggagcctgtcatatcactgaatgcgacaagatgacgctcatttctgccgggaaccggcagtggcatatctgacaaatgaatcacatcctgagcgcgatcccaccctgcccgattatttgaccagacacgtacactatttggcccgataagcgctaagtcaggcagccctgccccgtcaatatcagccagttttgcctgcggatggaaatatttcattggcacagcagataatggaataaagggtgtccattcaccttccggtgacattgtgtggtagccccgtaaccctgttgcagtaataacccaatccagtcgcccgtcaccgtttatgtccagcaacatcgcgctttcctgttgtgctggaatatgtggcagtggtttcgcatcctcataagtaaccacattcgttccttcggctgtgatatcccgtatcggagcacggtaccaccaggctttctgaacatcctgataaagtacgccggaaattccttctccatataaatcaactagttggtatggctgcaatgggttcattttttctaactgcggcatggactgccagttcaaattcacgccatgattaacacgttgataatccatttccagtggggacatcatcaccggcgtaccgtccgtttcatgtgccagtctgcgggccgtttgcagtaaggaaaccttgttgttcaggtcataatccagaataaggcgggaaactagcgccggtgtttcttctgcaacattttcccctgccagcgcttttagctgatgaaacatcagaatttggcgacacaagcgacgggttcgaatttcaaacccatattcatagcgggagaaactatccggacgacaacgccatttttcagaaacattaaattcgggtacggcgttcagcgaagatgaacgttcaccgtaatcaaatatcagatgaaacaaccagtcattgtcagcagggatacctgatttcatagcgaaaaaagcggtttccggctgagtattgccatagctgacttttgccagataacgctgggccgtaacacctgaatgctgagcaagttcattctcatcacagtcaagagcgtcttctgcccgatagtgatagtaaatatgttccccggtatgcgtgacggtttcctccatcagccagcgggcaattttggtttcatcttgcgggtcagcaatacgtgcatggtgatgcttaccgaataggtgcactaaaccatccgcagtaaaaagtacccaaaaagaagtctttgcttcatgtctctgctgcggctgccagtgctctaaacggacgattttttctgccacgcgggactgatagcgggtaacgatatacggctgtgtcagaacagtccccaacagtgaggttgcggtgcgttgctctggttgcccttggctatccggcacaatactcaacacttccccatccggcccgagatactcctcttgtcccgtatagtgtggaacgcccttggcggtacgcagactgataaagccagccccgcattgccaacccatcccgaatgacccattacccgcagtactgctgtaattaagtgatagcaccggcaccagacctcgcccgacagagaccggtaagggcagtgaaaataacgctcccccctccgctccgacggcgttgagtgcttctcccattcctctcagtgatccgccgccagagggcaatgacggtatttcaagtttcaaaggtgttgaaccctgcataaaaactccttaaacaggctcccgcaggagcctgcctatcacaatgttttaaattaagagcggatggtgtagcggatatgcagaatgatatcgctcaggctctccagcagcgctttctgccgatcagtcgcatccgggaagctcagcgtcaggctgccattgtcattcaccggaatgccttcaaacggcaggtaacgggtatcgttgaaatccagcacaaattgcccgctgtcattcatcccgtgggagagggcaatggcgctgcaaccgcgtggcatcaccacgctgccgccatagttcagtaccgcccggatatcttcatacgggccgatcaacgccggtaacgtgacactcacctgttttaactgacgggtgcggccgaggcttttgtcggggtagtcgctgaaaatattcaggtcggacagccgtaccgaggcggcaatctggccgctgctgagcttcagctcattgccggtaatgccggcattgcctttgccgtcacggaggaactgcgtgagtttttctgccaagttaaagctgtctgatggtaaagcttggtagacctgtgccagtgacacggtacgggtcacttccagtgcccgttcatcacgctccagccaggctttttttccatttcagccaggttcagcaacagtgtttcacccgccatcagaccagcggtcgtgccgttccaggcaccgccccggataaaggtcacgccattgtcgttcagttcgcggcgtagcgcttcctgcgccatcaggcagaaggattgggtcaggtcaaagaactggtagtagatagcactcagtttgccgcgcatccaactgtagagcgctttgttggtgaatttacgctgtaataattctaactgagcctgagtctgtgcttgctgggtttcctgatattccacctgcatttgtgctgcttcacgacggattttcagggtttccagttgagcatccatctgtttcacttcaccgtcagcgttatcacgctgaatttcccactcctgacggcggcggcgataggtttcagaacggctaattttttccgcagaatattgggaagccgtcgcggaaagtgacatgacagacgcagcggcgtgcagtggtgctccccagtggcttccgccacaagcgaaaccaaatacattgggtgccaaatcgaccgctcctccggcggttgaaagcacctgacctgccaaagattgacttgccgctgcatcaaacagtgacatggcccgctgctctccgtggttgatatcttcgtcatacagctgctggtatttctccagacggttttgcgcactgcgccgactctctgccaatacggcaatatcggcatcgacttcatccactgtccgttgctggatatggatgctttgtgtcgccagctccatgccttgctgaagtaacagggtggtgagttcatcagcatcatcatgctctgccatactgagcagagaagtcccgaactgggttaattgccccaccagattgcgggcccgctccagcatgattgggaagcggtatagcgataaggtgcctgttggcaatgcactgccgccctgggaggcctgcaccatgctggtgagcagcgctttcggatcagcaggttcggcgtaaatcgccagcgatagcggctgcccgtcaatggaaagattattgcgcagattaaacaggcgcagacgcagggttttccagtaatcggtgagcgccgggttatattccggcaggaacaacccgaccagtgagttagcggtacgggactgcgtggtaacctctccactgtccagcaccgcaaggtcttgctgataggccgcctgcacagtttggctggccgcgacggaaagagacggtgccgcccactgactgctgccgtaatcctccggttcgtcaccgagcaattccagagcacgtacgtaccacattttggcttcattcaacgcatcacgggtcagttcgcgataagccatatcgccgcgcagaataagctgatccagcaggcgtataaaggtggccactttgtagtgggtcggatcatgctgggcgacggcatccgggtcaatggcatccagcggattggcatgccaggaagtagtttcttccagcggtcggcagttccaggtccagggcgcgatttctccgttaacgatatagccagccggattgtagacgtagttcatccattttgtggcttcgtcgaattgtttttcttgcaacagacgctggaagcacatcatcggggtgtagtagaacagttcccagtaatagagggcacaggcgctgttaaaatccaagggttcggtggtggtgccgttgtgtatctgcacaccggcaaacatactggtattcgaatggtcaggattgatcactatttcattgttattactcttatcatacttaaagtgtggcccactcttggcaacgtcattgggactcttctgggtggttaaaaacaccttggcaatgtattcattattaagcggtgtatcatccaggggaataaagagccggacagcaagctcgatatcttgtagcagccccgagtagataacatgaacattattatcaacgacatgtttaaggttaagcttgaacgctcggctggttccatgcgttgccggattgtaaggtggcaaagtgaaagtagcatagaagcctttgcccaactgaggttccggtagctgctgcgtcgccatagtcagaatgctatcaatgccagtattcgctctggacactagttgaggtgccagcagagtattaaggcgaatgcgataaactccgagctgcatatactgtacaccagcatcagtatcatacaggtgaagaatactatctggagagtaattgactttttttattgtcagcgtagaactcgccttcccaatatttcttccattttcatctttaatttcaaaataaagatctatggatgctatattgtgaataaaggttaaatctgacgcattcaaaacaataggattaaatacgtaattcatgccttcaaagctgggggacgggagttcttttatgttttcctctgcagtaaaagtataaacctctccggttacattagccgaaaataaaatattttttgcatccacatctgtatttaaatagagccaatttgatgttgtggcccaagaatgagctatagctaatggatcatcatcactaaccactgtacagaaagcatagttacattttttaaaatcattctggcggtttgaaccaacaggaaaatttattaccgtctcatgattacttatactaaaggagaataaaggtccctccgtattctcccccgataaatttatgaaactataagagttttcaggaagattaaaaagataatttagagttaaaccaatagtgtcattggttgcattataaacacaaattggtccatctatacgttctagccctacccagttcccttgtgttaccttatctgcataaataaaattatcgccttgtctgccacaagccttcattgcaactaattgacttcgcctgagatcatcgtttgcatttactcgataatttagggtaaattccggattgtttagtgtaataactaagctctcgcttgaatagacgtaagatatttgtggtattgatgcgttgtctatagcgacagatgaattgtgattagatgaggaattcaacgccagagagccaggaatatcaaagtcctgagcaaatttataatttgcccgcttaacaatacgcgctccattcgatggaatagtatcgaaagtatttttaattatagaatagcggctcagttgttctacattcattggattacaagtgctatctgaatatatgtatagcccagccacatttttattactgccgccaagatcgttgtaatctttcccggttttgtacacaaacaccagcaaggtatcctcggcctgaaaacctgataccgctagtcccaaccgttcaatgtcaggcttattgtcagtaaccgccatcacctgttctgtaatatcgtaagaccagggggcactccaactgccgtcatggcgcaagaacgcgagtttcagtgtaaaacggtcataggtttccactgggtcaataccatttttcgccacttcctctttttctacccagataaggtgcaaacgttccctgaatatgaccggacgtaccgcatccccgtatgggttgagcgccgtatcaatcttcgtccactctttccaggcattggcggccagtttacctgcctgcatccgtgagatatccatgttacgccagtagtaatccggcagattctcccgcgttcgcccgataaaccaagtcagcccggtgttgctattgacattatcgtgataggcactgaccactttcaggtctgccaccgtttcaaaacgggtcaggtacgttttaaacgcctcctccaccgtgtcccggctgagcttactttggctgatgttttccagcagttcatccatcatccgggtctgcccgatacgctgagtcggatcaatgtagttttccggataatagaccagccgcgacaccccgccccaggtgctgtaacggttattcaccgtccagtcagtaaagaactgacgggttgatacatcggcacgggcattgggttctatccggttcagtgcccggttgatatagagctgaataccggcaatggcctccgccagtcgggtggttttcacggcagaagaaacctgattatcaatcaggaaatacctgtacaggtcattccgactttgcagggatacaccctcgggctggatattacgccggaaccaattacatagcattgaacttagacgttctgcggtatgatccgccagcgccagagcttgctgtgtactgagcccggcttccatattttctgccagagtttgccactcattccaggaaggtaattctggcgctgccttattcgttaccgtcacatagcggatattcaccagcgtacgaataaccgacggcatagtgtgcagttctgaggccacatccatccattgctgtacggtattgatattctcccagttttgaaggttattcaccccagcgcaggtcatggcctgggtcaccatactgatgtccagacccatcaccgaagctaacctgtctgctttcagcgtctgctggcgcagcatatccagcgtgtcagaactgtgattacccagtgtgttaatccactggtggaatcggtagagtgaaaacagagtatcgatattgtgttgtccggcgggttgacttctcgcccccagcaccgagaaaccggagataaccaacacagaaagctctgcttcactgaggcgtaacttctgcacggaaagcgacaattgggccatcacatggcagaactgcaccagttgggtagtttcatcgtcattcaacgtctctttcagtgccagcgtcataaatctggcaatatccagaccacccggtttcaggttatctgtccacaacaggatataacgcgccatatccggtgacgtcagattcaaagtagcggcaataaagggtgctaggatttcagcctgcaactctctatcaccactctgtgcgatatcctcactaatacgtattttgagggtattcagcagattattgatttccggtgaaatatttccactgaattctggtgtgcataataaccagatctcttcagtcgttatttccgcctcagttagccactgcgtcacctgatacagccagataaccagccgcgctagttcctcagaagacagagaagccatctttttaccactgaatggcgaaaagccataaagcatacacagttcattgaccgttagctgatgggcataggccagtaaattcagccgataaagtgaggaaataccagagcccgaaagcgtcatgttatttttgctgtccagtacacccgccagtttgcccagctgatacagttcaccgctgttgacacccagcccgcgcatcagggacgaacggacaaaggtcgcctgctcttcaccgggatcaatgctgaccgtgctgccgtcggcttcaaagattttccctttcagcggtggcatgttaaagagacggttaaagtggctgatattatcatcgtcggcatactgactgataactgaaccgttcagcacctgtgcgtcatcaaaactcagggcataacggtgactgtagaacagcgtatagaaaactttggtcagcaccgagtcgttgataatgccctgtgcattatcactgtatacgatagtttgtagttcattcggagaaagtccgctagctaggcacaggcgaatggctttattcagtttgagcgcaaatatagtcaggggataagactcaaaagtgaatattccgccgccctgatttgtggcgctggtggaagaagtatagcgataagcatatattttcacacctttcctatattcattatcagatatgttacttaagtaattacttttgaaattagtattggctactaggggaccggaaaggttgccgacaattccggtccctgcgttttttctaagagtagccccaaactctctcgataccttaaaattaacacgtataaagaacttattatttccttcatacatcaaatcaaagtaatttacatgtttatcataattatctgtttttacacgtgttattttgtaagcttctagtttactttcattatttaccactaagcccgttgaaatattatccacataaacagaggtgctgtcagaatagtcattctgcaacatcccgaggtatttttgcacctcagaaagctcaagaccataatatttagctatccatgattgtgacgcgaaattttcgggggagatattttcaccgaagtttttcgcaaataaagcatcagcattcttttccgtaatctcttcgatcaaaatgttataaagttctggcgaaatattggccagaatcgccaataatgacgccccttccgcctgccccatgacctccggattgcgagacagcgctgacaaggtgctgtcatgcgccataatgacttgacgaatagtctcataaggctgatggtaaggcgtgtcaatggcctgacggtaagtcgacaggttctccattaatgcatccgagtcctttcccgtcttgcgggtaatatgttccagcaacagctcattagacagtgacagggtggagatttctgcatccatattattctgactcaatgtcagattagccagatccgggcgtcgattatcaagatggtaagcagaactgttgaaatgcaggtctttcgcctcacggtataattctgtgagatagccagccggcgagaacatggaagctacagagcctgggttgacaaaggaagaagagcgggagccaaacatttcattataactgcgtgaaaggttgtcttgttcaatacccaagcggatagccccggataattgcgggttagtacgggtgaaaatacgggcttccagcagacgatgacgttttccttgttcaacggcttcgtgatggagatagcgggtttctccccagctaagctgttcctcgaacatttttcttaattcgctgaatgagaaaggctgaagatcggcgagggtcattgattgaccgtcgcgagtttgattgattttgttcagtaatacattcgcactgtacataataatcctaattattttatggaagatgtccagaaagttgggtagacaatattttgtaaactactttcctatgagggcataaaaatctgtggagcacttattattccccactgatttttatgctctctctgctatctcatctaccaaattcagtgatatcactattaacaatcccaaatacgagatccttatcattttttaactcttttatactatttgaaaccaccccattaaatgattcccattcagaacggtccttgtttgggttatgactgctggtatctaaacgaaaaggttgagggtctgacataatgagaacattatatttttttgctgcattttttcattgacatagactgtatatgtgtttcttgcattttttacacgatatatatcgtacaatttgtgtggatcatttaccggcaaaagatttttaacagaatcccaatgtgacaagttccaataaacgtcaaagcttcctccataaattgaatatcctacgttactctcagtatcggtagaaaatgaatcctttccataagactgagtagttgatagaggtatggaaactcagctatcccactccacattttttcgaattacagagaggctatattgagtgttattaacaacagtgtatttaactctgtcataggttttagttgatgcatgttttttgttactactgcatccaaataaaaataatatgactgttaagaataaaattcgatatttagtgaccattttttaattcattgcttgcggcttaatctattttttggtgtgtaactccatacgctcagattgtaaatatatacatcaagtgcataagtcaccccataagcacatcctatgatgaatgaagaactcaacactgacctcttataacctgagctccgttttcccgagtcacactgcgcatctggtaaagcagagaacctctgtgacaacggcgacaatgatagagaataaaaaaacaaacaaaacattatactaatttatttcattaaaaagatttttattccttaaaaatgcatattataataattaactgccaataataataaaaaaaacacacgcagcagcagttaatacctctttaaaaacagaggatagatcattcactccttttaaataaaaccattgacgagcaaattgaaaatctatagatctgttatttttttaagaaagatcttaatctgtttggaattaagtcattgaaatacgtcataaactttaccatcatatactcacctgcagacaaacaactgtcattactcaacgatagcaatcatgaaatcacactatcaaaccaagcagcgcgactgctgcttgaaatggtcactaacagcaatgaaactcttcatcgggaagatttattgaaaagggtatgggaggattatggttttacatgttcaaacaatagcctcaatgtcgctgtaagcgagattcgaaaatcatttgaatccttgggaagggatccaaagattatcatcaccattcctaaagtaggttttcgtttcgagggtgctgtagagtcagtaattgaacagagtgaaaataatgtttttcctattaatgaaagtgaggtgcaattaaagccccccgctgataacactattttcacaaggccccaaaaacaacaaataaaaaaattcgttatatgtatgacattcgttttcctctgtagctacgcttcttatgaagcttttattaaattcaaacacctaaacgtacgtgatgaaaaaacaacatttctttatagcgttggaaaatgtgacgtttatgcattgggagatctcccaatagatgtgggtggaaattatattgatatagccaaacaagatatcgacaaagaagccattaattgcgactttgcgaagggtaatatttactacaaaaaaacacgcagtggcagtcaggacatacaagttagttttataggcatatgtggcttagacaagaataacaaacctaaagactgcagaagcatattaaacaacattggtgcaaatcgatgaaaaaaaaccattggttatatattgggctttcattactttccattattttgttaatagcatcctttgaaattatcaatgtggacaataaaaaaaataacatcgagattcgatgcgcgggtgagttaactttacgtagaaaagttaataacactgatctcgccaatttaaatgaaaaaaattttttatttttatatggtaatgggacaggtttattgatacagaaaggtgtactgtcaatagataataaaaattacataatcgatcgtgaagtaaagattaattacactgattttgataaggatcagatatacacattcaaaattataaatgtaaaattatgggttaatgacaatatcccacccacagttgatacgatattctccatattgggaagagtaccgtcatcctcttacctaaatattacgtcggttgataaagatctttacattttcaacgggctttcggggcctcttttcttgtgtaaacgattttaaatatcccagcccccaagtaaagctgtctcttgatcatatttcataggtcaagagacagatcgcctgaagggttctgccccaatagagagaagtgacacaggcctccatagtaatgagggtccctggcgtaaaagtgcgtatagtatcaagcaatttttgctgtgaaatttttcggttcgaggcgacagaaccgtcctccatccagacacagacttgaaaaacgtttttggcgaggtcaatgccaacgactttaatcgtattcattagatgttctctcgaaattcagggcatcggaaagaaagatggcactgtttgccgctgaaaaagggagcgtccatcacatcacttcaggttctattgggttggttgtgttgatttgattgccatagggttgggacggagtgatgggaaagaatgatatatctggcaagtgtattactggtataacgatactgagtgaaacgatattggataacaaatttggcattattttaaaattagagaaatgaataaagccattgaccgtgttatcgttgtcaattaacgtaataaaccccaattctgtttaagctgtcactggaatatcttcttcttctgagtagaaaactttcagtgatggtttcttctttttatgacaataagcaattaaccccgttaaaacagtcaacagaaacccttttatacttcgatgacgagaatgttctatttgacagatatttttcaattgcccattaaccgtctcgataataaaacgccttgataacattattttatcccaatcttccagcacactcgctttaatattactccgctttttcgtgatgaaagtgacaccgttttgtgctaaatcgtttgccagttcctgactaagataacctttgtcgccatacaaggaaccgattaattcttttgctaattcccgaaccactttcctgtcatccgtatttccagccgtgattttgagggccagaatttcgccaagatggttaataatcaggtgtaatttgaaaccgtaaaaccaccccattgaggtttttcctcgctgtgctgtcccttcaaataccttatggcggggaatacggatattatggcacacgctcaaacgcgtggagtcaataaaggcgatccccgtagggtttccttttaattgagtcagatagctgcacagaggcactaaaacggaaggcgcgacactgataaaacgagtataactgagcaaggtgggaaaatcgtgatgatgatatcgccaaatatgctccagataaaaatttttaaaatcacgataatgcgacagatgaaagaggatcaggatggtcatgatttcactgggatacatgtgaccttttctacgacgtaggcgatatcccttattgagacaaaactgttcccattgtggaatgaaaaaacgacaaaagtcatcgacatcgatgaaaatttcaactaagttgttcatagcctgttcctccccggagctgtttcgacttgcaccaaaacactgctccttgaacaggcttctcgtcaatttcttatccagaattggggttaattattcattgtaaatttggtactgaaaaagactcatggcagattttcattttactcaaataggaaccattcattctccttataaagagaagtttgccattccccgtcagccgggtctggtggaagatggcacggggcaactcgaattgctcgctccttataatcaggcagatgctatacgggggttagaacagttcagtcatttatggattgttttcgtttttcaccaaacgatgaatgggggctggaacccgctggtccgccctccccgcttaggcggtaatgccaaaatgggtgtatttgccactcgctcaactttccgccctaatccgattgggatgtctttagttgaactaaaagggattgattaccagaataatcgcgtgctgctacaacttggcagcctggatctcgtggatggaacgcccgtacttgatattaaaccttatctgccttttgctgaatcacgtcctgatgccaaagcaggatttgctcaggaagcgccaaatacagatatggaggtctgtttttcttcaaacgcagaacatcaacttttatgccatcaggtaagttatccgcaattacgacgctttatctgccagattctggctcaggatccgcgtccggcctaccgcaaaaaagagcaggaaaaccgcatatatgctgctcatattctggattttaatgtccgttggttaattaatggtgccataacagaagtagtttctatcgaactccgctgaaaactccttttgacatcacaaactcactggtagactaacggtttactttatttttgggttcggtggcactgtcttcattgccacctagaagcaatttgctgtccaatggaaacttactatgcgtactagccaatatttgctgtctactttgaaagagacgcctgctgatgcagaagtagtcagtcataaactgatgcttcgtgcaggaatgatccgtaaactcgcttcaggtttgtacaactggatgccaaccggtgtccgcgtgttgagaaaagttgaaaacattgttcgtgacgaaatgaataatgccggggcggttgaggtttccatgccggtagttcagccagcagatttatggcaggaaagtggtcgttgggtacaatatggtgcggaattactgcgttttgaagatcgcggtgcccgtccttttgttctgggaccaacccatgaagaagtcatcactgatctggttcgcaatgaagtgacttcttataaacagctaccactaagtctgtaccagatccaaaccaaattccgtgatgaggttcgcccacgttttggcgtgatgcgctcacgcgaattcatcatgaaagatgcatactctttccataccactcaggaatccctgcaagagacttacgataagatgtacgatgcttacagtaagatctttacccgtatcgggctggatttccgtgctgttctggctgacacaggttccattggtggtagtgcatctcacgaatttcaggttctggctgccagcggtgaagatgatatcgttttctccacagagtctaactacgcagctaatattgaactggctgaagctgtcatgccatccgcagaacgcgctgctccgacagaagatatgcgtgtggtggatacaccaaaggcgaaaaccatcgcggaactggtagaacagttcaacctgccgattgaaaaaacggtcaagactctgattgttcatgctgcagaagaaagcgaacacaaactggttgctttgttggttcgtggtgatcatgaattaaatgaagtcaaagcagaaaaactggccttagtcgccagcccgctgcaattcgcgacagaagaagaaatccgggctatcgtcaacgctggccctggttctttaggccctgttaatctgcctatgcctgtaattattgaccgctctgtatctgtcatgagtgattttggtgcgggcgccaacattgatgataaacactatttcggtattaactgggagcgtgatcttcctctgccagaaattgcagatatccgtaatgtggttgaaggtgatgccagcccggatggtcagggcacgttactgatcaagcgtggtattgaagtcggtcatatcttccagctcggcaccaaatactcagatgcactgaaagctaccgtacagaacgaagatggccacaatcaagttgtgacgatgggatgttatgggattggtgtcacccgaattgtcgcggctgctatcgaacagaatcacgatgatcgcggtattatctggccagatgccattgccccattccaggtagccattttgccaatgaacatgcataaatcttatcgtgtcaaagaagtggcagaaaagctttatgcagacttacgttctaatggtattgatgtcattttggatgatcgcaaagaacgtccgggtgtcatgtttgccgatatggaattaatgggtgtcccacatactgtcgttattggtgatcgcaatctcgataacgacaaagtggaatacaaataccgtcgtaccggtgataagcagatgctaaaactggaagacgtggtggattacctgaaaaataacatcaaacaatcatgattaagccttgatcttgcgatcaggcaaagtcagtaataaaaaaacctgcgtactcagtgcgcaggtttttttatatgccagaatacgctctatcactacttactttttagtctggcaggaagacgacttatcaaaatggattttacctgtctgaattatcgcgttatcaaataatccatcttccattgaagggcgaagcgtataatatccctcgacttcaacataaacaggtttaccacctgcaatccctgttgcgctgtaaccccgctccagatcgatattttccgatgcatcgtagagtttccctgtacgacactccgtaaacgtcgcactatccgcaaaatagatatattctccggccagtttttgaggtgtgacttttgtcagctcataattcaatttggactggattggctcaccatttatatccagcataaccagattttctcccttcatctggtaatacgcttttttaccttcttctccactggtcaggtttatttttttaccattgacgatccaatggcctgtatcaaaaaaaggctcttcttgccctgatttcagataggtttgttccagaatatacgaaccatctttcgcaagttgtaaggtagtttcaatacctgcgcaatcagcacaaggtatcacgcctttaaacactttctcgttgattgtaaatttatttggggatgtcgagtcaacctgatgtgcaggaagattagtctgacatccaaccgcagtcagtacacccgatgcgaccaaagcaagcaatatgttcttattcatcattttcatccaataaatgcagcagaaagtccagttttaacatgagttacacataagacatgaacagttttgacattactttaccgtatctcaaaatacacagtgcaaaacccgctaatatgacgtaattttgttgcctaatgataaggttaggctttaacctactggctttttcaatgtaactcaacaaacttatatagtcacagtcatcaggaaaaacttactgtgctatagtcgtaggtagcatttttttgcatctgagtttggtcaatcgcgggcggcacgataaccgccactaacatagtggtgagcgaatatgtctatagatactgaatatcaacccattaattgtgatgattatgagagccttgagctaacctgtcagaatcagcttcatctacatatccaactgcgaggtggtgagatttttgaaggaaaagcaattcaattgattatgagaaaaaaaatcgaatacattctcgtcgaatcaaatgaagaaacccgtgagttaagattggatcacattatcagtttcagcaatccagagattggcacgattgttgttgagcattcttcattgtaaatgacgtggttaacacgtttactacacaacaaaggattattaaataacaaaaagtcctcattctatgtgaggacttttatcgttgagaagtatattttttcattgttatgggaaccaaatttctacagagtcaaattttgagcctgtgtatacgctttctggcgtaaaatgggctttttcacattttatatgttgtatatctccatcaccgaagccatcatcacggatatttaccttttgtccactagcctgagcagctaaaagggctgcataaatactttttccaccatcattatcgttttttgctcggccgtatgcccaataaatcttggcactggaggcccaccttcctgcatctgataaccaaactgcccaagtattcttatcaaatggagcgacaaagaacccaaccacataacccgaaccacatccaatcgcacttctatattcctcctgatttgattttgtcaataaagaaactgatttgacgatgctaatatcaggtttattattagactcagctttcttttctccatttccaacattagcagaaaatgaacaacataccgcagtcaatattaatactaaccatttatattttttcataattaactcctaatcttcaaaaaaataattctcgaagataattttcttatgcaatcaaatgataaaaacatagattttatttataacccatagataaaaattcaataaaaaaaattactcggtattatctcaaataccatgacctctaccgttcccaataactgtcgatctcccaacttcaccaaatttttaaataaaagggattttattttgatatatttttttaaaaaaagacattaaaattaagaataaacacaattattcatggcgttttaaatcccagttaaaattttaatgtataattatctttatttaattatctttatttaattatctttatttaattatcaaccactctgacaacaccgcctgttttaaatttaagaccactttcccgattaagaattaacttaaccccaattctgtttaagctgtcactggaatatcttcttcttctgagtagaaaactttcagtgatggtttcttctttttatgacaataagcaattaaccccgttaaaacagtcaacagaaacccttttatacttcgatgacgagaatgttctatttgacagatatatttcaattgcccattaaccgtctcgataataaaacgccttgataacattatcttatcccaatcttccagcacactcgctttaatattactccgctttttcgtgatgaaagtgacaccgttttgtgctaaatcgtttgccagttcctgactaagataacctttgtcgccatacaaggaaccgattaattcttttgctaattcccgaaccactttcctgtcatccgtatttccagccgtgattttgagggccagaatttcgccaagatggttaataatcaggtgtaatttgaaaccgtaaaaccacccccattaggtttttcctcgctgtgctgtcccttcaaataccttatggcggggaatacggatattatggcacacgctcaaacgcgtggagtcaataaaggcgatccccgtagggtttccttttaattgagtcagatagctgcacagaggcactaaaacggaaggcgcgacactgataaaacgagtataactgagcaaggtgggaaaatcgtgatgatgatatcgccaaatatgctccagataaaaatttttaaaatcacgataatgcgacagatgaaagaggatcaggatggtcatgatttcactgggatacatgtgaccttttctacgacgtaggcgatatcccttattgagacaaaactgttcccattgtggaatgaaaaaacgacaaaagtcatcgacatcgatgaaaatttcaactaagttgttcatagcctgttcctccccggagctgtttcgacttgcaccaaaacacggctccttgaacaggcttctcgtcaatttcttatccagaattggggttaaattagttaaaaccatatcaattataaaaatacatttgttaaaaataattatttttatgaggaaaacatggcggggcaaaaattcccaaagataattaatcgtagactcttgggaggatttatccagacgagacatttgcagtcttgattctggcaaatcatctttggctaaagagcgctggtaattatcgcaacaaagcgattagacagtacatgatgattatcactcacaatcaggtaaactgaatgcaatatcgtgcataattttcatctggcacaatcaattgatgagtaaatttgcgatacaactttttctgtgtacgtcatagccatatgcacacaatctcacctttatttttttatctcatcgaaaagagggatgttatgaaatcacgtgctgccgttgcctttgggccaaacagaccactcgaaattgttgaaattgatgtagcaccaccgaaagccggtgaagtactgatcaaagttagtcataccggtgtttgccatacggatgcttttacgctttcaggtgatgaccccgaaggtttattccctgttgtgctcggacacgaaggcgctggagtcgttattgaagttggtgaaggcgttaccagtgttaaacccggcgatcatgtcattccattatatacagctgaatgtggtcaatgtgatttttgccagtccggtaaaactaacctctgtattgccgttcgcgatactcagggaaaaggtctgatgcctgatgggacaacccgcttttcctacaacggacaacctgtttatcactatatgggatgctccacattcagcgaatataccgttgtagccgaggtttcactggcaaaaatcaacccggaagcaaatcatgaacatgtttgcctgttaggttgtggcgtaacgacaggtatcggtgctgtacataatacggctaaagttcaaccgggagattctgttgctgttttcgggctgggtggtatcgggcttgccgtccttcagggagcacgtcaggccaaagcaggccgtattatcgctattgataccaacccgactaagtttgaattagccagacaatttggtgctacagattgcatcaaccccaacgatcatgacaaacctattcagcaggttattctggatatgacgaaatggggagttgaccatactttcgaatgtattggtaacgtcaacgtcatgcgtgcagcgcttgaaagtgctcatcgtggctggggtcagtcagttattatcggtgttgcaggtgccggacaggagatttctactcgtccattccagcttgttaccggtcggacatggaaaggaacagcctttggcggtgttaaagggcgcagccagctaccgggaatggttgaagatgcaatgaagggtgaaattgagttggaacctttcgtgacacataaaatgccactggaagatattaatgaagcctttgagctgatgcatgaaggtaaatctatccggacggtaattcactactaattgcacagtctccacattctaccgttttagagagaaaagtaatggaaagaattgaacatcgcgcatcctttggcggatggcaggatgtctaccaacatgaatccagtactctgaattgtcagatgaagtttgcagtttttctgccgcctcagataaaagacaagaaattaccggtactgtactggctctccggattagcctgtacggagcagaatttcattaccaaagccggtgctcagcgttacgcctcagaacatggcatcgttattgttgttccggataccagtccgcgaggcgatgatattcctgacgatcccgcttacgatcttggaaaaggagccggattctatctcaacgcactgaaacagccctgggcagcgcattatcagatgtatgattacattgtttcagagttacctgagttaattgagaagcaatttaatgttaacgatatccgggccatcagtgggcactctatgggtggacatggcgcgttggttattgcgttgagaaactcggaacgttattgcagtgtgtcggcatttgcgccaattgtagccccgagtcaggttccgtggggagaaaaagcgttttctgcttatctgggcgaagaccgaacgctatggaaacaatatgatacggtagaattaattaaaaatggtgaagtaaaagaacaattaccacttttaattgagcaaggaacgggtgacgattttctgaatcgcgagttgcgccccgacttattactgaatgcctgtaatgaagaaaattacccgataacaatcaactttcgtcaaggttatgatcacaactactatttcattgccagctttattgaagagcatatcgcctatcatgccagagcaatgcaaaaacgggctgaaacgcaataaactttgacgccataatctaccttttctgaaaacggtaaatatccgccgcctttctgatactaaactggtttccagcacatatttcagcttactggaaaccagcctgacaaaaccatccagataatcttatcgaagtcactcgcctttgaatttaatttgcgatagcatctgcgccctttttacgatttttcgacaattgaagacgaggaaacctatgttcatcggttttgactatggcacatcaaattgcgcagtagcagaaatgatcggaaatacaccacagctgatcgctattgaaaatgacaatttttatatgccttctgcactggcagcaccaacccgagaatcagtttctgagcacttgttccgccacagaaatattactccgggttctcctgtcggtgagcagttactccgcagcgcaattacggcaaatcgtgaggaaggcatcgaacttttacctgaagatatcgtattcggtcaggctgcactgacacgatatctggaagaccctcaggatacttattacgtcaaatcaccaaaatctttcctcggtgccatggggctaagagaagtgcaaatcagctttttcgaagatttggtttgcgccatgatgtccaacataaagcagcaggtagaaagcaaaacccagcaatatgttgaagaagtcgttattggccggccggttaactttcacggacgtggtggtgaaaaatcgaaccagcaggccgagttgattttgttacaggcagcgaaacgagcaggctttcgcaatatagaattccagtttgagcctgtcgcggcggggctggaatatgaatccaccctgactgaaaataaagtcgttttagtcgttgatattggcggcggaacaacagactgttcgctcattcagatggggccggactggtgtggtaaatccgaacgtagtgacagtttactggcgcacaccggtcaacgtgttggcggtaacgatctggatatcaatctgacttttaaacaactgatgcatcctttcggcttaggcagtaaatttgcatcaggtattgatatgcccctcacccagttctggaacccgattgccatcaatgatgtgcaggcacaaaaagagttttactctcgccagaacctaaccgcattaaaatctttacaccgggatgcacaagagccggaaaaactggcacggttactgaaagttcaccacgaaacactgggctacagtctggtacgcagtgctgaagaagcgaaaattgcactgtcaaataacagtgaatagcgctcatgaagatccgcctgcgcatcagtatttccctgctgagcagattcggtataccacctgattgcttcctgattatctaatggaactcctagtcctttttcatacattttcccgatcttatattgcgcaactgcatcaccttcatcagctaatctcagacaagtgaggaaagaagatccatcaacctgacacggatctgctggcttacatgctgagatagaaacagtcagagtgaataaaagagcaagcaagggaacgcgttccatgtctttaattccttatttttgggagttcagtaggagggcaaagtgaatacacattaacaaatattatatggtgggggaataatgttgattatttcaataaatgttaaaaagtggggtttattatctttttataaaaataggccattgaaggaataataactcaaaaaaccagtataaaataaaatattgcaatatctaaaagaaaatcatcagtaaaatgaactgaaatgaacaagtaagttaattcaaccgaaaatcgacagattatgatctatccaaaactaatgagcctgtacggagatctttgtacaagccccacaatttttcaaaaccataagttaattttttaacttattaaaattacaaacctaattcactgagccccggataattatctggtcgacgccccaaaggccagtgaaatttacgttcatcttcatttatagggatatcgttaatacttgcaaaacggtttatcatcatgccatgttcatcaaactcccaattttcattaccatatgaacgaaaccaattacctgaatcatcatgccattcataggcataccttacagcaatccggtttccttccgtcgcccataactctttaattaaccgatagcttttttcttttatccattgtcggactagccatttttttgcttcatcccggccattaacgaactctgttctatttcgccacctagtatctttgctgtatgccaacacaactttatcagcatcacgcgtattccagctatcttctgcaatacgaactttctgtgtagctgtttcataattaaatggaggaataggtaactttttctcaacgaacgcagacatattttctccgtatcatttagcgagtagtagaaaaactaatggccttataagctctcttaactacattacaaaaatatgggttatttaatttttagattagctgaagaccatcaatcccaataatatgatatcatgtgaacagatctgtacacttgagttaaatgtacagatctgttcacaaacaggcaatattagaattatattaaaaaccatatcaatagaatttttttgaataactaagaagaaacatcatgagcaaaaaagagcacatcttagatattgcagagtcactatttaatcaatttggttataacgctgttggtgtcgacttgatcagagatcaggcaaatgtatcaaagacatccatgtatcgttactttggttctaaaaataagctgattgaaggagtgttactcagacgccaccaaagatttcagcaggaactcactgctgctgcatcttcagccgagggagttgaaaaaaaattaatgcaatcctcgactggcatttttcatggtttgctacggaagattttcaagggtgcctgttcatgcatgctctggctgaatttaaaggacacgatgaagctatcgtcaaacatgcccagcaacataaagcatggataaaatcactgttgttatctattttctcaaccaatcaggaaaatgcagagagcaaagcagaagcactgataacatttatagaaggaatgataataagagctgagtttggtgagatttcaggtcaggaagaatgttatcgaacaatggcagaacgattcatttagaatgtgttgccaagtgaaggtttttcggtctcttagccagcgatgctgaccaagagaccgattaccataagaacaaaaaacgttcagagattaccctggtgttgggttagtttaaagctaattaccttccgtctttcaagctgctattttgttggcttcgttcacttccccctgtcacatagttgactatgctcctgagagtctttcccttaccgcccgatgcaactcgaaatccattaggtatattcaaaataatgaaaattatttgtctaaataaaaggcagtgataactcactccccggttatctgacaaaatcttaattataacttatatttttacagacaaattaatacaccagactcatgataaaatcaacaaataaaagctcaaatgttgatttaactacacaatattcgcgtttttatttagctatcaaaaaacacaaaatgattaacattaagttatataattgatttatataaataaaaatttaaaatattgtgtttattactaaacgcaaaaaaataagcatattttacaaaatttattgcatagataacatgaatatgaaaagtactactgtataaatatacggaatttatagcatccttttaatcacgataaaatttaaattgaaggctaaccatcagccatttcatcaatataatcccatgagtttcgagttgtattacgacaataaaggcgcccagacaacaaagaatcaacatggaaaacaggggatatagcaggatgttatactacattaggcaggattttatcgatgaaatagcatggagaaatgctctccatgcggttgattaatgtgcagccttaacaacccagcgattgaacaaataacgcgagccataggcaggaaagacgttaaacaaagcaaagaagattttaattaagatctgaactaccatcattccaatgatctgattggtaggaagttttccgtaaaatgcaacaaaacagaaaacaaaactatcaaggattgatgctataaacgtactaaaaaacacccttagagccagaaaccgagaatttgtcatgtcttttaacttacacaagacatacgaattaaccagctctgagactaaaaatgacaatgaagaagcaaaaatcgccgacaagatgtgattcatcaaagcattatactgctcattcaatccccagcccggaatagccggtagacccgtcgatatacttaataacgagacaataatcagattagaagccagagacatgtatatggcttttcttgccagccggaatccgtaaaactcactgagcaagtcaataactaaaaatgagaacggataaatgaacgtccccggagtcacaataatatcaaaatattcaatatagacaggtttcgctgctgctatattactgaaagtatagaaaattgttagtaacagggcgagaagtgaataaacaacccaggacttttcgttacgctcctcaatttcatagattgagggtgaatttggaaaactagagtatatttttctgtagagcgatttcgtttcgtgactatcgaaatcatctactatttcactcttttctaactccttcacattgatttttaaaacttttcctgttgataaaattaatacattggctgtattatcgtaactgttaaatcccaataatttatatttttttcccatacccaaaccgctcttccattatatctccaatcactgcaaaatcgtctgaattctcaacacaagactcattgatatgaaattttttctgttttggatcgaaacataatttaggattgtcgctctgataattacctctcctgactattagtaaatcaccagcattatatttacccgaaaaatcattctcaagtaaaatagcgacaatattagggccagaaccaaaataataagttaatgttcttccaacaataagtgtgccaattttactttcataaaactcggcagtaacacactcagattgcataaacagcgggacagcacacggattcatattcccttcataagaaacaattgcatcaatgcgctctttttctgcgatatcaatcgcttcgatctcactgtaagaaataccaaaaaaattagatactttttggattgttgaggagtgaacactttgtacccgaccatctaaaatattgtagatcgttgttcgattaagccccgtccggtcacaaagtgacacccgggtttcccctctagaatcaagtaaatactgtaaattttttctcaggtattccattttttgttttttatacatagcaatgcctaggaaatatttaagagatcagtaaaaaattccatatataaaatttcttttaaaacacaaaaaatatcttcatgattaatgatataaaattaaacttaattacacaacaaataaataaagataaaaaacacattccctttaattaactatataaaaacagcacaatcaaacaccaaatgaaaattttaatgaataataaaatattaatttttcatttcatgataactaaataaaaacactttcccatataaagcattcaagattaaataaactgccatcataacatttggtaaatatttcaattataatgtagagcaataaaaacaaaatcacaagaataaattattaaaaatgataacatagatcatataagtaataatagcatatatagataatattttttatgaaaagcataacatattttgttactaaggatttagataaaataaaaataccaaaatagatgattaaaccaaccatcaagttaataaaaatgatccgtaaaatgacagtatagtgatttcagaaattcgtatgaaaggagttatgacttagagaaattcatagaaaacacataattgattgttttttaaacatctcctgttttcttgcaaaatgctagcaacgattacttattcaaaattatctaagggaacctctaaaaacttttcacagccacaaaattgagtaaaatgtaggcacagtacctctctgcaaggtagcgccatcatgataccgcctcgttctgctttaaaaaaagacaaacaggcatccgaatatcaccgtcgaaaaatcgatgaattaggtgatccgctgcttgttcttgataaatatgttgatttctcggcactggctgacaccctagaccgtatcgtcccacgtattatttcccccaaagggggacgcccgccattcccgacggaggtgatggttcgcatcattatcctgaaacatttccataatctttccgatgaaaaaatggaatatcaattgcttgaccgaatgagctggcaacgtttttgtcgcttgaccgatgtcattaatattccaggaccgt

SEQ ID NO: 439 - DNA, 1594 bp, Xenorhabdus sp.
  CDS (45)..(650)
aagtattttatccggtttttcggacctggcaataaataccgaggattaaggtaccattagtcgatgaccatgtggtagtacgttctggctttgcccaattattaagcttagagcctgatattgaagttgttggtgaattcagttcatgcgtcgaagcaagatatggtctgcccggttcaggggcaatggtctgtattcttgatatctcaatggctgatgaaagtggattatcactgttgcaggatattccctccggcattggttgtattatgctgagcgtccacgattcagccaccatggtagaaaaagccctgaaggcgggagcccggggttatctaagcaaacgctgcagcccggatgaattggtacaggcggtgcgtattgttgtgaataatggtttttacttctcgccggatattgtgctaaaactgacatcatcaaaaaataatcctgctgctttggatcacttaaccaagagagagaggcaaatcgcggaaatgcttgccacaggaatggatgttaaagctgtagctgctgaactgggtttgagtcataaaacaattcatgttcatagggctaatgcgataagtaaattgggcgtgacaaataacgtgggcttagcaaattattttgcctctagtgatctctaatgtatcgatacttgctcaattcattttgtggtggattactgttttcctgctggtggttctgtttatgggtgatagcttattactttatcaatgacttagagctggctattttgttttttccatttgcactgcgtcttggcattgctttacatatcccacgaaaatattggccaacactatatggtacagaatggttgcttacgattggtttggccttactaatgaagcagcctcagtggctaactgtattaactgccagtatagtcagccttcccatagtctgggcagcctgtcgttattattgtggtaatcagtggcaaagacttgctgtgatagcccttgtgattgtaatcacttcaatcgttaatgttatatccgtcatcaatcataatccggcagtcaccatcgcgcttttggtgagtttaaccggaggcgttatgctggttcctttgtgttacttagtttggcattatttattccagaatgtctggctacccatgactgctaatgttattacacaccaaattcgtttcaatctgaaacaggtcattttttatagtctattatttatattaaatatttttcttcagatctggatacctaacgaactccgctattttgcgccattctgccttgctattccgattattttattggcttttcgctatggctggcagggagcattgcttggcactttactgaatagtgttgcgttaattgctgctcgcagcggtgtttccgatatggaaattacggatttgctgttatctctactaacccagactctgacaggaataatacttggaatggctgtccaccgtcagcgtgatctgaatatgcagctaaagagagaattatctcgtaatcacagtttgtcacgccagttagtgaaagcagaggaatcagtaacgcgagagattgcctcggaattacatgatgaaata

SEQ ID NO: 440 - DNA, 1568 bp, Xenorhabdus sp.
  CDS (351)..(1271)
gtgctctaaagaattgcggtgcataaaaaaatcactatggacagacagggtaaatgtacaggaagtgaaaaataaactgtagcatacgctacaaagtctggtttcccagacaacttgcaaacacaacatcacaaccacaaagccaaaagtacctatgtattgccgcaaatttgtatcactccaaatttgcccgcgacagagctacttttcgttccggcttaggaagtgcgcacactatagggatttgctggtatatcatcaatggacaaattataatgcttcggattacaaaaactaatacctgagagaaaagagttaccggtatcgtaaccactatataagaaaccaacatgtccaaacgtttaccaccactcaatgcgttacgagtttttgatgctgctgcacgtcatttaagttttactaaagcggcagaagaattatttgttactcaggctgctgtcagtcatcagatgaaaagtctggaggattttctggggctgaaactctttcgtcgtcgcaaccgctctttgttgctgacggaagaggggcaaagttactatctggatattaaagaaatattcaccgccattaatgaagcgacccggaaacttcaggcccgtagtgccaaaggtgcactcccggtcagtctttctcccagttttgctattcagtggctggtgccaccgctttctggttttaatcagggctttccgggaattgatgtgcggatccaggccgtggatcgggaagaagataaactggcagatgatgttgatgtcgctattttctatgggcggggaaactggccggggttgcggacagacaagctctaccctgaatatttgctgcctgtttgttcgccttcgttattaatgggtgagcgcccgctgaaaacaccggcagatcttgtcaatcatactttgttgcatgattcgtcccgccgcgactggtatgcctacgttcgccagcttgatatgcaacagttgattaatgtccagcaggggccgatattcagccatagtgctatggtgattcaggctgcggtacacgggcagggcgtagcgcttgccaataatgtgatggcgcaaaatgaaattgatgcagggcgtctggtgtgcccgtttaatgatgttctggtcagcaagaatgcattttatttggtttgtcaggataatcaggcagaattgggcaagattgcagcttttcgtaaatgggtacttacacaagctgcgagcgaacaggaaagattaggctttattacaagcgaatgacattaatgaatgagagcaggagcagcgcaatgaatagccgtgcaatgcttgttttttccggaataagtggcttcttctacgtcgcttttggcgcgatgggagctcatcttctggcatcggtgctgacaccgaagcaattggagtggattcataccggtctgcaatatcaggggttacatacattggcgctgatggcgctggcggctgtactgataaggcaacccgtgacgttatttagccgggcaggaatattttttgtagccgggatcatcctgtttagtggcagtctttattgtc

SEQ ID NO: 441 - DNA, 1997 bp, Xenorhabdus sp.
  CDS (724)..(1653)
ctgctcgagccatgtgctctaaagttcaataaaacctgtagttcacggcgtaaattgagcggctgtccctgcattcctcgtgggagcgccaataacagagaaatcatggtaatgaatcccaatacgctgatcaggaaaaaagcctcccgccagcccaatacctgcgataaacgcgtaatcgccggaacaccgccgagattagcgatagtcaatcccataaacatgctggcaattgcgctggcttccttccctttctcaactactcgggtcgctaccaaggcgcctatgccaaaaaatgcgccatgatttaggctggtgacaaaacgggcaataagtaatagggagaaatcaggtgataatgccgacaagatatttcctacggtaaaaatgctcattaaaaaaatcagagcggctttcggggaacgtttaatcagtaacaaggtcattaccggtgcacccagcatcacaccaagtgcatagaccatcaccagaataccagcggtggggatagaaattgccagatctgaagctatctccggcaacatacccattggtgaaaattcggtagccccgatagcaaatgccccaatagaaagtgataacagagcggtgctcgttcgcataatttcctcatatctttaatctcagcgttattgctgacacgacatcactgtaagtgagggtgattatgtcagtttgatatttgcagaaacactgattaatatgagaaaaacttttgacttaaatgcgaaaatgaaaattactctggaagaaatgcgggtgtttattgctgtagtggacagtggttcaataaccgcagcggctgaatggctggggttcactatttctgccaccagccgagcgttgttgcgtcttgaagaaaaagtggacagtactttgttataccgtactacccagcgtataaagttaagcgaagaaggcgctgcatttctacaaaaagcacgggaagtggtgaaactcgcacaagaagcggaagaaatattgctgagtcacaaagatattccctccggaacgttacgagtagatgctgcaactccttttctattacatgtcattgcaccactggttgctcaatttcacgaaatatacccacagatagcgctggaattgacgaattacgaaggtgtgacggatctactggaaaaacagactgatattgcctttcgcattggaacactgagtgattcttctctgcacgcgaccttgttaggtcatagtaaactgcgagttctggcaagtcctctctatttagaacgttttggcgaaccgaaaactgttgaagaattacaacagcactgtctgctcgggtttactgcaccagaaaatctcaacgaatggccactctttcatggtgataaaaaggggatcaaaattaccccaacaattgctgcaagtagtggtgaagtattatgtaatctgacccgaaaaggagtcggtatcgtatgtatgtctgattttatgactcatgagatgagagagtccagtgaatttaaacaggtactttctcatatcacttttgagcaaaaacagccgattaatgcagtttattaccgtaaccagacgctttcaccccggttacgctgctttattgattttattaaaaataatagcttgtgccttaatcggctatgatatccgttaacccctaggaacatagataattgtatgtttataccggggtgaactagcacagccagcaaagaggcaacttgaaagtatagaatacttattcttgagcttttttcagtacttggttaatgctatatccgtgagttgattattcaacgggtatctcctaatttttatctctttttcttcagtttataagtgagtgacatctcaatacatagtcttaactcatttactggtaaatcggcgtaagggtctaaaattattgcccggttttttgaaaaaattaactcaggaaaaagtgttttgaatgtatcaattaatgttgtctggcagttaaaaaacat

SEQ ID NO: 442 - DNA, 2659 bp, Xenorhabdus sp.
  CDS (1007)..(1822)
agggacggcccaccgtttcaacctgacgctataccgccttgatgaagttatggaaggtaaactggatatgttgatccagccaatcattaccgaatatcaggctgaccagttatcagcactgtcagagcaggattaatgaattatcaacattggctgcaatacgccgcggctcagatatctgataatttgcctgatgatagcagccctaagcgagaggcggagatcctgttagggcatgtgacaggtcgctcccgtacctacctgatagcgtttagcgaaacgtccatttcaggagaagaatcccttcagcttgatggcttactggctcgccgactgaaaggtgagccaatcgcttatatcgttggtgagaaagagttctggtcattaccactcgcagtctcacccgcaactctgatcccgcggcctgacacggagtgtctggtggaaaaagcacttgaattgttgccggaaacgccggcacaaatcctcgatcttggcacgggaacgggcgcgatcgctctggcactggcaactgaaaggcgtgattgccatgtaacgggagtcgatattaatcctgaagcagtcatactggcaaaaaacaatgttgaaaagatcaatattggaaaagtcaatggacaagaaactattcacaatgtgaattttttacaaagtgagtggttttctgcagtgggtgacagacaatttgatatgattgtcagtaatcccccgtatatagatgagaatgaccctcatctgaaagaaggggatgttaggtttgaaccggcctctgcattgattgccgcacaaaatggtttggcggatttacaggcaatcgtggaacaggccctccattttctattaccgaatggatggctgttattggagcatggctggaaacagggagcagttgtcaggaacctgtttttagagaagggttatcatcagatagcgacttttcaggattatggtggtaatgaacgtatcacggtaggtcgatggaataaaaatgaaacccataactaattatgaattcaatgatgctcccctgattgatggtattattctggtatcaaaggctattcgtcctgatttccctcaggcattagtgtcagagcagttaactgcgttagtcgaagaagcacagcaggcacttttttcaatcaatgaccataaagaaaaaatgcaatcattactgacacttttttatcaggagtggaagtttggtggagcaaatggggtgtactgtctatcggatactctatggctggatagtgtaattacttcccgtcagggtgcaccggttgcactgggtgcgctatttgtgcatatcgctcagatgttggctattcctataacgccggtaatatttccgacacagttaatattacgtattgatttgcctgatcaacctgcctggtttattaaccccatgaatggggaaacccttaatgaacatatccttgatgtctggctgaaaggtaacattggcccgactgtccggctggaaaagaaagacttacaggaagccgataacagcagcttagtacgcaaaatcactgatacgatcaaagtttctctgatggaagaaaaaaagatggaactggcactcaaagccagtgaagttgtgctgatgtttgatccggatgacccgtatgaaatccgtgaccgtgggcttatttatgcccagcttgactgtgatcatattgcggtttcagatctgagttactttgtagaacattgtcctgaagaccctatctcagagatgataaaaatgcagattaattctatagatagagaacgccgaactatagtgctgcactaaccttactatcgcattggtaggcaggtattaagcggatggtggcagagttacttacacctgatttggtgttttattaaaaattttttactcttaacaaatggtttgttcttaacatttgtccttaacagcagaaggtataagcatgcaacagaaagtggttaatattggtgatatcagggtcgcaaatgatctgccatttgtgttgttcggtggaatgaatgtcctggaatcacgggatttggccatgaagatttgtgaacactatgtcacggtgacacaaaaactgggcattccttatgtttttaaagcctcttttgataaggctaaccgctcttctatccgttcttaccgtggcccgggtcttgaagagggaatgaaaatttttcaggaactgaaacaaaccttcggcgtaaaaattattactgatgtacacgaacccgcacaggcgcagcctgtagctgaagtggttgatgttatccagcttcctgcttttcttgctcgtcagaccgatctggtggaagcgatggcgaaaacgggtgcggtgattaacgttaaaaaaccacagtttgtcagcccggggcaaatgggcaatatcgtcgagaaattcaaagaaggcggtaatgatcaggtgattttgtgtgaccgcggcagcaacttcggttatgacaatctggttgtagatatgctgggctttggtgtgatgcaacaggcaaccaacggttcaccaatcattttcgatgttactcatgcgttgcagtgcgtgatccattcggtgcagcttctggcgggcgtcgtgggcaggtcgctgaattggcctttagagcacattgcacgagc

SEQ ID NO: 443 - DNA, 3366 bp, Xenorhabdus sp.
  CDS (2181)..(3089)
tgctctaaagcccggcgataactgtaatttttcgcaaatcagccgaagtttattagactgagcttcttccagtgaattcgcatctttccagtagccgcatgaatattgcatattgggatcaagcatgagtgtaaataggtcattacccaaatcgtaatgttcttcccctacaatccacgcccgtttaggggactgtaaattaaacaggcgggaagtcacaaccatcaaaatgtccttaaaattttttggaattttgtgttccagacccgcccgtaatattttataaaagaaaacatctaaacgctcacaatcccaccagccatccatatagctttcgcctaatcctaaagatccctgtttcaatactcttttataaaaatcagggtttttgacttgtatgtcaaaagggcgttttccattaatttgaatacctgcttcctgaagcaggtcattcgcaatcctatgccactggtcagtgatttttttattttcttcaacgaaagatgaactcatatactctccaacatttatgtggtggaattttgaggtacctctttattactggttatttatgcttcccgggatttgtttttttgccgttgaactgcattttgaaatccgtaggaatattgaaactaatcagaaaatgacttaaaggcagttatgccgttcgtccgtgatataaaagagagcttcattgctcttctaaacctcaaattccgagtttttagaataatgaatccatatgagtatatgagtgaaataatatttaaacaataagcaagagaaaggccatatcatcatatggcctttcgttgagaatattctcaggtattatattatagagcaattaattgattgataattagttaccaatatcatcatttttcttttgtaaataataacctatcaccattgggataatggtggctaccatcactgttgtcgttgagatgagagggtttttcataaacatagcaacaagcatactggcaataaagcaaaggcctaattgtaaagcattttgcaatgcggcagctttaccactgtctttcggataaacggaaagagcatttgctacagcaataggataagaggcgccattcattgctgccataacacagaaaggaataagaataacgatgaaagaaggatagaaccaagcagctaaatagataagtaccatgcttatggcataacctgccaataagacaggaaatatagtttcacttttaactttttccagcaaaatacggcagccatacccacccaccataaatgccaaagtttgtggaatataacttaaaccgatatctgtcgcgtcataacccatactattcaaaatagttggtgaacccgttaaccaggcaaaaaagccggcgctacaggaagcataaatcaaaacattgccgctaaaaactgatgacttcaataaggtgaagaaagaagcactattattatttgcgctggtatcaatgggaacacgtttgttcgtcagaaaaagcgtaggtatcagtagtaacagcgttaccaccatcaaaacaagaaagataaccctccagcttgtgtgtgacagtaaccatgcgcctaataatggtgcaagggcaggggaaagtgcaactaatggcataatcatagcgaaaacacgtttcgtgcgttcagcatcatatctgtcgacaaccagagcctgccaggaaacggcagcagagcagaccccaacagcctgaataaatctcaggacaagtaattgagttgcatctgttatccaaagtatacccagacagctgaggcaaaacagggataagccgataatcagaacaggctttcttcccagacgatcagagagtaatccccataaaagctgagcaacggcaaaaccaccgagaaaaatgctaaggcttgcactgatggcaccttttgatgtgtttaaatctttactcatagcatcaaaggcgggcagatacatatcaatggctaagtagccgagcatactcaggccagcaagataaaacataaatggaagagagtttttatttgttgtcattgtattaataaatcgcgttagtcaatcggtgtggtaattgataaagaaatatggagcttattttatatggcgtgatttttgattgtgaaacggtattatttgtaccatgctatgaaaaaaattaaaaggaagaaacatgtggtctgattattctctggaagttgttgatgcggtggcaagaacaggaagtttcagtgcggctgcatcagaacttcaccgtgtgccttctgctgtcagttatacgataaagcaacttgaagaatggctggcagtttctctgttcgaacgccgtcaccgtgacgtagagttaactgaagcaggagccatttttgttaaggatgcccgttctgttatcaaaaaaatgaatcatacccggcaccaatgtcagcaggtggcaaacggatggcgcggacaactcagtatcgctgttgatcaggttgttaaaccagaacggacacgtcagcttattctggatttctatcgtcattttccggatattgagttatttatctatcctgaagtttttaacggtgtatgggatgcgctggtggatgggcgtgttgatgttgctattggagcaacacgcgcttctccggttggcgagcgatacagtttcagggatatgggttttatgccatggctgtgtgttgccagccctgagcatgagctggcgttcgtaacggaaaaattaaatgatgaccaattgcggccttatgccagtttatgtcttgaggatacatcacgtgccctgcctaagcgtgatacatgggctttagataatcagcggcgattggttgttcctgactgggaagcgggcttgtcctgtctaatggagggattgtgtgtgggaatggtacctaaacaccgggcattaccgcttattcgtcagggaaaattgtgtgtgcttgaacttgagcagccattacctgatagcccgtgctgtctgacatggtcgcaaaaaagccattcacctgcattaagctggttgcttgaatatcttggtgataacacaacgcttaatgctgaatggctacaagaagactaactgttagcggcgataatcaataaaaggaccatcggcaacagagcgacgctctacaagacgcgggtgaacctcaatggtttgggcatcttcacgtttattgataatcctatcaagtagcgtggagaaagccatttgccccagccgctctttaggttggtgaatggttgtcagtgctggtgtgaaatagcgggcattacggatattgtcataaccaatgatggaaatatcctgaggaacgcgtaaacccatttcatcggcagcacaaatagccccttta

SEQ ID NO: 444 - DNA, 4188 bp, Xenorhabdus sp.
  CDS (3271)..(3942)
tgctcaggcagtgtgtgacaagctgggtattgaactgtataccatcaatttcgcagctgagtattgggataacgtatttgaactattccttgctgaatataaagcaggccgtacaccgaatccggatattctctgtaacaaagaaattaaattcaaagcatttttagaatttgctgccgaagacttaggtgctgattacattgcaaccggccattatgtccgccgtcgggatgtggatggcatcagccagttacttcggggccttgatggtaataaagatcaaagctacttcttatatactctgagccatgagcaggttgccaaaagtttattcccggtcggggagcttgaaaaacctgaagttcgccgcattgccgaagaaattgggctggttacagcgaagaaaaaagattcgacaggtatctgctttattggtgaacgtaagttccgcgattttctgggtcgctatctgccagctcagccgggcccaattgttaccgttgacgggcagactatcgggcaacataccggcctgatgtaccacacacttggtcagcgaaaagggttgggtatcggaggaactaaatccggtaatgaagaaccctggtatgttgttgataaagacgttgcaaataacatactggttgttgcacaaggccatgaacatccccgcctgatgtctgtcggcttaattgcacaacaactgcattgggttgatcgtcagtcactggaaacagaaatccgttgcgtggtaaaaacgcgctaccgtcagcaggatattccctgcacagtcattcccttgagtgaagataaaattgaggttcgttttgacagcccagttgccgctgtcactcccggccaatcagccgtgttttatcagggcgaaatttgtctcggtggtggtgtgatcgaacaacgtatacaggaataatcgtggctaaaaattattacgacattacattggcgcttgcagggatctgccagtcagctcgtctggtacagcaactggcccatgaagggcaatgtgatgccggtgcttttgaagtaactctcaacagtgttctgaatatgaatccgacatctactctggatgtcttcggcaatgaagcgggtaacctgcgtaccggccttgatgcagtgatgggaatgctgaatggtacaaatagcgggctctcagcagagctgacccgctatactttaagtctgatggcactggagcgacgtctcagtaaaaacccatcagcagcagatgaattagctaaacgcataagccagctggaacgtcaacaggcttattttgaacctatgtctgagggaatgctcaattctcttgccggtatttatgtcgatgtaattagcccattggggcctcgcatccaagtcacaggctcaccggatattctgcgcaacactttagtgcaggcaaaagtccgggcggcattactggcaggtattcgcagtaccgtattatggcagcaggttggcggtagccgtctgcaatttatgttttcccgacaacgactagtccgacaggcaaaagacattcttgcgcgttgttaattgaattaattgttaaataaatcgttaaataaaatccgggagtttctaccaatggaattatcctcactgaccgctgtttctccgattgatggccgttacggcgataaagttagcgcactgcgcgctatttttagtgagttcggcttactgaaattccgcgtgcaggttgaagtacgttggctgcaaaaactggctgccacagcagaaatcacagaagttcctgcttttgatgaaaaggcaaacgcttacctggatgaaattattacaaatttcaatgaacaggatgcattacgcattaaagaaattgagcgtacaactaaccatgacgttaaagccgttgagtactttctgaaagaaaaagtcgctcatattcctgctttacatcaggttgctgagtttatacattttgcctgcacctccgaagacatcaataacctgtcacatgcattgatgcttaaaactgcccgtgaggaagtgctgcaaccacaatggcgtcagttaatcgacaccattaagcgtatggctcatgaataccgtaatctgcctttgctgtcacgtacccacggacaaccagcaactccttcaactgtaggtaaagagtttgcaaatgttgcctaccgcatggagcgtcagttccgccagcttggtcaaattgaaattttaggcaagatcaatggtgcccctggtaactataatgcccatttgtcagcctatcctcatattaactggcatcagttcagcgaatcatttgttacttctctggatgttcagtggaacccatataccactcagattgaaccacatgattacattgcagaactgtttgattgtattgcacgtttcaatactatcctgattgattttgaccgtgatatctggggttatatcgctcttaatcatttcaaacagaaaacagttgccggtgagattggctcatcaaccatgccacataaagttaacccgattgattttgaaaattcagagggtaatctgggtctggcaaacgcagtgtttggccatcttgccagtaaattgcctgtttcccgctggcagcgtgacctgactgactcaacagtattacgtaatctgggtgttggtctgggatatgcattaattgcatatcaatccacaatgaaaggcctgaataaactggaagtcaacgagaaacatttattaagcgaactggatcagaactgggaagtactggctgagccgattcagacggttatgcgccgttatggtattgagaagccgtatgaaaaattaaaagagcttacacgtggtaaacgtgttgatgcagaaggaatgaaaaacttcatcgatggtctcgaactaccagaagaagaaagaactcgtcttaagtcgatgactcctgccaattatatcggctatgctgaattactggttgatgaattaaaataaaacgattttatttataaaatgtggatgggaattcccgtccacattttaaaaaaatgcgtaaccttatatgaagtataaataagtcgcaaagttatatactattttcgatttaccttattgtttttagcaatccattcattaacataccaacaatagactaaatagttactatacttggtttaatcataacaacatatctataatttatttcattccatccatatagttgactatctagctatttaagatttatttgataaattttactggttagcataaggaaccattatgcgaatattaatagttgaagataatgcgttgcttcgtcatcatttaaaagtacagcttcgggatattggtcatcaggttgatgctgctgaagactcaaaagaggccgattattacctgaaagaaaaccaccctgatgttgccattattgatttgggattacctggggaggatggtttaagcttaataaaacgctggcgcggtgatcacattaatatccccattctcattctcactgcccgtgaaagctggcaggaaaaagtcaccgtattaaatgccggtgcagatgactacgtgactaagcctttccaattagaagaaattaatgcacgtatacaggcattaatgcgtcgtaatagtgggctggcatcgcaagttgcggaattaccaccttttctgattgatctttcacgtaaggaattttctgttaatggtaagaagataaaattaactgccttcgaatatacgattattgaaactttgatgcgtaataatggcaaagttgtcagtaaggaattattaatgaggcagttataccctgacgctgaattacgtgaaagtcatacaattgatgtattaatggggcgtttgagaaaaaagatattgaatgaatggcctgacgaagtaattgttacggtccgtggtcagggttaccgctttgatgtgaaataacatcatgtttaacttcctgagaactcatctcttctccctgagagcacgatttctcatggcggcaactgtcattattcttgctttgactctaccctatggagtcgttgcaattgttggctatttaatgcgtcttgataatgatacttatatcatactcagtaatcagggtaatttatttcattcacttgtcagttggaaagaaaataagttatctgttcatcttcccaataattttcacatggggaa

SEQ ID NO: 445 - DNA, 4885 bp, Xenorhabdus sp.
  CDS (4275)..(4883)
ctactgaataaaattcgggcctatgcattgcaggataaaggtgttgatactgtcgaagcgaaccatcagttaggtttcgctgccgatgagcgagatttcactctgtgttcagacatgtataaattactgggtgtacgtgctatccgtcttctgacgaataatccgcaaaaaatggagattatggtcggagccggcattaacattgtcgagcgtgtgccgcttattgtagggcgtaaccctaataacgcttactaccttgatacaaaagcgcgcctgatggggcatctgctgtccaaatccagctaatttctttctatagaaaagaaaataaaaactgcgtcggtgtgggcgcagtttttcatttcagcaatgcttatttttacttcaacatattgcggataacataatgcaatatgccgccattatagaaataggcgagctctgtattggtatcaattcgacaatgggcattaacttgagttacctccccattagggtaagtaattttcacaacaataatctgaccaggctttatatcattcaatccgccgatatcaatgaattcatccccagtcaggttaagagttttacgagtgatgccctgtggaaactccagcggtaatacccccattccaatcagattggaacggtgaattcgctcaaaagattccgcaataaccactcttacccccaataagctggttcctttcgccgcccagtcacgactggaaccagagccatattctttaccagcaataatggcaagcggttttttctcttcctgataacgcatagccgcatcataaatagccagctggctttgtgacgggatgtggcgcgtatatcccccttcaataccgggcaccatttcattacgaatacgaatattagcaaatgttccacgcatcataacttcgtgatttccgcgccttgaaccatacgagttaaaatctttcggtgctacgccatgatcctgtaaatatcgcccagccggactgtctgccttgatattcccggcgggagaaatatggtctgttgttactgaatcacccaaaatggccagaatattagcctgatggatatccgttaccggctcaggctcctgtgtcatatggctaaagaaaggcggaagacgtatataggttgaatccggctgccaggaataagtagctgaactttcgacttccagtgcttgccagttttcatcgccgtcaaacaccgcactatattccttgtggaacatctcggttctgactttttccaccgcttcagcaacttccttactgctcggccagatatctttcagatagatatcacgcccctgctgatcctgcccaattggttcactggtcagatcgcgtttcatactaccggaaagagcataggccacgaccagtggcggagaagccagccagttagttttgaccaatggatgaatacgcccttcaaagtttcggttgccggaaaggacggctccgactgtcaagtcagactgtttaatcgcagcctcaatctcatcctgtaacggccctgagttaccaatacaggtagtacagccatatcccactaaattaaagcctaacttttcaagataaggcatgaatccggccagattcagatattctgttactactttagaacccggagccagtgacgttttaacccatggctgccgttgtaaccccttctcaaccgcttttttagcaagtaagccggctgtcatcaatacactgggattggaagtattagtacaagaggtaatagctgcaatcactaccgccccttcctgcaaagaaaatgtctgattatctactgtcacagggatagatgattgcagcccctgctttctattaatatccagatcaatcgaggactggaaggcatgtggaacaccacccagcgcgactctgtcctgaggacgttttggccccgctaaactggcttctaccgtagacatatccagctcaagactgctggtgaaaattggctcatctccggcatgacgccataatccctgctgtttgctataagcctcaaccagcgtaatttcatcttcgctgcgtccggttaatcgcatataactcagggtaatatcatcaacagggaagaaaccacaagttgcgccatattccggcgacatattggcaatcgtcgcccgatctgccaatggcaaatcagccaaaccatcgccgtaaaattcaacaaatttgccgaccacaccatgtttacgcagcatctgtgtgacagtcagcaccagatcagtcgcggtgatcccttcgcgtaattttcctgtcagtttgaaaccaaccacatccgggatcagcatggaaattggctgccctagcatcgcggcttcggcttcaattccgccaacgccccatccaagcacaccgagaccgttaatcattgtggtatgagaatcggtaccaaccaatgtatccgggtaggcaaaatcccttccgtcacggttttcataccaaaccgccttgcctaaatattcaaggttaacctgatggcaaatacctgttccgggaggaacaacccggaagcgattgaaggctttttgcccccagcgtaaaaataaatagcgttcatagttacgctccatctcaatctgaacgttctcttcaaacgcctgctcagttccgaatttatccaccatgacagagtggtcaatcaccagatcaaccggtgataaaggattcacctgatctacattgccaccaagccttaaaacagcctccctcattgcagcaagatccacgacggcgggtacaccggtgaaatcctgcattaatacacgggcaggacgataggcaatttcccgctcagcatgaccgcttcgttgccatgccaccagcgctttcaggtcatcttcaacaacagaatcaccatcaatattacgcaaaaggttttcaagcagaactttcagtgacttagggaggcgggatatttcacccagttgctcagataacagaggtaaactgtaataatggtaggtcttactgccagaagtttcactgttaatggaaagtgttgaggcacagtccgttttcaatttagacgacataactcctccatttttatatttatgaccagctacaccctatgaatttcaatttgaaaaacgacggatatatatgattaaacataacatactagtagataattgttattcagctttcacatattttgccaacccgctgtaattcctcacttattgacaaactttagtgatgacacccacaaaatagatatgttctattgatggcctgaactgatattcagcgcccagaatatcatcatcaaccatattattgtttattaactattggaaggcgaattatggataacgaaattattattaagcgtgaaaattatctaaaccagataaaacaggctgaacaatttttttgtcataatattgaagatcatttcactctctccgaccatcgattcagcgatgctgatggcctagttcaatttgtcattgcatcacaactcaatgagaaatcgaatgttatgaagaagatggacgatataaaaaaaactcagatagccctttcttctattgcaactgattatattatcagatactccgatacccgtggccgacagtacagaacagatgtccagttctggggtgatattatgggaaagctgccattaatgagtgtcagaaatattgaaaagcaaacatatcaacatgttatgaaaggtttttctatcgcaaccaatttattacagctgatcatggatatcgttgtgaatactaactctccgggcatgaagagcttttcacagtttctgcaaaaacagggggatgcgatcagactcgggctgaaaaaaaatgatgaccgttattcaacaatcacactggcaagcatcattgaggcagtcggtaacgataatcaagtcatatatattcccaaaataaagctttttaagctggattttgacagagcaaattcagaagtcacatcaaattgcgcttccaatgaagctatcaatgttgaatttaattactcttcctgcgtgtcattatttgattatcaggcattggaagatccagaaataaaatcggattttgaaagctttcttcttaaaaacaaacgagcatcaatagaaaaatcagataacttttttagcggcgaattttaaaaacagaaagttataaattttggtttgaataatatattcatatacgattgttatattattatgtcagcgttattctgaaaccagttaaatttattgttatcggagtgataaacatgtacacgcctcacaaaatgcaaatgcaggacagagaagatattactaagtttatttctacttatagctttggattgctggtttctccctctttggccggaacacatcttcctttagtcctgaatcccgatgaaggagaatatggtacgttatacggccatatatctaaggccaacccacactggaaagaattagaaaatcagcctgttctggccgtttttaccggccctcatgcctatatatcacctacgtggtatgaatctgagcatgctgtacccacctggaattacactgctgttcactgttacggtgtcacaaaatttttaaatggcaatgaaactcaatcagctttagaaaatttagttaataaatatgagccggggctaatgaataacacggagttaatgccagaggaatatctcaataaacaacgtcaggcaattgtcggatttaaaatcactatcacgaaaatagatgcaaaagaaaaactagggcagcataaaaatcagggtgatcaaagaggcgttttttccgctttgaaggaaagtaaaatgccagacaataaagaactcgctaattatatgaaaatacgtaacgtcggaaccttaga

SEQ ID NO: 446 - DNA, 4541 bp, Xenorhabdus sp.; identical to SEQ ID NO: 38
  CDS (3636)..(4064)

SEQ ID NO: 447 - DNA, 4304 bp, Xenorhabdus sp.
  CDS (2246)..(2512)
tggaagaagctcagttttatcaacaacaacgggatcctttggatatcttgcagcaatgcgatattcataaggcgctcaatttacgtgcccaacaaaattttggtcaattggcccagcgggtgacgcctaaacgttcattaaaagatttattagtctctgatgagattgctcaacaaatacaggaaatactcacggccattaagtatcgggaacaagttatggcgggaggttttaaagataaaattggttatggcaccggcattagtgcgttgttttatggtgattctgggacagggaaaacgatggcggcagaagtgattgccaactgtcttggcgttgacttaataaaagtggatttatccactgtggtgaataaatacattggtgaaaccgagaaaaatttatcccgtatcttcgatttggcagaacaggatgccggtgttttattctttgatgaagccgatgctctgtttggtaaacgaagtgaaactaaagatgcgcaagacagacatgccaatattgaagtctcttatttgttgcaacggctggagaattatccgggattggttattttatccaccaataatcgtagccatttggataacgcctttaatcgccgttttacttttattactcgctttacttatccggatgaatctatccgcaagaaaatgtggcaggcaatctggcctgagaatataaaagtcgctcaggatgtggatttcgataaattagctcaacaaacaagtgtcacaggggccaatattcgtaacattgctttattgtcttcactattttccgcagagaaccaatataacgaaattaataataataatattgaaagcgcattatcacgagaattagataaagtaggtagattaacgtttaaaaattaatagaaataaacatagataaaaattaaatgtattaatgacctgaccgtgttcaaaataataaaataagagggttttttatgctaaaaatgcaaactgttattgacgttaataaagcaatgaagggaattctggaaaaatatctggataaaaaagtggcaatccgtttcgatttgcctgagttagataccgtacaatctgatgcgatggtgagtgtctttctttacgatatccatgaagatctacagcttcgctcaacagaatccagagtgtttaatgccacctccgggaggttattaccgggttgggtcaatattaaatgtaattatctgattacctattgggaatcggctaaacccgcaactgatcccaacagcccggatagtcaaccggataatcaggctatacgagttatgtcacaagtcttgaatgcattgattaataaccgccaattggcaggtattcccggcgcttatactcaggttgtaccaccgaaagaaagtttaaatagtttagggagtttctggcaatcattgggaaatcgcccacgactttcgctgaattattcagtgaccataccaattagcctcaccgatgagcaggataaagtgataccgataaataccatttcttcaactgttcaacaaacggcatcactcagtcaggaaaggattggtcatgctttgcgggagttattgattatggaactacaaagacagccagttgcggaatcagaaaatgaagagaatattaggctggcactgagcaaagttgaactattagcaatcaaagaggctatggcttcaaataattcaacagaaatttcggtatctctgtctgtatcaggaattacccaccagaaatatctacaaggcattaataaaatctttgagttctggttaaataataacaaagttattaccacgatcgatgattatggaatctgtattaaaagtatagaaaaagatcatcttttcggaatttgatttatttttataacttatggaatggcaaagactaaccaattgagagtgattttctgtatttttatgtgatcacattgttaattactctgactgaacgctaatgatatttaaattagatttatgaataatgaggttgatttatcaacgctaataattaacttattgttatttaataatattatcatttttccttaaatctataactctatgtattaaattgttgacaaaagagtgtgtctatatattattgcgaaatcatgtgtattcataatgataaatatttataaaaatcacataattaaaataaaagtgaaacaaattcattaataattttacaacaccaaaagcaaaccctatcgaatttaaaaaggagttcaggtgtttatttcaaaagatttagtaaattttattgttgtagccaaaaataaatcaataaataaggcaacaaaggaactttttatcacagaatcaccaattagccgaagcttaaagaaactggagttttcattaggtgtgaaactctttgtcagaaaaagccaagggttaattctaacggaagaaggagagtgtttgtacaataaggttttttcaatttatgaggaacttaaaaatattgaaaatgactacaagaatcataagtcgccatatgatgatgtttatagaaaataacataatgttttaatttaataaatgactttatttgtgagcctgaacaagggttcataacaaaatagcaaaaaagagtagagccactttatatattaataatgaaattaactttaatcattatttctttatttatctttgctgtcaatttttaataagtgcttatttaagacacactttacttatataaattgctacattctcattgaaatattaaggagtatttatgaatgcatatgaaattgaaactatagaacaaccaagccaaaatggctatgaagatcacaaagatttacctgataataccccattatctaagatagctatgctgggcagccatgatgcaggaacctatgcttatagtaaaaggagaaataaaaatagaatacccagaagtttgggggaggcatttcctggtgcattcaaaacccaaaataaaaccttggtagagcaagcgaaagcaggagcgagatacttcgatattcgcgtagcgcggaacaaagatgactcatttagtttttttcatggtcctagtgttgcgagcgggaatgctgttgatgatgttagagaattgttgcagcatgcagcaaaagataccaataatttttatctcatcaaatttgtatttaaaggagagagtaagaagaacactgtttctagaaaaaatgcagcgtcagatgtgtttttagaggaagtactcaaaggttataatggtaatctaattaccaagagtgacacgccaaatttaggagatgcatcggttgatttattaaataaaggaaaaaatattggaattatggtgcatggttataatggagttgagaaaaattttgtttacccctataaaaagcaggttaacacacaatgggctaatagagcaaatgcaaaggctacagccaagttccttacttcttttcataaaaaacctgcgcccgaaaataaacttaatattattcagacgaacatgccatttgcttctgttaaacatggtgaatttactaagggagtaaaaaattatttatctagaaagaaaaatattttggccgaggctattgataagattcttcatccaggaataatcagtgctgattatataggagacgataagagtgcaaccccagaatttataaagaggattaaattacataatcaggaattgatgaggcaatagaaaattcaacgggaacgaatttattagtctcaggtggaaggtagggacttttcatcaatctctaaaaatttaataatttttgttactaattaattatttttctataaaaataaaaaaggagaaatatgccaaattttaaactctttgataattaaacataacaatctgtatgaacgccccccgtttgcaaggcttccgttgttttaacattgacgagtagttgcagctctgtatccggccttattgcagccagcgctgcgggccactatgagattcgctgacctgatccttattcctctggcgggctttatgccctggcaattattcaggtttctcaggtcacggtcttaccgtctttgtcatcactctggctgccatagcaactttttagcattcacccttttctaacgagttaatatttatccgtatccgcgattaatatggcctgatactgacatgatttttttcgtatttacggtcatgagcagctattgcccatattgttcgcgccagtttatttgccatcgccacgattgccacactggtcggacgtcgttttttcagttctgttatccatggactcggttc

SEQ ID NO: 448 - DNA, 2689 bp, Xenorhabdus sp.; identical to SEQ ID NO: 40
  CDS (1290)..(2150)

SEQ ID NO: 449 - DNA, 607 bp, Xenorhabdus sp.
  CDS (319)..(606)
agtgctgctggtggttgctattgtgggtaattactattaccgggagtataacctgcccctgcgcgcgatagccgttgttgctattgttgcccttgcaggagcagttgcattgttgactgcgaaaggtaaagctgctttagcatttgcccgagaatctcgcgtcgaaatgcgtaaagtcatttggccaactcgccaggaagccctgcatacaacactgattgttgccgcagtaacggctgtcatgtcgctgattttgtgggggcttgatggtattctggtgcgtttagtttcatttattacaggcctgaggttttaagaatgtctgaatccccaaaaaagcgttggtatgtcatacaggcattttctgggtttgaaggtcgcgtagcccaatctctgcgtgaacatatcaaattacacgatatggaagactctttcggtgaagttatggtgccgacagaagaagttgttgagatccgcagtggccagcgtcgcaaaagcgagcgtaaattcttcccgggctatgtcctggtacaaatggtaatgaacgatgcgacatggcatctggttcgcagtgtacctcgcgtaatgggttttatctttagagcac

SEQ ID NO: 450 - DNA, 5332 bp, Xenorhabdus sp.; identical to SEQ ID NO: 318
  CDS (3607)..(4134)

SEQ ID NO: 451 - DNA, 5184 bp, Xenorhabdus sp.
  CDS (2334)..(3197)
tagggattagacgtcgtactgaactggcatcaatgatgtcgaagatccaattgacaccggtcagataactaactttgctgtgattttagccacgcattttcctgatcccagatatccggattgatcgtttcaagtatcagaggaatgccattgaaacgatcatctttcatgatatagctgaaggggatttttcctatgttaccttcgccaaggctgtgatgtcggtcaacccggctggaaaactcgcttttggcatcattaagatgcatggctcgcaggtattcgaaaccgacaatatcgtcaaatgctttgaatgtggcatcgcaattttgctcggtacgtaagtcataaccggcagcaaaagcgtgacaggtatcgatacagacaccgacccggcttttatcttcaacgccctcaataatggctgccagatgttcaaatttgaagcccagattagttccctgtccggcagtattttcaatcactgccgtgaccccctgcgtttggtctagcacaatattgatagattcagcgatgcgggccagacatttatctatatcaatttttttcaggtgactgccgggatggaaattaagtaaatcaatacctagttgctcacaacgctgcatttcatcaaggaatgcagcacgggatttttccagcccttcagattccggatgacccagattaatcaggtaactatcgtgagggaggatctgacctttaccgtaaccgtaacgctcacaatccgccttaaacttatcaatgactactgttgacaggggaggggcattccattgacgctgatttttcgtgaataaggcaaaagcagttgcttttaattcatgggctcgaattaccgcctgatccacaccacccgcagcgcttacatgggctccaacaaatttcatatctttctcctgttctgtttcattaattatgcattgttcttgtggttaatgaaattctgtaaggtggatacagcccagtcggctggtacgctaaaaagtgacattgtttttttagatgaaaatttcagccaagtaaatgatgaatgcctttgttgatgattaatcctccaaccattagccagataaacaaaaggaaggctaacaaaataggcttggttccggcctgacgaatagcactgatatgtgttgttaaccctaaagcagccatagccattgccagcagaatagtatcaatagctatgatagagctgacaatgagctcaggtaataaatggaaagagttgaaagctgccataacaataaaaaagatggcaaaccatgggatggtaattggcgactttccatgatcattgacacagtttttagatttcacccgactaagataacctgaaagtagtaataaaaagggcgcaagcatcatgacacggagcattttgctgataacagcagtgtcttcggctgcatttccttgtgtgtgaccaacggcaacgacttgggcaacttcatgaatagttgagccagaaaataggccaaactctacctgagagaaaggaaaccattggtaataaatgttgagttgataaaaccagggataaataaagatggcaagggtgccaaatatcacgacggtagaaatggcaacagcgactttgtcggcagaggctttcacgacaggctcagtagccatgattgcggcagcaccacagatgctgctacccgctccaattagcatgactgtctgactatctatttggaaaaaaacacgtccgagccataacgctataaagaaagtggaagaaagcataatgacatcaatcaatatgccggctataccaacatcagctatctgctggaatgtcagtcgaaaaccataaagaatgataccggctcttaacagatagtgtttagtgaaattaattccattgccacagattggtttcaatgaaggatatagcgtattcccaacaataattcccattagaatcgagatagtcaggacactgagtcccatattaatgagtagagggaactggctcaaataggtggcggcggcggtcagtattgctgttagtatcagcccggggaagagttgcagtaagggatgacaatgaatagtacccgttttattaagttgattttcaggcactgttttactcttagacatagttgtcgctcatatcacttatatgttttatgaataagcatatagcaaattgtttaatcgtaaaaattgattatatttatatgattaattattaaaaaagataaatagaacatgacttttgttaagttgcgtaatagtgtctagaatcaaggttatcttatcatttcaatttacttttatgtttcccgcgaggccatatgcgtatcactctgagacagctggagatttttgcagaagttctgaaaagtggttcaacgacacaggcttctcaacaattagctttatcacaatctgcggtgagcgcttcactgacagatcttgaaggtcaattgggagtacagctttttgacagggttggaaaacgactggttaccaatgaacatggtcgcttactttacccaaaagctctggcgctgcttgagcagactggagaggtggaacagctttttaaattggaaatgggagcactgcgactggcagccagtagcacgattggtaattatatgttgcctgaaatgctggcgaaatatcgtaaggagtatccagatacgccactggaattacatatcagcaatactgaagatgtcattaaatcggttgccgaattccgggtcgatttggcatttattgaagggttgtgtcataacccggatttaattacccagccatggatgaaagatgagctgattgttttttcctcaccagagagtccgcttgtgcgttccaatctgactttggaagatttaattaaagcgccctggatattgagggaaaaaggctcaggaacacgggaagtgcttgatcagttacttttttcacaaatgcccagattcaatattgccatggagctggggaactcggaagcaattaagcatgcagttcagtatggtatggggatcagttgtctgtcacgccgggttgtccgggaacaactgaaaaacggcacactggttgaactggtgataccgggcctaaatctttatcgtacgctttatcttatttatcaccggcagaaacatatatccaatgcgttacaaaagttattaagctactgtcagtaatgctgagccaataccatgaaattaaagaattaatgtacctataatcgtgtagcttataattaagggctgatcatgaaggtatcttataaccgccaatcgccgctattctggggacgaggatttgttacaattccgcattagaaattattctcgatgatataggaatataatgtctcaagaacaaagcgtgccacaggagcaggcgcccaaaaatctgcgtcgtgagctaaaagcacgacatatggcgatgatagccattggcggttcaattggtacggggctatttgttgcttccggagcaacaatttcacaggctggccccggtggagccctgctttcatatgcgctgatcggcctgatggtctatttcctgatgaccagtctgggtgaattggctgcttacatgccggtttcagggtcattttccacttatggctcaaagtatgttgatgaaggcttcggtttcgcattgggctggaactactggtataactgggctgttacgatcgcggttgaccttgtcgctgcccagttggttatggggtactggtttccggatgcaccgggatggatatggagtgccttgttcctcagcctgattttcctgctgaatttcatctcagtaaaaagctttggcgaggcagaatattggttctctttgattaaagtctctacggtgattgttttcattatcgttgggattttaatgatcgtcggtattatgaaaggtgcagaaggagcagggtggcataactggactataggtgaggcaccatttgctggtgggtttgcggccatgattggggttgccatgattgtcggtttctcatttcaggggactgaactgattgggattaccgccggagaatcaaaagatcctgccaaaaacattccccgtgctgtgcgtaaagtattctggcgtatcttattattctatgtattcgccattttaatcattagcctgattattccttatactgacccaagtttgttaagaaatggcgtaaaagacatcagtgtcagccctttcacgctggtttttgaaaacgcaggtctgttgtcagccgcagcggtaatgaacgccgtgatcttaaccgcagtgctttctgccggaaactcaggcatgtatgcttctacccgcatgttatttacattggcacgggaaggtaaggcgcctaagatttttggacatttgtcaaaaggcggtgttcctcgtaatgcactttatgccacaactgtggttgccggattatgctttctaagctccatgttcggtaaccagacagtgtatctgtggctgttgaatacctcgggcatgactggatttattgcatggcttggtattgcaataagccattatcgtttccgtaaagggtatgtcgctcaggggcgtaatatcaacgaactgccctatgtctccggctttttccctgtcgggcctatttttgcctttgttttgtgtctattgatcaccttaggccagaactatcaggcatttttgcaggatacgatagactggtacggtgttacggcgacttatattggtattccgttattcttgctcatttggtttggctataaactgaaaaataaaacacgtttcgtcaaatacaatgagatggactttccggcgataaagcatacataccatgaataaaatgttaataataatttgataaaatgatatttattaattaagacattattatttttattttgcaaacaactgcctgttctgtgatggaatcggcagtttttatttttcatggaattaaagcaaaattatcgtcattaaatttcggatataccgaatcaatcgcattgataagtattcttatttgctttattgttaacggcaaaattattgcttgaagagcctaactaaagtgaagtttgcccttcagacagtcgtgaaaggcgcgagtatcagcctattggcaagctctgcgatgatgaccagttttgcatgggctggaacagtccctaa

SEQ ID NO: 452 - DNA, 4317 bp, Xenorhabdus sp.
  CDS (1443)..(1742)
cgctctaaaggaagttgcttcagatacgctaaacccctaaattcccccacttggcagagtcctgttcttcgtttttctgcctgatatcgttttccggatatagtattcttgcaccctgcctgcttaagctggcagggtgttttacttttatcgcttattgctgcagatgtgttattactactaacagacaatatcactataggcaagtaaattggtgcggattctattgtgaaaatgctaaataatggggagtgtgtaatgaataatgttgaattagaacatgtaattaatacggaattgaatgttcgggagtttcaggattatgcccctaatggattacaggtagaaggacgcccccatattcagcgtgttataacgggagtgacggcctgtcaggctttgctggatgaagctgttcgtctggaggcggatgctatcatcgtacatcatgggtacttctggaaaaatgaatcacctgtcatccgtggcatgaaacgccgccgtttgcagactttactctgtaacgatatcaacttgtatggctaccatcttccgctggatgcacatcccactctgggcaataatgttcagctggcccgccagatgggagtgaagatcataggaaacattgacgctttattaccccatggcgtatttgatcaaccgattaccccggcagaattaactgaacgtcttgagcaaagactggaacgtaaggtgctgcattgcggcgataatgcaccggaagagatccgtactattgcatggtgtaccggaggagggcagagttttattgagcaggctgctgaatttggtgttgatgcttttgtgacgggtgaagtatcagagaagactatccatgttgcccgtgaaatggggatgcatttttactcagcagggcaccatgcaactgagcgctatggcattaaaacactcggtgaatggctggctaatcatcatgggctggatgtcacttttgttgatattcctaatccggcttgatgtactcttgatgtactacaatgaaacacaattgatatataagttatagcttatataatgctattataagttatggcttatgaggttatcgtgtggattgtaattttgactcctcgctttgaagagtggcttgatgaacaagatatcagtatacagaagaagatattagcagacctgagtgtgttagaagtctttggtcctcaactgggccgtcctgcagttgattctttatatggttcaaaattcaataatatgaaagaactaaggattcaatgtaaaggaaggccattcagagcactttttgcatttgatccgctaagacaggcgattatcttatgtgcgggtgataaggctttaaataataagcgtttttataaagaaatgatcccaattgctgatgctgaatatgaggcgcatttggcgaatttggaggacaaaaagtgaaaactctcaaagaaaagattcaggaattttcagtagaagatcgtaaagatataaaacaaatggctgatgagcagattttagaaaccggcttacagctattaagagaagagttaaatatttctcaacaaaagctggctgataatttaggtatcagccagccagctattactcaaatagaacaacggggtaatgatataaagttagtcaccctgaaacgctacgttgaagctatgggaggaaaattgagcttaactgtagaatttccgacaggtaatggaaaaatttttcatatatagcagctgttggaatatctctcttggcgctattaacttcaaaatttactctccctgcttggtataatacctggcagggataaaagcacagtggctaatccacaataagccagagtattacccaaagcctgactccaaccggcaattgtcaaacctcccgccaatagcatgtagtaaaataaccccaataaagcgcctgctgtgcccagtctgtctgtatagtaagttaacgcagatgcgagaaggtttggaatagcgacgccgtaggcgataactattcccagcatgggaaaaataaacagccagctattttcgagtagataaacaaaaattccactaaacagggtaagacttgccgcaagaaaagtgagtttttcggtttcccacttctttttcaacaacagcttattcaatacagagcctaacatgacaccgaaagcaagaatcaggccggtgtagccgaacagtgttggtgatattccgagttgatcaaaacggaaaggtgccagttgatagtagctaaatagacaaatattaaataaagcgataagaaaagcacttcgccagattgaaatatctttcagcatcatacgggctgtttctgataaaacaactttggtaatagtggtagggcgtgtttcaggtaaacgtgccatagaccacacagtgaggataacggctaaaatcgccagacctgcaaataccgcctgataattaccaaaatgattcaacgtggaaccgctgatcataccgatggctgggctggcagccagagcaatgcccataatagagaaaacaccggccagctcttcaccacgataactatcgcgcatcatggtctgtgttcctattgacccgactgctgcaccaaaagcagataacattctggcaataagtagtaaccagaaatgtgcagttaatagagccagcaaacaggcactactataaagtaataatccggcaataattgtagggcgcctgccaataacatcacacaatcgcccccatacgactatgccaatcgcaaaagcgaaaaagtagagtgacaaggtttgagaagcttgttccacgctggcggaaaatccacgggaaatgttggttaatgccgggctatagatggtttctacaatctgaggaaacatcatcagagcaatggctaaccaaagtggtggtttgatttgcatagtatttttcttcatgaaagtgaatgatttatgagcagaaggctaacattttagtgattgtctgtttatgataataaagacaatatatttatataatcggacattcacacttgaggactagatatggcatggctgaggcagagtgatcagtttgatcccgataatctgaatgtactcgttgcgggtatagcggcagaaatggggcagcatgattccggatttcatcaacatggtatggggcaattgttgtttactcagcgtggctgtatcaaaatcacattagccagccagatctcgattttgccgccaacccgggtggcatggatcccaccaaagacgcaacatcgggcagaaatgcgaggttccatcggatatcgatcaatttatctcgatatttctgaagtacaatgtctgccggagcagtgtgcgatactggaagccactccgttgctacaggctgttctggagcgtattgcaatatctccgtttgatactgactgggagcagggaaaaaacgcaaatttactggcagtatttcttgatgaaattggcgaggcgcaccgggaaccaacgttattaccattaccttctgatcgccgttttacgagtttatcctttgagcaattgccaccttcactacaggtgatttcaacctatattggagccagtgaaaaaaccattacccgtatatttaagcgtgaaacgggaatgaattatcaacaatggcgtcagcaatggcgattggttaaagcgatagaattattggcccagggcaaaacgttatcttatgttgcgcaggaactgggatttaccagtgacagtgcttttgtgacttttttccgtaaaataatgggaagaccgccacgggagtatatggcgggttcagaaaggaagacagatagaggttaacaattaatttgtactctgaattatttaaaaatagttaatttaaccccaattctggataagaaattgacgagaagcctgttcaaggagccgtgttttggtgcaagtcgaaacagctccggggaggaacaggctatgaacaacttagttgaaattttcatcgatgtcgatgacttttgtcgttttttcattccacaatgggaacagttttgtctcaataagggatatcgcctacgtcgtagaaaaggtcacatgtatcccagtgaaatcatgaccatcctgatcctctttcatctgtcgcattatcgtgattttaaaaatttttatctggagcatatttggcgatatcatcatcacgattttcccaccttgctcagttatactcgttttatcagtgtcgcgccttccgttttagtgcctctgtgcagctatctgactcaattaaaaggaaaccctacggggatcgcctttattgactccacgcgttt

SEQ ID NO: 453 - DNA, 4317 bp, Xenorhabdus sp.; identical to SEQ ID NO: 452
  CDS (3047)..(3832)

SEQ ID NO: 454 - DNA, 7213 bp, Xenorhabdus sp.; identical to SEQ ID NO: 59
  CDS (2643)..(3554)

SEQ ID NO: 455 - DNA, 5516 bp, Xenorhabdus sp.
  CDS (3968)..(4444)
cgctctaaagttgcgtagaattcgcgccctattgtgaatattttatagcgcgctctggaaagaattttagggggtgcgcggaaagcggagtttatatgtacgcggttttccaaagtggtggtaaacaacaccgagtaagcgaaggtcagacaattcgcttggaaaagctggacatcgcaacaggtgaaactgttgagtttgaccaggttctgatggtcgctaatggcgaagatatccagatcggcgctccagtaatcgaaggcgttaaagttaaagctgaagtagttgcacacggtcgtggcgagaaaattaaaattgttaagtttcgtcgtcgtaaacacagccgtaagcagcagggccaccgtcagtggttcactgaagttaagatcactggcatcgcttaagatattaggagagcagataaatggcacacaaaaaggctggcggctcgactcgtaacggtcgcgattccgaaagtaaacgtctgggtgtaaaacgttttggtggtgagtctgtattagcaggcagcatcatcgttcgtcaacgtggtactaaattccacgcaggcaacaacgtaggttgtggccgtgaccacaccctgttcgcattagctgacggaaaagttaaattcgaagttaaaggtccacaaaaccgtaaatttatcagcatcgtagctgaataagttttttgaacttcgatcgaatcggaagccctgcaatgtgtgttgcggggctttttatattttggattacgccatctctgggtacgatctgccatccagctttatagtggctatcctacggagaaaagtgatgaaatttgtagatgaagccagaatactggttgcagcgggagatggtggcaatggctgtgtcagcttccgtcgtgaaaaatatattccaaaaggtgggccggacggcggtgacggcggtgacggcggtgacgtctacctgctggcagatgaaaaccttaataccctgattgactaccgttttgaaaaatccttccgtgctgagcgtgggcaaaacggtcagagccgtgattgcaccggcaaacgtggtcaggacattaccattaaagttccggtaggaacccgtatccgcgatatcgctacaggagagattctgggtgatatggtgcgtcatgagcaacgtctgatggttgccaaaggcggcttccacgggctgggcaacacccgctttaaatcctcggttaaccgtgctccgcgccaaagaacaatgggaacaccgggagagactcgtgacctgatgctggagctgatgctgctggctgatgtcggtatgcttggtatgccgaatgcgggtaaatccaccttcattcgagcggtttcagcagccaaacctaaagtggctgattatccatttactacgctggtaccaagccttggcgttgtacgtatggataatgagcagagcttcgtagtcgctgatattcccggtctgattgaaggcgcatcagaaggtgcaggcttaggtatccgtttcctgaaacatctggagcgttgccgtgttctgttgcatctaattgatctgtgcccgatcgatgaatctgatccagtagaaaatgcccgtattattatcaacgagctgcataagtacagtgagaaactggctgaaaaaccacgttggctggtattcaataaagttgatctgactgatccagaagaagctaagctgaaagcgaaagcaattgcggatgaattgggttgggaaggcgattactacatgatttcagccgtgaatcgtcagggtgtgaaagaactctgctgggatatcatggaattcattaaagttcagcctcgccacatgaatgctgaagaaggcgctcagccggaaaaagttgaattcatgtgggatgactatcataaggaacagttgcaacaggcatctgaggcagatgatctagatgacgactgggatgaagaagatgaagaaggcattgagtttatttataaacgctaattgcttatttcagatgctttaatgatgaaaaagggtgctgttaaggcgcccttttttctggaatttctttttatgaattacttataccttatggatttcgagttgcttcacggcggcaagggagagacaaattcgtcgggaacgaatttgcccagccaaagctggcctccggtgagtgagcgtagccaataaagaggcaacttgaaagacgacgggtatatcaattattctgatagagagatttatataaatgatgctcgaaacggaccagaggtgctcgacgattccgtagattttctggagtaacagagtaagatgaaataaattggacgaaagcaatctgttgcccactggccgctgtcataaagcccgcaagattatacaccccttgcagtgaacctgtttttgcaaataccttaccatccacacccgcagtatgaagtcccggacgataggctaacgtgccgtcaaaacctgctttaggtaacatagagatgatatccagctcattgttgtgttgcgcgatgaattgcaggatttccatcattgttgaaggggtgatgagatcgtgacgtgaaagaccagaaccatcaacgatgactgcattaccgatatcaataccggctttttgttttagaatttggcggacagcatcagaaccggaacgccatgtaccgggaacattaaaataataatggcccagagtgcgataaaccgtatctgctatcatattatctgatttttttagcatcactttgagcaaatcaggtaaaggtgccgactgattcactgccagcgttttttcaggttgctgaggaaatgattggcgccgtaggtggcctttaagttcaattcccgcgagacgtaattcatttttcagaatagttccagcataacttgccccattctggacagcaaatgccagtggcaagggttcatcgcgctgagtcaggcagccagtcagggtatatcggtttaattcgcctgtggttacatcaagttcacagtattttgcttccgatgaacctttagcgagcgttttaacttcgctgaaggcgttgacaggataataagaaggtgtgtgaacaatagctggtccattagcctgttctgcgctatagagtaggacagaaaagcagtttttatcgacaatggcagcgccgggaggcgcgctaaaacattgggtcatatcattccatacccatcctggcgctttatcgtggctggagaaaatagaaatgtcgatgatgagatcgccattaatctggtgtatacccgactgtttcagcttctcaaccatattgcgtagttgcgtgcgcgtcagtgacggatcgccgacaaagcgggcaataaggttaccctttaatttgccatcttcaatatttgcattgctttccagcgttgtgacaaaacgaaaatctttgccaagctgtaataaggcagctaatgctgtcactattttctgagtactggcgggtaatgccagttgctgaccacgataatcaataattggtgctttttcaccgattttttgggcgataaatgagacattggcccctgctggcaaatattcaatattcttctcaattgaagaagcgtttgcattaaaaacgctcaggctcaaactgagcatacaagctattttgctggtaacttttaaaagagccatagatctcgcatataaatgtgggtgtatttcaataaaatttgtattaataatactaagacgcaattcaggaaaaagtaaacgatgatccatcaccaactctacgttaaaatgatagattagcaggtagaatgtgtatgtgaactatcagactatttctgtagtttacgccccttttattgtctggaagcccgcctgatagggtgtgctcattgtgttgcaatatattgcaatctactgttattgcaaaataagttacctttttgcaaaaatcaggaagatgttgtctgggcttaggattgatttagaggtttaataaatgaaacaaattccgatgacggtacgtggcgcggataaattgcgcgaagaattagaacatttgaaaaatgtacgtcgccctcaaattattgctgcaatcgctgaggcacgtgaacacggtgatttgaaagaaaatgccgaatatcatgctgcccgtgagcaacaggggttttgtgaaggccgtattcaagaaattgaagctaaactttctaatgcgcaggtgatagatatcacgaagatgaccaacaatggccgcgtgatttttggtgcgacggtaacggtgctgaatgttgattctgatgaagaacagacttaccgcattgtgggtgacgatgaagcgaatatcaaagaaaatctgctttcggttaattcacctattgcccgtggcttaattggcaaagaagtggatgatgtcgctgtgattgaaacacctggcggtaaagtggaatatgaagttctgaacgtcgagtatgtttgatatccagcttaaaagctaagctttccttcccacacgatggtgcgggaaggaaaatggtaagtggtcataataccgataatgataattaaaaggcccgatgaggtctttttttgtcatgataaaatggcacttttgtataaagatatcgagattatttcggtaaactaatcttacgctcttcagaagggcgatagagaactagcatttttccaataatttgcacattatatgcaccagtttcacgaacaatagcttccgcgatcaaagttttgatttcacggtcttcgcctgcaactttgactttgataagctcgtgatgcgaaagggtttgttcgatttcggccaatacgccttcagtcagtccgttgttaccgatcatgacaacaggctttaatgaatgagcgagacttttcaggtattgcacttgtttcttgttaagagtcatcgtttttttgcttagttgggattgaaaacgacctattctaccgccatctcttatctatcaccataagtgtgtggtgtggtttgataagagagtgaaaaaaataagactctctgttagtaacagttggaaagaacaatggccaataaaaaacgctcagcaagctcaagtcgctggttacaagaacattttagtgataaatatgttcttaaggcgcagaaaaaagggcttcgctcccgcgcttggtttaaacttgatgagatacagcaaagcgacaaaatatttaaaccgggcatgaccgttgttgatttaggcgctgctccaggtgggtggtctcaatacgtagtcagtcagattggtggacgtggtcgggtcattgcctgcgatcttttgccaatggatcccattgtcggtgttgattttctgcaaggggattttcgtgatgagcaggtattgaaaacattacttgagagagttggtgataataaagtccaggtcgtcatgtcggatatggctcccaatatgagtgggactcccgcggtcgatattcctcgatccatgtatctgattgaattagcattggatatgtgtcgtgatgtgctggcccctgggggcagttttattgtcaaa

SEQ ID NO: 456 - DNA, 6865 bp, Xenorhabdus sp.
  CDS (6190)..(6861)
ttaaagcagacattaaacataatcgttttgaacaatcctgtgagcacttttttgaatggataattgcgatatatagcgtatggctgaaacgggttctgaaccatccctggctgacactcggtgtcacacttggcactctggctctgaccgccctgctctatgtcgtcatcccaaaaggattttttccgtcgcaggataatggattaattcagagtacactggaagcaccacagtctatttctttcagtgccatggcagataaacagcgtcaggtaagcgaattactgctacaagatccgtctgtggaaaatgtgactacattcatcggcgttgatggcagtaaccctacgctgaacaacggacgtctgcaaattacgttaaaacctttcgaccagcgccatgacagaattgaggatattatcccgcgtctacaggcccggatagccaaagtacctgatatcaccttatatctgcaaccaattcaggatctgactattgatacccagctttcccgtacgcaatatcaatttacgctacaggcgacttctcttgatgaactgaacatctgggcgcctaagttacaggaagcactgaaaaagcgtcctgaactagtcgatatcagcagtgatttgcaaaacaagggattagtcgctcatatcaatgtaaatcgtgatatggccagcagattaggtattacgatttctgctattgataacaccctatataacgcctttggtcagaggatgatctcaaccatttatacgcagtcaaatcaatatcgggttgtactcgctcaggatacaacacactctcccggcattgatgcgctcaatgatgtccggcttttaagtgcagatggtaatatcgtacctctgactgctatcgccacgattgaacagcggctgggatatttatccattaatcacctgcaacaatttcctgcaaccaccttttcattcaatgtggcacagaatacttctctcgaagcagccgttaatgccgtgaaggaaacagaacatgccattaacatgcctaaagatatcaatacacaatttcagggagcaactctggcattccagaatgccctgagtaataccttattgctgatactggctgctgttgttgccatgtacattgtgctcggaatactgtacgaaagttttattcatccagtaactatcctatcaacactacccactgcgggggtcggcgcattactggcattaatgctgggaggctatgagctggatatcatcgccatcatcgggattattttgctgatcggtattgtgaagaagaacgccattatgatgattgactttgcgctggcagcagaacgcgagaaaggtatgtcgccttacgatgctatttttcaggcctgtctcctgcgtttcaggccgattctgatgacaacaatggcagcactgttaggcgcattaccattgatgctcagcagtggtatcggtgctgaactgcgccgtccattaggtgtcagcatggtaggcggtttgattatgagccagattctgacgctgtttacgactccggtcatttatctgctatttgacagactggcgcactattacagaaataggcaaggcagaaataaacaaagcagatatcaggatgacaatcaaacaacattagcgcgttcttctactgatcatcaggagccgttgtgaaatttttcgccttatttatcaagcggcctgttgcaaccacattattgagtgtggctatcacactgtgtggggcattcagttttattctgttgccagtatcccctctaccacaaatcgacgttccggtgattggtgtttcagcttatatgcccggcgcctcaccggaaacaatggcctcctctgtcgcaaccccactagagcgatcactcggcagaattgcgggtgttaaagaaatgagctcctccagctcattaggctataccttcatttatcttcaatttgaactgaaccgggatatcaatggggctgcccgggatgtacaggctgcgattaatgctgcggaaagccttttgccttcagggatgccaagccgcccaacctaccgcaaggcaaacccctcctctgctcccattatgatcctgacactcacgtcagacagctatggtggtgggcagttatatgatatcgcctcaacacgtcttgcccagaaaatctcacagatagaaggtgttggtcaggtcagcgtttctggcagttcattgcctgcaataagggttgaactcaatcccaatgctctgttcagtaaggggatctcactggatgatgtccgcactgcggtcaataatgccaatgtcagaaatccgacgggacatgttgagacaagtgagtacaactggcaaatacaaactaacgatgaaattaaaaaagcggatgactacgcttctattattgtcgattatcgtgacggctcacctgttcgcttaaaagatctcgcaacagtcaaagagtctgtagaagatatccgtgcctcaggtatgtccggtaataaaccggctattgccctgattatccggggggaacaaaatgcgaatatcattgaaaccatcaataaaattcgtgcagaactccctactctacgaacctcaatacccgccaatattaaactcactgttgtacaggatcgctctcccactatcagggcttccctgtatgaagtggaacgagcgcttgcccttgccgttgcgctcgttattctggttgtttttctgttcctgcgctcagggcgtgccactcttattccagcaattgccgttccggtttcactgattggcacatttactgcgatgtatttatgtggtttcagcctgaataatctttcactcatggctctgaccatcgcgacaggttttgttgtggatgatgccattgttgtgctggaaaatatctcccgtcatctggaagccgggatgaaacctgcacaagccgcgcttaaaggtgtaagagaagtgggttttaccgttcttgccatgagcctgtctctcgtagcggtttttattccccttcagttaatagatgaaatgctcggcaggctgttccttgatttttcggtgacacttgcaacagcgataggcatttctttgttcgtgtcactcaccttaactcctatgatgtgtgcacacctgctaaaatcttcgcctgaaaaatcacttaagaaaacccgcggattcggtaaagtttttctcaggttccagcaatattatggccgctcattaaactgggttcttaatcacacccgctgggttttattgatgctgatcggtattatcatcctgaatggctggctctatattaatatcccgaaaaccttttttcccagacaggatacgggtcaattactgggttttgtcgttgctgatcaaagtatttcttttcaggccatgcaaaagaagatggaacattttatgcaagtcattaatgctgacccgactattgaaaatgtgacaggctttaccggtggcgacagcatgaatgtcggctttatgtttatgtcattaaaacctgtgagtgaacgcaaagaaagtattgataaagtcatacaacgtttacaggataagttgtcccgacgagccgggggcttcactgtatctgatccctgtgcaggatctcagatcaggtggcggcggcggtggtaatgccaaatctatttatcaatttaatttactgtcggacgattctgaagcgcttcgtaaatggacacctattatccaaaaggcattgaaaacgttaccccaactgacgggcgttaattctgatgatgacgataaaggttctgaactggcgattacttatgatcgtgatcttatggcccgtcttggtatcagcgttgctcaggcgaatagcctgcttggaaacgctttcgggcaacaaccgatttcaacgatttatcagccactgaatcaatataaagtggtgatggaagttgctcctgaatataaccagtatatcagcgcactggagaaaatctttgtcatcaataaggaaggaaaacgtattccgctttcttattttgccagctggcggccagccaatgcaccattagatatttatcatcaggggctttcggccgcttctacgatctctttcgatattgcggaaggctatacgatgtctgatgctgtgagtgcgatagaaagaacaatgactgaactcagcgttccatccgctgttcgtagctcttttggcggtactgtgcaagattttcaggaaagtcagcgttcacaattactggtgatccttgcggctatcatcactgtttatctggttctcggggtattgtatgaaagttatattcacccactgacaattctttctacccttccgtctgccggaatcggcgcattactggcactggaactcttcaatacgccatttagcctgattgccatgattggcattatgctgctgattggtatcgtgaagaaaaatgccattattatggtggattttgctctcgaagctcagcgtaacgggcaactcagtgcacgggaagcaatatttcaggccagcttattaaggttcaggccaatcatgatgacgaccctttctgctttattcggtgccttacctttggtactgagcaatggtgcgggcgctgagttacgtcatcctctgggtatcacgattgttggtgggctggttatgagccaaattcttacattatataccacccctgtcgtttatctgtcttttgacagactgcgtgagaagtggcaacaacgccgtttagcaaaatttcagagaataaaatcgttgtgaaattgcggataaaagccgggatcagcggcaaactgtttctggctatttttgctacctgtatgctggtattagtgacaatgcactggggcattcgcctcagtttccagtatggattcatcggttatattcagcagaacagccagctacgtgccagaatgctggccgaagcattaacagaacaatatcagcaatatggtaactggaatttcctgactcaaaatgatcgggccatctttaaaattatccaaaatatcgaacagaacagtgataatcggcaagagctgtctccccgcgcttggcgctcccagttctgggtagttgacagccatatgcaccggttagtgggtcattctgataatatgtcggaagaaacttaccgcgttccggtaaattaccagaataaagtagtcggttgggttattgtcagtacttcggacaaaattacccgtcaagctgatatccgttttgctcagcaacaacaactgaccagttggattatcgctggcttctctacgatgctggccctgattgcaactttcgttttatcccgcattttcttgaagcccgtgaagcggctggtggaaggcactcataaactggcttccggtgatttcagcgtgcgtgttgcatcatccgatcaggatgaaatcgggcaattagcatcagattttaatcaccttgcctgcacgctggaaaagaatgaacaaatgcgccgggattatatggcagatatctcccatgaattgcgcactccactctctattctgcgtggtgaactggaagccttacaggatggtgtccgtcagccgacagcggaaactatccagtcgctactgacagaagttaccattctgacaaaattagtggatgatttacatttgctatccctgacagatcgcggttccctgacttatcgaaaagaacgggttaatatcaatgagctcctgcaaatcgctgtcgctgtctatcgtggacgttttgccgataaacaaatttcactggagttatatttaccgcaaaacacaatagtatttgctgaccctaagcgattagctcagctattccataatttgctggaaaatagcctgcgctatacttctgatcacggaacagtgcttatccacggatatgtgagccagcaaaaatgggttttaaactggcaggatagtgctcccggtcttactactgaacaatgtcagcatatttttgaacgtttctaccgttgcgaatcttcccgcaatcgagccagtggcggctctggtttaggtctggcaatctgctacaacattattgaagcgcacaatggtcttatttacgctgaaatatcacctttaggtggtattcatattcacatagaattacccttgttcaaatttcctgaacagaagacgccaaataagatattgaaataatgagtgcacaatataccgttctgatcgttgaagatgaacctaaactgggacagttactggttgattatctacaaactgccaattatcaaacacaatggttggtgcgcggtgatgaggtggttgctcatgtccagcaacgccagcctgatattattctgctcgacctgatgttacccggccttgacgggttatctgtctgtcgggaaatccgcaaattttcagatatccccattgtgatgatgacggctaaaactgaagaaattgatcgcctgctgggactggaaattggtgcagatgattatgtctgtaagccttatagcccacgcgaagtcattgccagagtgaaaactattttacgccgctgctatcgtccgcaggatatcgtcagcgaacagggagctctgacgattgatgaaaaccattttcaggctcgctaccttgaacgagtgctggatctgactccggttgaattccggttacttaaaatcatatccagtcagccggggcgtgttttttcccgtgatcaactgttgaataacctctataacgatcatcgtattgtgaatgatcgaacaattgatagccatataaagaatttacgcagaaagttagaacagctggatgaagataaatctttcattcgctcaatttacgggttgggatatctttagagca

SEQ ID NO: 457 - DNA, 37380 bp, Xenorhabdus sp.
  CDS (20975)..(22234)
gggtgtgtaagcgttgcgagacgttgagctaaccagtactaatgaaccgtgcggcttaacctgacaacaccaaaggtgttttgcggggattgagagcaagacgataaaagtttcagatgaagagtgaccggaaaacagaaagtagccggtgacacagcttgttcgggattgaaaacaggatttgtctggcggcaatagcgcggtggtcccacctgaccccatgccgaactcagcagtgaaacgccgtagcgccgatggtagtgtggggtctccccatgtgagagtaggacactgccagacagcaatttagacgtgttgccggcccaaaaggcagcatgaaacagcattcggtggtgcggtagttcagttggttagaataccggcctgtcacgccgggggtcgcgggttcgagtcccgtccgcaccgccaccgatttaggggcgtagttcaattggtagagcaccggtctccaaaaccgggtgttgggagttcgagtctctccgcccctgccagttaataactaagtaataatttatagttttcagattaatagcccagctaattttagctgggttttttctttttgttttttgcattaataatccctccatagctcttttgcttagagttttatacgatctaagactctagactgaatgtcatcaatttgtcactggagctttttcaacaggtatttttaataattgttggataagtgtatgttggtcgctattttgtagccacacggcatatagtggccgtttaatttgctcgttatctggtgctacaacaagttttgaatactcttcaagccagtgaacaggtagaaatgttgcagcattgacactttccaatagctctctggcaatatgcgctgaggtagtggttatgataggagggtgatcacttttcagaatcagttgctcttgttggtgaaaatctgctccccattccagctttatgtaattttctataccttgttcaatattattttgagtagttaataaaacaagctgaatactcccgatcagctgactctggaattcatccatttttggtggttctgttgtgattaaaagatctaactcacgagagtgtagctgtttaacaagagactgtcgtgtagagacgcgtgattcgattcttattccctgattatcgcaataaaacatattcaaccaaggggttagataagcttcccacagagatgcggtagcgccgatagagagctctgtatgttgtgagacatagctgatctcttttttcgctaattgccaggtattcattaacgattctgcatagggaaccagacgctcacccgcagcagtcaggcgaatattattgcgatgtcgtgtgaataaattagcaccaagttgattctccagttgtcggatccggaagctaacggcggattgtgttagatagagtgattcagctgcccgaccaaagtgacgagtcttactgacttccaaaaaggttttcagtaattcggtgtccacatgcatctccaatagtttttgtcgttatgatttaaatattttgttttacagaatgtcaagcctccctaatactccgcgccataattagtatgacagtagagttaggagtgtgtcagatggctgaaagcttcatcacgactaatcgtttttttgataataaacattatccacgcggattttcccgtcacggtgatttcaccatcaaagaggcccaattgctagaacgtcatggcaatgcgttcaatgaattggatcttggtaaacgtgaaccacaaacagaagaagaaaaactgtttgtagcagtttgccgtggtgaacgcgcacctgtaacaatagcggaaaaagtatggtttaagtatttggagaaaatcagacgtccaaaacgtttccataccctttccggcggaaaaccacagttagatcctgctgaggatttcactgatagtgatgattaatatcatcattgggatgaaggatccatcaagaggggcaaatatgccccttttccacattatccaacctgattttgtagctgaataagcaatctatccatgctacggtagctgagtgcttccataatatctggcttttctattttcttttgttcttttaagtctgcaatagtacgtgaaacctttaagattcggtgccatgcacgtacagatagccccaattttagtaaagtattttccagaaagatggcatcttccatctttagtctgcaaaccttttctgtttgcttacgggtaagatgggcgtttacatatccattgcgttctatttgtatatttctggcattctctactctttttttaacttcgtggctactttccccattttttgttgatgacttactcaggatccccggaggaagcagaggaacgtctatagaaaggtcaaaacggtctaaaaatggacctgatagtttggcaaggtagcgtaatacctgctgtggactgctgcgattatgtaatccctgatgatatccggtcgggcttgggttcatggcggcgatcaattgaacccgggcagggaaacaaacttttgctttggctcgtgatatcacaatctcgccagattctaatggctcacgtaatgcatcaagaacagtacggttaaattccggtaattcatccagaaataaaacaccattatgggcgagggatatttcgccgggtttaggtattgagcctcctccaacaagagctgccattgatgagctatggtgaggcgctctaaatggtcgtatatgccatttttgagggttaattgactgaccagccagactattgattgcagcaacgtgtaacgcttcctgatgcgttagaggtggcagtagatcacatagccggctggcaagcatggttttacctgtaccgggaggtccaagtaacaggagattatgacctcctgcggctgttatctccagagcccgtttcgcttgttcctgtccaataatatcctgtagatccagaacaagtggctcggtttgtggagtgatcggagcaggggaaaataagatgtttttttcacctcgcaggaagtggcagacttgcaataattggttggctaataacgtttcattttgagataggatagccagttcagcctgattttctgtagataaaattaactgtctgcctgaatttctggcactaagtgcggcgggaattgctcccataaccctgcgtatctctcctgaaagcgcaagctcccctaaaaattcataatgatttaattcagttgacgggatctgttccgaagctgccagaattgcaatggcgataggtaaatcatatcttcccccttctttgggaagatctgctggagccagattaacagtgatcctttttgccgggtaggtaaaaccactattgatcaaggcacttctgacacgatctctggcctccttaaccgtagtttcgggtaaaccaacgagagttaaaccgggtaggccgttactgatatgcgcttctattgtgacaagcggggaatcgacaccaatagtggctcgggtgtagataatcgcaagagtcataatgctttccttagccaaaaaaattcatcatgacttgttgaaaaataataaaaagtcaccttttgttattttgcgaagcctttcgaaaatataattattgttatcaccaaactgacattttttaattttagatattttatgttatttgttgattctattatttatttctattttttttgaattaatggagttagttttattctggattgttattacttttatttagataaatggattattttcctgacttattacgataagtgtttttgtgataatccctgtttttataaagatctacatctgattcgaagatcattaagttacatttttataatttacttaattaattattttactaaaacggtagataatgatttttttctcatcatgaaatagataaaattcagtgaatttatctgtttcttatttatctaattgaaaattataaataatatttttttctcgtaaaaaaataaaaataatcattgtcaacaataatagaaagtgataattctaaaatatatgtcgaacctataaagagtatgaacgcacttttatgaagaaatatgttctcgtgattagcctaattattagcgtggtagtgattattctaccgtgcgggggcgcacttggacgaaggaaggcgtagacataaaatacagccagatttcacaaagacccccgccctaaaaaatagagcgggggttttttttagtacttataaacaaacataaaacaacatcacaagaagccgctgacagagtaaataccgataggaggatggctatgaatggggcgcaatgggttgtacaggcactacggacacagggagtggagaaagttttcggttaccccggcggagccattatgccagtgtatgatgctttgtatgatggtggtattgaacatttgctatgtcgccacgaacaaggggcggttatggcagccattggttatgcaagggcaagcgataaaccgggagtctgtattgccacatcgggaccaggagcaacaaacttaatcacagggctggctgatgcgctattggattctgtgcctgtggttgccattaccggtcaggtcagttctgaagttatcggtaccgatgcttttcaggaaatcgatatgttggggctttctcttgcctgtactaaacacagttttctggtggaatcgctggaaaaattacctcaaattatggcggaagcgttttccatcgctatggaaggccgccccggtcctgttctgattgatttaccaaaagatattcagttaaaacagggggattttacaccttatttgagccctgctgttaccccatctcctcttcctgagaacgccctgaaacaagcccgcaatatgatggtttattctcaaaaacctgttttatatgtaggaggaggggttggaatagctggcgcagtacctgaattacgccgtctggtggaagagacggggatcccggtcgtttctacccttaaaggattaggggctgcagatgcccaacatgaatgttatttggggatgttaggaatgcacggaacaaagacggctaacttagctgttcagtcctgcgatttactgattgccgttggagcgcgttttgacgaccgtgtgacagggaaattagataccttcgccccccatgccaaagtcatccatatagatatcgatccggctgaattaaataagttacgtcaggcacatatttcattaaagggtaatttaaaaacattactgccttatctacagcagcctttatcgatcgaagcatggcaacaagaagttaagcagttaaaagaaatacacgcatggcgttatgactatcagggcgaaaaaatttatgccccagccctattgaaactgatatctgatcgcaagccacctaatactgttatcaccaccgatgttgggcagcaccagatgtggacagctcagcatatgacgtttgacagaccagaaaattttattacttccagtggattgggaacgatggggtttggtattccagctgcaattggagcgcagatggttcgtccggacgatatggtgatttgtatatccggtgatggttctttcatgatgaatgttcaggagctggggacgattaaacgcaagaaactgccaatcaagatggttttattggataaccagcgtttgggaatggtaaaacagtggcaggagttattttttgaccgccgttatagcgaaacaatcctgactgataatcctgactttattaccttagcaaaagcgtttgatattccgggccagcatattactgaaaaatcacagatagatgctgcattggacgccttgttcaatagtgaaggcccttatttgttacacgtatccattgatgaatttgaaaatgtttggccattggttccacccggcgcaagcaatgcaaatatgttggagaagttattatgatgcaacataaacttgctattcaggctcggttctgccctgaaattcttgaaagaattctgagagttatccgtcataggggttttcagatatgcgcattgaatatggatcatacagtagatagtgatagtgtatgtattgaactcactgttgccagccagcgccctgtaaatttactttttgctcagttggtaaagctggttgatgttgccggtgttgagatacaacataataaatcacaattgataagcgcatagtgcgcgatggaaaggaaacaaaataatgacaaagcaagctgattatatttggttcaatggcgaaatggttccttgggctgatgcaaaagtacacgttatgtcccatgccttgcattacggaacatcagtctttgaaggtattcgttgttataactcgcataaagggccggttgttttccgtcaccgagagcatatgcagcgtttacgtgattcagccaaaatttaccgtatgccagtgagccagagtattgatgagttaatggaagcttgtcgtgcaacacttcgcaaaaataaattagtcagcgcttacattcgtccattagtttttattggtgatgtgggtatgggcgttaatcctcccgaaggttatcaaacagatgtcatcattgctgctttcccgtggggagcttatctcggtgaagaagcactggagcagggaattgatgcaatggtttcttcgtggaatcgtatagcagccaacactatcccgacagcggcaaaagcgggcggaaattatttgtcttctttgctggtggggagtgaggcacggcgtcatggttatcaggaaggtattgctctggatgttcatggttatatttcagaaggtgcaggtgaaaatttattcgaagtaaaaaatggtattttgttcacgccgccattttcttcttctgccctaccggggatcactcgggacgctatcatcagactggcacaggatctcggtctggaagtgcgtgaacagactctttcccgcgaatcgctttatctggctgatgaagtttttatgactggcacagccgcagaaatcactccggttcgtagtgtagatggtattcaggtcgggagtggccggtgcggaccagttaccaagaaaattcaaaatgcattttttggcttatttgatggcacggcagaagataaatggggctggttagaccctgtgaatccttaataaaaaaataaaaaactaacaggcggctcgttccccgcctgttttcagatgctgattagatgctatcaatattagacagatatgggagtgaaaaataatgcctaaatatcgttctgctacaacaacccatggccgtaatatggcaggggcgcgcgctttatggcgtgctacggggatgactgatgaggattttggaaaacctatcattgctgttgtgaattcatttactcaattcgtacccgggcatgttcatttgcgggatttgggcaagctggtggcagagcagattgaggcttcaggaggtgttgcaaaggaatttaacactattgccgttgatgatggtatcgcaatggggcacggtggaatgctgtattcattgccatcccgtgagctgattgcggattctgtagaatatatggtgaatgcacattgtgcggatgcaatggtgtgtatttcgaactgcgataaaatcactcccggtatgctgatggcatctctgcgcctgaatattccggttattttcgtttccggcggcccgatggaagcaggaaaaacacgcttatcggatcaaatcatcaagttggatctggtcgatgccatgattcagggagctaatccgaatatcagtgatgaacaaagtgatcagattgaacgctctgcctgcccgacttgtggttcctgttccggtatgtttaccgcgaattcaatgaactgcctgacggaagccttggggctttctcagccgggaaatggttcattacttgctacacatgccgatcgcaagactctgtttctcaacgcgggtaagcgcattgttgaactgactaaacgttactacgagcaaaatgatgatagtgcgttgccacgtaatattgcgactaaagctgcatttgagaatgctatgacgctggatattgcaatgggtggatcaacaaatactgtgctgcatttattggccgcagcgcaggagggagaggttgattttaccatgacagatattgatcgtctgtctcgtcaggttccccatttgtgtaaggtggcaccaagcacccaaaaatatcatatggaagacgtgcatcgtgctggtggtgtgattggtattcttggtgaactggatcgagcagggcttttacatcgctatgtgaagaatattctggggttagatttgccacaaacgctggcccagtatgatgttatgcaaaccgccgatgaagctataaaaagcatgtatgcagcaggcccggcaggtattagaactacgcaggctttttctcagaactgtcgttggccatctttggatacagatcggaaagaaggctgtattcgtgaactttcctatgcctacagtcaggatggggggcttgcggtgctttccggtaacattgctgtggatggctgcattgtgaaaacagcgggagtggatgaaagtattctgactttcagtggcccggctaaagtttatgaaagtcaggaagatgccgtagatgcgattctgggaggaaaagttgtagcaggtgatgtggttgtcattcgttatgaaggcccgaaaggtggccccggtatgcaggagatgctttatccgacgacctacctgaaatcaatgggattaggtaaaagttgtgctttgattacggatggccgtttctcggggggtacatcgggattgtcgatcggtcatgtctctcctgaagctgctaatggcggtttaattggtctggtacatgatggcgatatcatcgacattgatattccaaaccgcaagattcagttggatgtctgtgaaaaagagcttgcagagcgggtacagaaagaattatcccgtggcgataaagcatggacacccaaattcagggagcgtcaggtttcttttgccctgcgtgcttatgcttcactagcgaccagcgctgataaaggggctgtgcgtgataagactaaactgggagggtaattgtggtagtttatcctcttaatcctgaacctaaaggggcggaatatctcaaagcagccctaagtgcgcccgtttatgacgtagctcaggttacgccactacaggaaatgaaaaaaatctctgctcgtttgaataacaccattttggttaaacgagaagatcgtcagttggtacacagcttcaaactgcgtggtgcctacgcgatgattgccagcctgacggaagaacaaaaagtcagaggagttattacggcatcagcaggcaatcacgcacaaggcgttgcattatcggccagtaaagtgggtatcagagcgacgattgtgatgccgatagcgacagccgatattaaagttgatgctgtgcgcagcctgggcggagaagtgctgttgcatggtgcgaatttcgatgaagcaaaagccaaagctatcgaaatggcaaaggagcacaggtacacctttgttcctccttttgatcacccggcagtcattgccggtcaggcaactttggcaatggaattgttacagcaggatgttcaccttgatcgtatttttgttccggttggcggcggcgggttaattgcaggtgttgctgttctgattaaacagcttgtaccggaaatgaaaattattggagtggaagctgaggattccgcctgcctgaaagcagcactggaagctgggcacccagttgatttaccgagagttggtttatttgcggaaggtgtcgccgtcaagcgtattggggatgaaacattccgcctttgtcagaaatatgttgatgatgtcattacagttgatagcgatgctatttgtgctgctgtgaaagatatttttgaggacgtgcgggccattgctgaaccttctggtgctttggcactggcaggattgaagaaatacgtccagcagcatcagatcaagggagagaggctcgcgcatattctttctggtgcgaatgtaaacttccacggtttgcgttatgtttcagagcgttgtgaattgggagagcagcgtgaggctttgctggcagtcactattcctgaacagaaaggcagtttcctgacattttgtcagatgttgggaagccgctttgtgacagaattcagttatcgttattcggattctgccgaaccaaataaggcctgcgtttttgtcggtatcagactgaaccgtggaaatacggaacgtattgaaattattgaagggttaaaagcagcaggttatcaggtcgctgatttgaccgatgatgaaatggcgaaactgcatgttcgctatatgattggcggcaggccatccaagccgttgcaggaacgattattcagctttgctttccctgaatctccgggcgctttactgaaatttttacagacattaggggcgcactggaatatcacgttgtttcattatcgtagtcatggcacggattatgggcgagtattgacggcttttgagctttcagaggaagaacttcgttttgaccgacatctgggtgagttgggctacgaatatcatgatgagacgaataatccttcgtttaatttactattgagatagaaatgctcaggcctgtaggaaacagagatagcgccataacaggcgctattagtttaatgatgaaatttcttctgtccttatcatcatccaatgcttgatgaataactatcagacgatagcaaccgccaaaatgcttttatcaacggttcattcagccgtttacctagtgcacaaacgcctaattcaaatggttcaaccagtgaaatattttctagcagcgatatacggctgcgtaccggttcagggctgttttcaacgacaaccgcaggaatgagagcgataccgcaacctaaagccaccatcgatacaatggcttcatggcctgaaactgttgcataaatttgtggatgattaattttgtgacggcggaaccaaagttcaatgcgcttacgggaggggccgtgttccggcagaatgaatgggatctcattccagtcaggatattcttgtgtggctaatgatctcacagtacaaggtaaagccggggcgattagaactagcgggatttcgccaatcttggtaaaactgacgttatcaggcagtttctcaggtttacctgcaatacccaaatccgcttcttctgattgaactttatcaacggcatcggcggcatcgcctgttgtcagtttgatctccaccaaagggtgttcagcccgaaacttatccagaacctgaggaaggtggctataagcggctgtcactgaacagaaaaggcgtaattctcccgttaatgacgggctttgatgattcagagaatgaagcagctgctgatattgtaataatgtatgctgggcaaattgttttagctgttcgcccgcagtggtgagttttactgtccggttatcccgcagaaacagtgggtgagccaattgatcttcaagacgctgaatttggcgtgaaagtgtagaagggctgacatgcattgttttagccgtgcggccaaaatgacaactttctgcaagatgtaaaaacagttttaaatcacgtagatccatcgtttcagtgccttctgctgaaagttttttctgcgaattgtctcaaaaaagatatgttgcgtaaactgcaatatagtcttgtcaatatatcaatttaagcaatgtctttcatggcatatattggctgaatgcaaacaacatcacacctaattatatcggagtcaccatggctaactattttgatacattgaatttacgccagcagttggcgcagctgggcaaatgccgttttatggcaagagaagaatttgctgacgaggcagggtatttaaaaggcaagaaagtggtgattgtcgggtgtggtgcacaaggcctgaatcaggggcttaatatgcgtgattccggtctggatattgcctatgccctgcgtaaagaagccattgaagaaaaaagggcttcgtggcgcaaggcaactgaaaatggtttcagagtcggcacctatgaagagttgatcccacaggctgatttggttattaacctgacgccggacaaacaacactctgccgttgttcaggctgttcagccattgatgaaagaaggcgctgcgctggggtattcccacggttttaatattgtcgaagtgggtgaacaggttcgcaaagatattactgttgtgatggttgctccgaagtgtccgggaacggaagtgcgtgaagaatataagcgtggtttcggtgttccgacgctgcttgctgtacatccggaaaacgatgcaaaaggcgaagggatggcaattgcgaaagcatgggcagcagcaactggagggcatcgggcaggtgttctggaatcttcatttgtagcagaagtaaaatctgacttgatgggtgagcaaactattctgtgtggcatgttacaggcaggttctctgctgtgttatgacaagctggtggctgatggcgcagagccgggctatgccggtaaacttatccagtttggctgggaaactatcactgaagccctgaaacagggtggtattacgttgatgatggaccggctttccaatccggcaaaactgagggcttatgcgctttcggaacagttgaaatctatcctgactccgttattccagaaacatatggatgatattatttccggccagttctcttcaggcatgatggcggattgggcgaatgacgataaggatttgttgaactggagagctgaaaccggtcagacaccatttgaaaactaccctgattacagcggtcatatcagcgagcaggaatactttgatcatggtgtcttaatgattgctatggttaaagccggggttgagctggcatttgaaacaatggtggattcaggcatcatcgaagagtctgcttattatgaatcactgcatgaactgccattgattgcgaataccattgctcgtaaacgtctctacgaaatgaacgtcgtcatctctgatacggctgaatacggtaactacctgttttcttatgtggcagtacctctgttgcagaaagaattcatgtcatctttacaggcaggggatttaggtaaagctgttgctgataatggtatcgataacgctcagttacgtgatgttaacgatgcgattcgtaaccacccgattgaaactataggccggactttgcgtggttatatgactgatatgaaacgcattgctgttggcggataatgatgctatgcccgatacatcgtatcgggcatactatacacttcgtctttcaagttgcctctttgttggctgcgctcgctcacctcagtcacatagttatctatgctcctgaggatgaactcccttgccgcctcgacgcatcttgaaatccattgtgtatattttccccggtcgggctacaaatgaaatctcagtttcagagcatcaatctcctgacgctggaatgtgtcaaaatgttctcttggctgttgtctctggaccatttccagtaaaggatcctgaacttccgtgcgaacgccgcttaattcttccagcacagccagaccacagaaaggcacatagagttctgaataaccaccttcatggataacaaccagcttaccatcacataattcatctgctgcctgctgtattttgcgcgtcatttcccggaagctgtcactgtgtaattgcatgcgagccagcgggtccatggcattggcatcatagccactggcgacaataatcaactcaggctggtaacggtataatgcgggcaggacgatttgatccatggcatacatgtagctgttgtgtccggctccggccaccaatggaatattgatattgaaaccttctcctttacctgtaccgatatcgtcttctccactataaccttcgggatagcaaccatcctgatgcagggaaatagttaagacatcatcacgttcccaaaagatatgttgtgttccgttgccgtgatgaacatcccagtcaacgactgcaacccgcccaagcccaaactgctttttggctcgttcaatagcgaggggaatattggctaaataacaaaaacccattgcttgatctggcaggcaatgatgtccgggagggcgggaaaggctataggcgttatcgagttcaccatgcaggacggcctctactgcggcacaggtcagcccggcagacagtttagctatttcatagctgccagaccctacaggtgcttcatgcccaagcaaaccggttccattatcgctcatagatttaaaacgctgtaaatactcggctgggtggatgagctttaaggtcgcttcatcaagaggatcagcgcctgatagctgcaatgaacggcttaaaccagaaacatccattaaatttttcattctacgtttggtttctggtgattcagcatgccctgacccagaaggaggttgtatccatcctccaacaggaatcatgacaacatgctgtatgccggaattgtgccagaagcagctttcatcaaagaaaaaaccggttttgcgtaacatattgcatcctatttgacaggttttatgacattgttatttattacatatagaaaagtagtaaatctattacggattaggaattttaagatctataaaataataatttttgattgttgagtattagattcactcaagaataaatcatcgtagtggcctgactggtgaagaaaaacgccttattacacggctttctgctacaatttcgttccttgcttttttcattctgatataactttcaaaacagtatgcgattaaatcccagccaacaacaagcggttgaatttgtgacaggaccttgtctggttctggcaggtgcaggctccggtaagaccagagttatcaccaataaaatagcccatctgatacgtgcctgcggttatcaagcccgccatattgcggctgtgacctttactaacaaagcggcacgcgaaatgaaagaacgggtggcacagacattaggacgtaaggaaaccagaggcctgatgatttccacttttcatacgctgggactggaaatcatgaagcgtgaatacaaggcgttgggcatgaagagtaatttctctttgttcgacgatcaggatcaaatggccctgctgaaagatttgacggcggatttgctggaggaagacaaagatctactacaaaaactgatctcaagtatttctggctggaaaaatgatctgatgtcaccggagcaggtaataagacgggctcgttcagaacaggaacatcactttgctgagtgttatcggcgttatgatttacatttgaacagttgtaatgtgctcgactttgatgatttgatcactaaaccaacgttgctgttaatgcgggatgaagaagtcagggagcgctggcagaaccggattcgttatttgctggtggatgaatatcaggacactaacaccagccagtatcagctggtaaaattgttggttggcaaccgggcacgttttactgtagttggtgatgatgatcagtcaatttattcctggcgtggtgcccgtccacaaaacctgatcctgttaaaagaagattttcctcagcttaaagtgatcaagctggagcagaactaccgttcatcagggagaatactgaaatcggcaaatatcctgattgcaaataatcctcatgtatttgagaaaaaacttttttctgaattgggttatggtgatcctcttcgtgtgatcgaagccaataatgaagatcacgaagctgaacgcgtagtaggtgagctgatcgcccatcactttattaataaaaccgattataaagattacgcaatcctgtatcgcggtaatcatcaatcccgcatttttgaaaagatgctgatgcaaagccgtattccgtatcgtatttctggtgggacttcatttttttcccggccggaaattaaggacttactttcttatctgcgcgtactgactaatcctgatgatgacagcgcttttctacgggttgtcaatacaccgcgtagagaaataggtgcggtgacggttcagaagctaggcgaatgggccaagcagcgtaacaaaagtctgtaccatgccagtttcgatcttggtctggagcaaaatctttctggccgtggactggcagccttacagcgctttacccactggatgaatgaaatttcacatcaggcagaacgtgatccattgttagccgtaagggatttgctgcatggtatggattacgaaagttggttgtatgaaacatcccccagccctaaagcggctgaaatgaggatgaagaatgttaaccagctttttacctggatgagtgagatgttcgaaggggatgatctgaatgaaccgatgacactttctcaggttgtagcccgcttcactctgagggatatgctggagcgcggagaggaaagtgaggagtcggatcaggtacagcttatgacgctgcatgcctccaaagggctcgaattcccttatgtttttatggtgggtatggaagaaggattattaccacatcagagtagcattgatgaagataatattgatgaagaacggcgtttggcgtatgtcggtattacccgcgcccagcgtgaactttttctcaccctgagtaaagagcgccgtcagtacggggagctgatacgcccggaaccgagccggtttttgttagagctgcctcaggatgatctggactggccgcaaggcaagaaagtggtcagtgtagaagaacgcatgaaacgggggcagtcgcgtcttgccgatataaaatcccgttttggacttgggcagaaaacgggcggtaactgaatctcgtcaggaaaacctgccgtaactcctcgctccagctgtattttcaggcatgtatctggggtgagggattcatttttttataaggtgccgggtttatcccaaatgggtgttgttctgctcttcaataaaaagtggccagtggacataatgttgccatgtactttcttgatgcagggtttcagccctgagaggatgctgggcttgccactgatatggaagcgtgatggtaagcgtttcattttcagcctgtaagcgcagagcagataaagagtcatcctgccgtcggctggcgaaaataatggcgagacgtagtaaacgacacaatcgcagtgccagctgtgccggtaaggcattttgctgattcagtgatgctaaatcgatagctccgctctgattttgtaataatgtcgctagcaggcgtttttgagcaggggtgtaaccgggtagatccaaatggctaatcagataagcagaatgagccggcccctgacggaaatcgatacacaggccgatttcgtgcagcaaacaggcgctgactaacagttcccggcatcgctcatccagttcccatgttttagcaacttgctgaaaaaaatattctgccagttgtctgacgcgcagtgcctgttctgcatcaatctgaaaacgctgttgaatattctgtagggttctggcccggacatcctgctcgacaggtaattccagcattccgtagaccagaccttcccgcaacgcgcctcctgccagaatcatgctctcaatttctaatgcctgaaagatagcaatcaggattgcgaggccacttggaaaaaccagtgcccgctccagagtcaggccatttatttccagctcttccagcttcccgcattcaatcgctttagatttgagttgttgcagtttgggcagagtgataagttcatccatgccctgagcaatcataatctcctgaagtgcctgaacggtgccggatgctccgacacaaatctgccagccctgtttcagcagtgtcgtggtgaccggagcaaggatctggtgagctgccgcctctgctttagcaaagttttcttctgtcaggctgcgatcattgaaataacgttcgagccaggtaacacaacccatctcaaggctgaataactgtgtggcatttgcgcccgtgccggtaaccagctctgtactgcccccgccaatatccaccaccagacgctcctccggaccgcctgtggtgtgagcaacgccctgataaatcagccgggcttcttcttcccctctgataactttgaccggggaacctaagatttcagaggctttcccgacaaactcaccggaattttcagcaagtcgcagtgtagctgttgcgacaacgcggatctgtggagcaggaatatcctgcaaatattccgcaaaaaggcgaaggcattgccatcctcgttccattgcctgttgtgataagtggttatttttatctaatccagcggccagcctgaccttacgcttgattcgggcaaccacctgaatactatcggatactctacggacaaccagcatatgaaagctgtttgagcctaaatcgatagcggcatagagcgaagaagaactcagcattttgttattccagaattacgttaatcagcctgaacgtttacggattgcgtttacgattacgaacagtgtttccacggcgtggcatattagtgcggcgtggatgtccccctgagcgcgaacggttacggcgtctgggcactggtaaatctttcagcaatgcatcactgttatatttacttacagggatctggtgctgaatatattcttcaatagctggcagattcagcgcatactcttcacaggccagactgattgaatgaccactttcgcctgcccggccggttcggccaatgcgatggacgtagtcttcacagtcatccggcaaatcatagttaaatacatgtgttactgatggaatatgcagcccgcgtgcagcaacatcggtagcaaccagaatatccacattccccagactgaactcttccagtatacgtaggcgttttttctgtgcgacatcaccggtcagcaggccgacacgatgaccatcggcagccagatgtgcccagatatcttcacagcgatgtttggtattagcaaaaataatacagcggtcgggccactcttcttccagcagggtctgtaacagactcattttctcttcattggaaggatagaacagttcttctttaatacggtgccctgttttctgtaatggttcgacttccacatattcaggattgttcatctgctcaaaagctaactcacgtacccgataagagagtgtagcggaaaacagcagagtcatacgctgagtcgcagaaggaatacgacggaatagccagcggatatccttgataaaaccaaggtcatacatccgatccgcttcatccagtacaacaacctgaatagcgctgagattaatatatccctgcttagcataatcaatcaggcggcctgtagtaccaatgatgatatcaacaccggcttccagtacttttagctgcttatcatagccatctccgccataagcaagccccattttcagcccggtggcttcagccagttcttctgcatcagaataaatctggacagccagttcgcgggtcggagccataatcagcgcgcgtggctgattggttttatgatccgccgcagcgggatggctgagtaaataatgaaaagtagacgtcagaaatgccagcgtcttacccgttcctgtttgtgcttgccccgcaacatcctggccttcgacagtaaaaggcaatgttagcgcctgtattggcgtgcagtttgaaaagccctttttatcaagggtttcaatgaccttggggtgcaatgcgaagtcggaaaacttcttttctgtcaaatgtgttttgctcatagtgtggtagaatatcagctaactattgctttaagaaagtgtatccgctgaaataaagacaccttatgttggttaatgtagactgataacctaaaagattttactttggagtccaattaatgagtgaaaagattgtgagtgctggcgttattcatctggcagacagtgactttaatgaagataaactgcaatcagaaggtattgttctggttgatttttgggcagaatggtgtggtccttgtaaaatggtcgctcctattctggatgaaatcgcggcagaatatgcaggtaagctgactgttgctaaactgaatgttgatgatcacaccgaaaccgcaccaaaatttggtatccgtggcatcccaacactgattctgtttaaagacggtgagaaagtcgcagtaaaagtgggagctttgtcaaaaactcaactgaaagaatttttggagccatacctctaacttagagtttgctcacagtaattaaggacgtttagcggataaggtgatttatcttactgacagctagacgtccgctacgaagcatggtaagttagcgaccacgtgcttatatggaacatggatagaaaaattttcatcatctgcatgaataattgacaacggacatgttacatactaaacaatctgtagtgtctgataaatctgttatctctgacaccttgaaatatctgatggcatatcgtatttagtacagtatctaaaagcatatagtatctaaaagcatatatagtgagtcattcagtatatagcctgatgctgaagacgtctttatgctaacatcccaatgatgttttcgttccagcgtctatgttgaagccttcttttactgaacctcttttgctgagataatttttgctaaaacagtatttgttgaaacggtacttacgctgagatagcttttcactgagatagtttttagttctgaacttaatcacattttgttattaccatctcagccgtgcattcacagtttgttagccttattttgaaatcaattagagtacttcagactattaccttgtaatataaatttatatgttaaaaggttgtatttgttttgggtacaaataaacaggcaccgataacgctgccataccattcacgttcatagttcgagatataccccgagttaaagaacccaccattatgaatcttaccgaattaaaaaatacgccggtatcagagttaattactctcggcgaaaatatggggctggaaaatctggctcgtatgcgcaagcaagacattattttctctatcctcaaacagcatgcgaagagcggagaggatattttcggagatggtgtgctggagatattgcaggatggattcggtttcctccgctcagcagacagctcctaccttgcaggccccgatgatatctacgtttctcctagtcaaatccgccgctttaacctccgtactggtgacaccatttcaggtaaaatccgcccaccgaaagaaggtgaacgttattttgccctgttaaaagttaatgaagttaactttgataaaccagaaaatgcccgcagcaagatcctgtttgaaaacctcaccccacttcatgctaataaccgtttgcgtatggagcgtggtaatggttctacagaagacctgacagcccgggttctggatttggctgcacctatcggtcgtggtcagcgtggtctgattgttgcaccaccaaaagcgggtaagaccatgttgctgcaaaacattgcggcgaacattgcacataactatccagactgcgtattgatggtattgctgatcgatgagcgtccggaagaagtgaccgaaatgcagcgcctggtaaaaggtgaagttatcgcttctacttttgatgagcctgcttcccgccacgttcaagtggctgaaatggtcatcgaaaaagcaaaacgtctggttgaacataaaaaagacgttattatcctgttggattccataacccgccttgcccgtgcatataacaccgttgttccggcttctggtaaagtgctgaccggtggtgtggatgccaatgctctgcatcgtccaaaacgtttctttggtgcagcacgtaatgttgaagaaggtggtagcctgaccatcatcgctacagcgctggttgataccggttctaaaatggatgaggtcatttacgaagaatttaaaggtacaggtaatatggaattgcacctgtcccgtaagattgcagaaaaacgtgttttccctgcgattgattacaaccgttctggtacgcgtaaagaagagttgctcacgactcaggatgagctacagaagatgtggatattgcgtaagattattcatcctatgggtgaaattgatgcaatggaattccttatcaataaactggctatgacaaaaacaaacgaagaatttttcgactttatgaaacgttcgtagtctgcaaataacaattgatagtccataaacaaaaagtaattaagcgatcatttcttcacaaaaacgccactcttctgtggcgttttttataggtgtgctaaattatccgttgaaatggtacatgttttgcatgtttttctcttgattggatgagtgttttttggacggaaattttatagaagttctataaataactattaatcattacttgtaatctgcattatttttttgattttcatttatacatagcaggatgtcttcttgaacagggaacttatgggctggctattaaatccataagttaatgaataatagatggccatcattattatttttacagagagttgttattgtgaatatacccagcatgagtgtcgaagttttttgcatctttatattttcattcatttttttgttcatggcaaggaaggtagcaaaaaaggttggtctcgttgataagccgaattaccgtaaacgtcaccatggtttaattcctttggtggggggtatatctgtttttgtgagtgtctgttttgcttttgttataacaaaagagtttataccacataagtggctgtatttattttgtgcaggaatactggtttttattggtgcactggatgatcggtttgatatcagtgtaaaaattcgtgcaacaattcaggctttagtcggtatcagtatgatgtatttcgctgacctaagacttgaaagcttgggtaacacttttggtccgtgggaaatgacgctggggccatttagctatgtcgtcactctgtttgcggtctgggcggctataaacgccttcaatatggtggatggtattgatggtctgttaggtggcctgtcctgcgtttctttcggggctctgggtatcctgctgtatgagagcggaaatacagctttagcattctggtgctttgcatttatagccgggatactgccttatatttttcttaatctggggctgttgggtaaacgttttaaagtctttatgggagatgccgggagtacattaattggttttaccattatctggttactgactgaagcgactcagggggtaaatcgttctatcaatcctgtgacggctttatggatcattgccattccgttgatggatatggttgcgattatgtatcgccgactgcgtaagggaatgagcccattctcaccggatcgccagcatattcatcacttaatcatgcgtgctggtttcacgtcccgtcaggcctttgtcttaatcacgatggcttcagcgttgttagccgggattggcattattggcgaacggctggattttgttcctcaatgggtaatgttggcattatttttgcttgcatttatgttgtatggttattgcatcaaaagagcatggcgtgtggcccgttttattaaacggtgtaaacgtcggatgcgtcgggttgcaagccatcactaaaaaaacatcggcttatcaaagaggttttgcgcagtggaaaactcagaaacgaaatctaatcaggatcaaacggttacagagcatgaactggatattcgtgcgctatgttgtgctctgtggcgtggaaagatatggattatcgcactggcaataattttcgctgctgtcgctctggctgcatcgtatctgatgcagcaaaaatggagcgcaaccgctattgtggatttaccgacaactaataacctgggaagttattactcacaacagcagtttttgcgcaatctggatacgcatattaatgcttcaccggaagcccaactgccgaccattcccgatggggcttacaaagagttcatgatacaggctgaagcttatgatactcgtcgtgaattctggctgcactccaattattacaaacagcgtcatgatggtaagagcaaagctgatgcggtgttactggaagaattaatcaacaatattcaggtgactcgtcgcggtgaaaaaaatgtccaaaatgaaagtatcaaactgacggcagaaaccgctgctgatgctaaccggcttttgcgggagtacattgcttttgctaaccagcgtgcgagtactcatctgaatgacgaaataaaaggcgcatgggcaacacggactcagtcaatgaaagcgctggtcaaacggcaggagctcgtcgctaaggccatgtataaccgtgaattgaacgtattgcagcaatcattaaaagttgctgaaaaacagggtattcagcgtaaccagacaaacacacctatcggtgaattacctgaatccaaaatgtttatgctgggagtcccattactacaggctcagcttgaaacactggaggctacaggccctaattacagtatcgattatgatcaaaatatagcgatgctgtcgacactcagtgtcggccccactttacagaacacttttcagacctaccgttatcttagaacgccagaagagcccgttaatagagacagccctcgccgtgtatttatgatggttttgtggggaggtgtaggtctgttgattggtgccggagtcgcattagcgaggcgttcacgcacataattttatattcctttgtggaaccacccagcaatgattaacaaaataagagagccactgtgaaagtgttgactgtgtttggtactcgcccggaagccatcaaaatggcgccgctggtacacgctttagccgaagatagtgattttgaggcaaaagtttgtgtgaccgcacagcatagggaaatgttggatcaggtactgaacttatttgggatcaagccggattttgatctcaatattatgaagaaagggcaggatctgacggatattacctgccggatacttgaatccataaagccggtattaaatgaattcaagccagatgtagtgctggtacacggtgataccaccaccacaatggcgaccagcctggccgctttttatcagagaataccggtagggcatgttgaggcagggctgagaacaggcgatctttattctccatggccggaagaggctaaccgtaaaattgcaggtcatctggcaacgtatcattttgctccgacagaaaattcccgcagtaatctcttacaggaatctattgcagacaaggctgttttcgttacgggaaataccgttattgatgctttgctctgggtgcgtgatcgcattatgcatgatgacatattaagggggcagcttgccgagctttacccttttattgatcctgctaaaaagatgattttggtaacaggccatcgccgagagaattttggcggtggttttgagcgcatctgtgaagcactggcgcaaatcgccagaatgcacccagatgtgcaggttgtttatcctgtacacctaaatcccaatgtatgcgaaccggtaaaacgtattttgcatggtattgataatattattcttatcagtccacaggattacctgccctttgtttatctgatggatcatgcctatttgatcctgactgattcaggcggaattcaggaggaagctccttctcttggtaagcccgttctggtcatgcgtaataccacagagcggccggaagcggctgatgcgggtactgtgcggttggtaggaacaaaaacccaaactattgttgatgaagtcacgcgtttattgacggataactccgcttatcaacaaatgagccgggcccataatccttacggggatggcaaggcttgccagaaaattctggaaatattgaagaaaaatcaggtgacattatgagttttgaaacaatttctgtgatcggtcttggttatatcggtttacctactgcggcagcattcgcttcctgccagaaaacggttattggtgttgatgttaaccagcatgcagtggagacgattaatcgtggaaagattcacattgttgagcctgatttggatcaagttgtaaaaacagctgttgaaggtggttatctgagagcggtaacttcacctcagcccgcggatgcatttttgattgcggttcctacgccttttaagggcgatcatgagcctgatatggcttatgtgtattcagcagcagaatccattgcacctgttttgaaaaaaggcgatctgattattctggaatcaacctcgccagtcggcgcgacggaacaaatggccgagaggctggcagaagcccgaccggatcttacctttccgcaacaggcaggggaaaattcagatattgatatcgcttattgtcctgaacgggtattgccgggtcaggtcatggtggagctagtcaaaaacgaccgtgttgtgggaggaatgaccccaaaatcctcttccagggcaagtgagctgtataaaattttccttgaaggtgaatgtgttgtcaccaacgccagaacggcagaaatgtgtaagctgactgagaacagcttccgggatgttaacattgcctttgccaatgaactctcgcttatctgtgctgaacaggaaattaatgtctgggaattaatccgtctggcaaaccggcatcctcgggtcaatatcctgcaaccgggaccgggagtcggtgggcactgtattgcagtcgatccgtggtttattgtgtcacagaatcctacgcagtctcgcctgatccgtaccgcccgtcttgttaacgacgacaaaccactttgggtggttgatcaggtgaaagccgcagtcgcggattgtctggcggaaagcgacaaacgagccagtgaaattaagattgcctgctttggtctggcgtttaaagcaaacattgatgatttacgtgaaagtccggcagttcatatcaccaaaatgattgcgcagtggcacgctggttctactttggttgttgaaccgaatattcacgaactgcctcattcactggaaggtgtagtggagctggtcagcctacaacaggcactggaagaggctgatgttgtcttgatgctggtggatcatagccagtttaaggctatcaatggcagccagataaaacaaaaatgggttgtagatagcaaaggagtctggcgttgaaacgtattctaattactggtggagcagggtttattggttctgcggtggtgcgccatataatcaaccatactgaagacagtgtcgttgtggttgatagtctgacttatgccggcaatcttgagtcactggcaccggtcgctgatcatcctcgttatgcgtttgagcaggcggatatctgtcatcgtgatgctttggaacgtatttttcagcaatatcagcctgatgcggtgatgcatctggcggcggaaagccatgttgatcgctccattgatgggcctgcggcattcattgaaaccaatatcatcggtacttacaccctattagaagcggctcgtgcattctggcagcagttagatcaggaaaaacaagcaacattccgttttcaccatatttcaacggatgaggtctatggtgatctgcatggcgaagagggctttttcacagaaacgacaccttatgcaccgagcagcccttattcagcatccaaggcatccagtgatcatctggtcagggcatggcgacgcacttatggtttaccaacagtgatcacgaactgctcgaataactatgggccttaccatttcccggaaaaactgatccctctggtgatcctgaatgcactggcgggtaaacctttgcctgtctacggtgagggaaaacagatccgggactggctgtatgtggaagatcacgcacgggcgctgcatctggtagtgactcaggctataccgggcgaaacgtataatattggcggccataacgagcgccgtaatattgacgtggtcgagactatctgcgagttgctggaagagtttaagccggaaaaaccagccggtgtggcgcattaccgagagctgattacctacgttacagatcgcccggggcatgatatgcgttatgccattgatgctgcaaaaattgagcgtgaattaggctggaaaccacaggaaacgtttgaatccggtattcgtaaaacagtgcagtggtatctggcaaacgaaaactggtggtgcagggtgcaggatggctcttatgcgggagaacgccttggtttgtctgaacatgatggacagtttgatcaaataaataaacccattcaactttaagatgagtgtgatatctccccgcgacgcggggagatataagaattcgcctcatattatcagttgcaacttaaggtttatcgaatataaacccatctgggggatgacatgaaaggaattatactggctggtggctccggcacacgcctgtacccaataacacgcggcgtctcaaagcagttattgcctatttatgacaagccaatgatctactatccgttgtcagtcttaatgctggcagggatacgcgatatcctgattatttccactcaggaagacttacctgcctttaaacgtttactgggtaatggtgagcgttttggcattcatctgagctatgcagtacagccttcgccggatggtctggcgcaggcattcctgattggtgaagagtttattggtgataacccttgttgtctggtgctgggtgacaatatttactttggtcaggcattcagtccgaagctacaaagtgttgcggcccgtagtcatggcgcgaccgtattcggctatcaggttatggatcctgagcggttcggtgttgtggaatttgacgaacagtatcgcgttctttctattgaagagaagcccgtacagccaaaatccaattgggcggtgaccggactttacttttatgacaacaacgttgtggatttcgctaagcgggtaaaaccatccattcgtggagagctggaaattaccagtattaatcagatgtatctggaacgtggcgagctgaatgttgaattgctcgggcgtggttttgcctggctggacactggtacccatgacagcctgattgaagccagtatgtttgtgcagactgtcgaaaaacggcagggcttcaaaattgcctgtctggaagagatcgcatggcgtaatggctggatgagtgatgatcaggtcagggcttctgcggcagaattgactaaaacaggctatggccaatatttgctggatttactcaatgtctattcacgctgatattgaacctctggcatgggacagccaattctttggtctgtccactgcccgtctgaatatcataacggcctcttcaccgtctgctgtatcagtcactgcggctaaactggataaatatgctttagtacaggcaaaagtgccggctcagcaggtttatctgattgatcaattatcagcgctgggcttttccctggtggaaggtgaagcagatttacggttatctattagcacagaaaaagcaggcagagctcaggcattaataaccgcgacctcacaggatattccgttacttaaagcggcggcggccagcgtattttcaaccagtcgctttcgtacaccctggtatcaggtgaatgatagtggccgtttttatgcgacatgggttgagaaggcggttttgggcacctttgaccatgagtgcctgcttgttaatgatgagtgtggcaatcctgctggttttgtcaccatgagaaagataggaagtcatgaagcacggataggtttgctggcggcaatgccgggcaaattgcagcaggggatcggaaaaaaattaatgtcagcggcgcaacaatggtgccataaccatgagatacaatgcctgagaattgcaacgcaaatcagcaacatcacggctttgcgcctttatacacgtagtggtgcaacaattgaaagcactgcatattggttatacagaggatgaaatgattccatttaacaaacccccggttgtcggcactgaactggaatatatgcaacaggcgatggccagtgggaaattgtgtggtgatggtggttttaccaaacgttgtgaagagtggatggagaaacgctttagttgtccggatgcgttgcagaaaactgatgcttttcataaaacaaaagtgttgttaacgccttcttgtactgcttccttagaaatggcggcaatactgttgaatatccagccgggtgatgaagtcatcatgccgagctacacctttgtttcgacttccaatgcctttgttctgcgtggagctaccattgttttcgtggatattaatccggatacgatgaacattgatgaaaccaaaattgaagcagccatcacagataaaacccgcgccattgtgccagtgcattatgccggggtagcctgtgaaatggataccattatggcattggcagaaaaatacaatctgtatgttgtagaagatgctgcacagggcgttatgtcaacctataaagggcgtgcgctggggacgattggtcatattggttgtttcagctttcatgaaactaaaaattactcagccggaggcgaaggtggagcaacgctgatcaatgatcaatccatgcttgcccgtgccgaagttatccgtgaaaaagggactaaccgtgctcagtttttccgggggcaggtagataagtatacctggcgtgacattggttccagctatctgctttctgacttacaggcggcatttctgtgggcacaactggaagtcgcggataaaatcaatcatcgccgcctgacgctatggaataactattatcaggcgctgaaaccattggctgataaagggctgctgactttgcctgttgtgccagaaaatctggaacacaatgcccacatgttttatatcaaactgaaagatgtggcagaacgtagtgaatttaatcgttttatgaaagaggcggatatcctgacggtattccattacgttgcactgcataccagcccggctggtgagaaatgtggtcgttttcatggcgaagaccgcttcactacccgtgaaagtgagcgcctagtgcgtttaccggtgttttacaatatcactgatgaagaacaacagattgtcatcagtcgcatcaaggaattttttgcctgatatgtcacttgccaaagcctcagtctggacggctggctccacactaatcaaaattggtgtggggttactggtcgttaaacttctggccgtctcctttggcccggcaggggtggggcaggcgggaaatttccgccagctcattactgttctgggagtactgtctggtgccgggattttcaatggtgtgaccaaatatgttgcggagcaccactctgagccggaaaagctcaaggctatattgggaacgtcatcctcaattattctggggttttctaccctgcttgcggtagttttccttttattcagtgacgctattagtattagcctgtttggtcacaaccattacaaaactgttgtgcaggcgctcgcatttattcaaatgggaatcgcttatgccaactattttctggctattttgaaagggttccgcgatgctcagggaaatgcactggccattatactcggcagcctgacaggggtgatggcttatggcctgtgttattggctgggggcctatgaaggtgcattggctggtctggctttagtccccgctttggtggtcttgccggcaggaatgatgttactgcaacgcaaaacgatagtattgtcagcactgaaacctgcatgggatcgcgtcattgccagccatttggggaagtttacgctgatggccttgctgacttccattacactgccagtcgcttacatcatgatgcgaaacttaatggctgagcgttatagctgggaagaagtggggatttggcagggtgtaagcagtatttccgatgcttatttacaatttatcacagcttctttcaccgtttatttgctaccgaccctttctcgactggaaagtaaaaataaaatcaccagtgagatcgtaaaggctctgaagtttgtattacccgcggtggctgttgccagtttttccgtctggttactacgtgactttgttatctggctattgttttcagataaatttaccgcaatgcgggatctattcgcatggcagctggtgggagatgttctgaaagtttgtgcctatgtttttggctatctggtgatagcaaaagccgccctgcgcttttatatattggcggaagtcagccagtttctgttgctgaccggcttttctcactggctgatcccgataaatggggcgctgggggcagcacaatcttatatggcgacctatgtcgtttattttagcctttgttgtagcgtatttattatttattgcagacgagcatgacaaccttaatccacgttttgggatcggatatcccgcatcacaatcaaacgttactgcgtttttttaatgacgtactggcacaggaaactaagccttcagccaagccgtattttatggtggtggctaaagatgcttcatggcaagaccctttatggataactgaaaattatcctgctttaactatcacaacttatgaaaacaaagcagtattatcgcaggcagtcatcgtaatggcacaggaagaccgggctaagcgcttcttttttcatgggcagttcaatgcaggcttgtggctggctttattagccggaaaaatcaaaagtcatcaattctggtggcatgtgtggggggctgatttgtatgaggattcccgccagcttaaatttcgtgtgttctatctattgcgccgtctggctcagaagcgggttgggagagtatttgcgacacggggggatcttaactatttctcgaaatcgcatccgcgagtaccggcttcactgctctatttcccaacacgcatgacgccttcgctgacagtgaaagacaaattattttcacctgaagggatcaccattttactgggaaattcaggtgatcaatctaatcggcatattgaggcactacacaaaattcatcgtcagtttggtttagaagcccggcttatcctgccaatgggttatcccgataataatcaggcttatatccagaatgtagaacaggccgcattatcgttattccgggctgaaaatatccgaatactgaaagaaaaaatgacatttgatgattatttatcattactgcgtcaatgtgatttgggctattttatttttcagcgtcagcaaggaataggaacgctttgcctgctgattcaacagggggtcccttttgttctgagccgccagaatccattctggcaggacttagccgaacagcaaataccggttctgtttgatggtgatgaactgtataagcattgggtgcaggaagcgcagcgtcagatgctgtctctcgataagaaggcaatcgctttttttgatcctaactttgtcaaagggtggaaaattgccctgctggaagcttctggagagctgcaatgacgttggtgcaatttggtgggctgtttgttatttatgcaatctcgttgatttttattctgacactgacgtatcaagaatttcagcgcgttcgttttaattttaatatttttttctcactgctttatctgctgactttttattttggtttcccactgacatgcatactggtttttcagtttgatgttcaggtcgtaccggcgaattcactgctgtatgcaatattggcatcaacttgtttctatgccatttattatgtcagttataaagtacgtctcaggtaccgggtatcggagaaggagagcgcaacgagtggttttgttccgcgtaagccattgttcaccatgaaccgggtggagactaatctggcgtggtttttgttggcgggtatagccattttttctgttggctctttcttcctgcaaaatggttttctgttatttaagctacagtcgtacagccagatcttttccagtaaggtttccggggtagcgcttaaacgctttttctacttctttatccccgccatgctggtggtatttttcctgaaaccgaccaaaacgcgttggctgttattcttagtgggaaccgttgggttcggcattctgacttatgtgattgtcggagggacacgagccaatatcattattgcgtttgcactgtttctgttcatcggtattgtccggggctggattacattgtggatgctgcttatggccggtgttattgggatcgtcggtatgttctggctggccctgaagcgttatagccttgatgtgagcggagcagaagcgttttatactttcctgtatttgacccgtgatactttttctccgtgggaaaatctggctttgctactggataactacagcaaaattgactttcagggattggccccgattatccgggatttctatgtttttattccgggctgggtctggccggacaggccgaatctggtctggaacacagctaattattttacctgggatgtgttgaataaccactctggtttagcgatttcccctacgctgataggctcgctggttgttatggggggcgtgttttttataccgcttggggcagttgttgttggcctgattatcaagtggtttgactggatttatgaagccgggaaacaggaagcaaaccgttataaagcagctattttacaggcattctgctttggcgcgatttttaacatgatagtccttgcccgtgaaggtatggattcttttgtttctcgtgttgtgttttttggtgttgtctttggtctgtgcctgatagtagcaaaattgctgtactggctgttcgatagtgcagggcttgttcggaagtttgtcatcaccaatatgtctgtatcaccagaaacacctgctcgggtggatgtaaggagcaaaaatggcgctgaatgatattcgtaaatatcgtatccgtggtctggagctgtggggatttcagggaatgtcacatttcctcgatcatctttttcaggatggacaggtcaagacaggaacactgatggctatcaacgcagagaaagtgcttactgctgagaaagacaaggcactgagcacgctgctggatgaagcggaatatctttatgcagatggcatcagtattgtgcgtgccattcggcgtaaatatccggatgcgcaggtgtcacgcattgcgggcgcggatttatgggaagccctgatggagcgcgcaggacgtgaaggtactccggtctttttggtgggaggcaaaccggaaattctgacgcagacagtaaataaacttcgtaaacagtggaacgtcaatatcgtaggcagtcaggatggttattttaccgctgatgagcgcaatgcggtatttgaacgtatccgtgccagtggtgcaaagattgttacggttgcaatgggctcgccaaggcaggaaatttttatgcgtgactgccgaaaagtgcattctggctcactgtatatgggggtcggaggaacgtatgatgttttcactgggcatgtgaagcgtgcgccaaaagtctggcagaacttaggtctggaatggctttatcgtctgttgtcgcagcctagccgtatccgccggcaaatcaaactgttgaggtttttggggtattactacagcggtaagctgtaggtgatattttaattgctgttaacccactgtgctcgtcttaatgttagggatggtgcagtgggctgtcttaccttagtccacttcatttaactatcttcgttgactcgattttacaattttttatttcactgataggcaaaacgtgttttgatccctgcctttttacaacttatcttcacaaccgttgattattaattcctgtattttttctgtttgcaaataaatatagacaccataaaaatggatagggagttttatgagtgattcgaaacaagatctgcccgagcaggggctgcaaagaggacttgaagcgcgacatattgagctgattgcgctaggtggcacaatcggcgtcgggctgttcatgggctccgccagtaccctgaaatgggctggcccttcagttttactggcttacattattgccggtctttttgtctttttcattatgcggtcaatgggcgaaatgctatttcttgagcctgttaccggttcatttgctgcttttggtcataaatacctcagtccctactggggatgcctgaccgcctggggttactggttcatgtgggtttctgtcgggatttcagaaattaccgctgtgggagtctatgctgaattctggttccctgatttaccacaatgggtagcggctttggtggcggttagtctggtggcactggctaatctggctgctgtgcggctgtatggggagcttgagttctggtttgcaatgattaaagtcaccacgattattgtgatgattttagtcggtattgggctgatattttttggattaggaaatgactggcaagccatcggtcttgataatctgacgactcatggtggtttctttgccggtggttggaaaggatttttgtttgcattgtgtattgtggttgcatcctatcagggcgtcgagttggttggtattaccgctggtgaagccaagaacccacaggttaccctgaaaaaagcaatcaacaatattctgtggcgtattctgattttctatgtcggggcgattttcattgttgtcaccctgtttccatggactgagataggcagtcatggcagcccgttcgtcatgacttttgctaaagttggtattgcctctgcagcggcagtgattaactttgtggtactgactgcggccctttccggatgtaatagcggcatgtacagcggaggcaggatgttgtacgcgctggctgaaaatcgtcagttgccggcttcattgcgtaagctatcgaaaaatggtgtacctgtcagatgtgttgcaatcactattggttgtctgattgccggttccagcctgaattatttgatcccaaatccacagtctgtttttgtgtatgtctatagcgccagtgtcctgccggggatggtaccgtggtttgtgattctggtgagccagttacgtttccgtcagcatcatcaggaagccctgaaacagcacccgtttaaatcgatacttttcccttatatcaattacctgacactgattttcttgtcttgtgtattgattgggatggcgattaacccggatacgcgtttttcactcatggttggtggagctttcctgctgattgtgtcactgatttattgggtaataaaatttatccgggaacaaaaacaggtagaaaatgtagggtaaattttcatttgaaaaacaatttgcggtggggaagtgctgtccctaccaacgaaatgaataactttagagcaca

SEQ ID NO: 458 - DNA, 39957 bp, Xenorhabdus sp.
  CDS (22435)..(23466)
agtgatcaaggggttttagggacagaagttttagatccagcggtttttaggcaagtatttttaaagtaaacagtataattcatgctccaccagataccaataaaaagcacctttggaaatcatacgcagttgtaataccaaacgtttttagagacgacgtcttttttcttcatcaatatccagcgcttttgcacccgcactgaacacaatcgttaccatcgcttcggcttgtatttcggtaaaatggcgaggcatatgactggcctgctcaaggtagtctgccagttctgcaataaaatgttggatttcccgtgcgaccgctgcacggaactcagcggatgtaccagaacgttcacgcagcaataacctgaatgcattcggattatgaccgataaactccataaaggttgaaacagaagtgcgaatgatactgccaccttttgcgatacgctggcgagcctgacgcataagctgacgcagcattaagccgctttcatccaccatcgtcagccctaactcatccacatcacgaaaatggcgatagaatgaagtcggtgcaatccctgcttcccgggccacttcccgcaaactcaggctggtgaaactacgttcagcactcagttggctaaatgctgcttcaatcagtgaacgacgggttttctctttctgtttcgctctgacgccagttacattattcacagcaatcctgatatacatactcgactatactatgcagcaaatatatcagattctgctacatttgctgtgattgttctcttaaagatattaaccaatgtttccttagttttatatcaacgccggaaacaaaaaccgtactctaattaggttattacgccaaccaatgttaatatagagttgttattttgtgtaaaaataggtctttcctctatgcaatatactcattttgatgccattgtgattggctccggacccggtggagaaggggcagcaatggggttggcaaaacaaagaaaaaacgttgcagttatagagcgttataacaatattggcggcggctgtacccactggggcactatcccgtccaaagctctccgccatgctgtcagtcgtattattgaatttaatcaaaatcctctctacagtgacaactcccgtattcttcgctcctcgttttcagaaattttacgtcatgccgaagttgtcataaatcagcaaactaaaatgcggcaagggttttatgagcgcaatcggtgtaagatgtttgccggtgaagccacctttatcgatgaacatcatgttagtgtgcgttatgctgatgatagtgtagatatattgagtgccgacaaaataattattgccacaggctctcgcccttattgccctcccgatgtcgacttcactcattcccgtatttataacagcgatactattctggaactggatcacgaaccacgccatgtcattatttatggcgcgggtgtgattggctgcgaatatgcttctatattccgggggttgggtgtgaaggtcgatttgatcaatacccgtgaccatctgctgtcatttcttgatcaggaaatgtctgacgcgttgtcttatcatttctggaatagcggtattgttatccgccataacgaagaatatgaaaagattgaaggtcttgaagatggcgtcattatccatctgaaatcaggcaagaaagttaaagcagattgtctgctgtatgccaatggacgaaccggtaacaccgataaactcgggatggaaaacgtcgggctggaaactgatagccgtggtttattgaaagtaaatcgggtctatcaaaccagcaatgaaaatatttatgctgttggtgatgtgattggttatcccagcctcgcttctgccgcctacaatcaggggcacattgcagcaaaagccatcatgaccggatctgagaatgccgaaaagtatctggtagacgatattccaacaggtatttataccatccctgaaatcagttctgtgggtaaaactgagcaggaactaacagcgatgaaagttccgtatgaagtggggcgtgcccagtttaaacatctggccagagcacagatagcagggatgaatgtaggcagcatcaagatattattccaccgcgagacaaaacagatcctcggcattcactgttttggcgaacgtgcagcggagattattcatatcggtcaggcgattatggaacaaaaaggtgaaggtaataatatcgaatatttcgttaatacaaccttcaactatccgacaatggccgaagcttatcgcgttgctgcccttaatggactgaaccggttattttgatgttgttccactgatatcgaaataattcttcattctggttcggatcgcctctgccagttgctcatagcgattacgcagaggtgaaccgggacgataaaccagaatcacagaacgttccggcaagggattatggcactcgagataacagatcccatcacgctttttctctttggggacagccaagtcaggcaacaaagtgatgccgctccctgccgctaccatattacgcaatgtttccatactggttgccctgaaatgcgtatcttctttggctccggcctgaaaacagaaccccattgcctgatcacgtaagcaatgaccatcttccagcatcaataacttttcaccagtcagctcgctcatattgatcttatcccgctctgcccatttatgttcttcatagaccgcaggcttcatgggttccttaaagagaggaatttcaataaatgcttccgtttcttttattgcggccagaatcgcacagtccagtttcccgctatcaagctgggccagcaggttctgggtctgggcttcgtgtaggtacatttccagtttggggaacaacttatgcagttcaggaataatcaatggcaggagataaggaccaacggttggaatgagaccgatatgtaatgggccggacatactttcaccctgaagtgaagccatttcctgtaataccttcacttctcgcaataccgtcttggcttgctccaccagcaacatcccctgttgtgtaaacaagactttgcggcttgtgcgttccagcagcattacgcccaactcatcctcaagtttacgtatctgcccactgagcgtcggctggctgacatgacaagaatcagcagccctgcgaaaatgccgatactcagcaagtgccacaagatattccaaatcgcggatattcattcccaacctcattgtttgatatcaatgatagaattgatcaataaatcattatatgcatgagaggagaaaactatcaattcgtggtgatttcagtttttttataaagttacctgataaaaaatgacggaatttattcaaaaaatagataaatcggaccaccgcaataagcaggcagcccaattcgttgatccggggaagttatgtactcagaggggtttcagttagctgagatgtagcctctgctttgcctcagcaatagccagagttacctgtttctgtgccacaccaccttttgccagacgtttatccagacaggactgtaatgataaaatatcgtatacatcgattgaaatagtttcactgaacctttgtaattcagacaatgacaactcctccagcgccctacctttctttattgccgcaatcactacttcaccaacaatgtgatgtgcttcacggaatggaacaccttttgccaccagataatcggctaattccgtagcattagcatagccctgctttgccgcctcccgacaacgctcacgttttatctgaatgccatccaataccattgctgccatatgcagacaaacccgccaggtatccaacgcatcaaacaacccttccttatcttcctgcatatctttgttataagcgaggggcagcccttttaatgtcatcatcatacctgtcaatgcaccctgtacccggccacatttaccacggataagttccagtgcgtcagggtttttcttttgaggcatcaaagaggaaccagacgttacccgatccgataattcaataaagtccgcttctccactgttgaagaaaatcagatcttcggcaaaacgcgaaagatggatcatactgatgctggcatttgacagcagttccagcacatgatcacggtctgacacgctgtctagactattacgggttgcagaagcaaaaccaagccatgaagccagttgttcccgatcaatattataagccgttcccgctaacgcgccacatcccagcggactgacatccagccgttttaacgtatcctgcaaacggctttcatcacgggcaagcatttctgcatatgcgagacaccaatgtgcgaaagtcaccggctgcgcccgctgtaaatgagtataccccggcataacggcatcctgattattctcagccgtaatcactaatgcctgttgtaatgctgtcagagcctgccggatatccgctatctgatccttacaccataacttcaggtcagtcgcgacctgatcattacggctgcgtcctgtatgcagttttttgcctaaatccccaacttttgcgatcagctggccttccacccagctatgaatatcttccgcgtcgctttgcaaaatagcctctgggttggttctcacttcatccagtaatgcattcaacgccaactccagcttctgctgctcttcagatgtcagaacaccgactgtgaccagtgcctttgaccatgcgacagagccaacaatatcctgctctgccagacgataatcaaaacacagggaatcattaaactgcttaaattgctgatcagcttcctgactgaagcgcccaccccaaagtgccataattgcattcctcttctttttattacccggaaattactttttgcttttcagcgcacgaatgcgggaagaaagcgaatggaggcggataaacccttcagcatggctgtgatcataaacttcatcctcgccaaaagtagcaaactcttcagaatagaggctatgaggagacgttttctgagtggctgtcacctgccccttatacagcttcaggatcacttcaccactgacattctcggccagcatctctgccgcagcctgaatagactgacgcagcggcacgaaccagcgcccatcgtaaacaacataagacatctccagacccagctgctgacgccatttaaaactgtcacgatccagaactaattgttcaataccacgcagagccgccatcatgatggttcctcccggtgtttcatagcagccacgggacttcattccgaccagacggttttctacaatatcgatccggccaataccatgtttagcacccagctcattcaattcattaagacattgatatggtgacagtatcttcccattgactccgacaacctctcctttctcaacagtgacagaaagatattcaggttcgtcaggagcatcttccggctctacagtccactcccagcaatctttattcgccgcattccacgtattttccaatacgccaccttcggtggaaatgtgccacgcgttttcatcacggctgtaaattttttccagcgttgccgtagtaggaatatcgcggactttcagataatccagcaacgcttcgcgggaacgcagatcccactctcgccacggggcgacgactttcagatgtggagccaatgccgtataagtactctcaaaacgaacctgatcattccctttaccagtcgccccatgcgccagcgcatcagcccccactttcagggccagttcaacctgcgctttggcgataatcgggcgagccattgaagtaccgagcaaataactgccttcgtacaatgctccggttttcagtaccggataaacatattctttgatgaattcttcacgcagatcggcgatatggcattctgaggccccggaacgcaatgctttttgttctataccctccaaatcttcacggctctgaccaacatctgcgacaaatgcgataacatcacaattgccataatgttctttcagccacggaatgatggcagaagtatccaaaccgccagaatatgccagcacaatctttttaatactgttttttaccgaagtagtcgtcgttgtcatagaggtagccttttacttttattcaccagcaagttttcaccagaaaggtgccatgctgttaatcagtcaaaaccgctttcattctctgttatgtcagcatggttatgccagaatgcgggtgccaacggatataccattaaatagagcaatcagttgatcagcataacgccaactggcgatatccaccggacgccccagtgtttttgcggcttccagtgctgcatggactttcacaaccatgccgtcagtaatcacaccctgttcaatcatctgctgtatttctttttctgatacttcagggatcttgttgccttttccgttcagaataccgctgacatctgacagaaaaactaaatcggcattcagtgactgtgcgacagctgtagcagcttgatctgcattcacattcattaatttgccgtcttctgtaataccaatagagctaataatggggatataaccgatatccagtaaaattttcagtaaatccggattaccgggagaagccatgcccgtgtgaccaaattcctcgttaaacggagaaactttcacaacacagccatcacccaaacatagaccaaccgcaggtaaacggtattttatcgcccaggagagtaaggttttattggctgtaccagccagtgtcccggtaataatatcaatctgatctgctggcgttacacgcaggccctgtttcttgataatcggcaactgtaatttctgcatcagttcatcaactaaacaaccgcccccatgtacaatgactaaaggacgtttatgcgtttttcgatataactgtaatgtggaaaataatcgtaccagcgcttcatcactatctaataacaccccacccagcttgataactaatggctccatcagatttatcctctgtcggtatcaaataatttctgaaataaaaaagctctgaattcaaaacaccttgaattaaagtaacgcctgagtttcttcgaacccgaagcgaatattcatacactgcactgcctgcgctgctgcacctttcagaagattatcctcagccccgacaataatcagatgctgcccttgtacagcaaaaccaatatcacagaatggcaacccgacgacccctttcagggcaggaacaccgttttcatataaccgaataagtggcttatcgtgatacgcctgttgatatgcatgcctgacttgttcttctgtgataccggctttcagcttgcaggtaatcgtagctaggatccctcgcgcaaaattgcccaaatggggggtgaaaatcacatctatccctaaatgtgtagcaatttccggctggtggcgatgattgaaaacaccgtaaggctgtaaactgacttcacaaaaattattatttatcgacgccttacgcccggctccactcacaccactgacagcattaataacgggccactgtcctgtatccagcaaaccagcttccagcagtggtttcagcgaaagctgtgaaaccgtagggtaacaacccggaaccgcgatcagctgagctgttttaattttctccgcctgccattccgccagcccatataccgcctgctcaagccaatcgatatttttatgctcaaatccgtagtattctgaataaaacagtgtattttgtacgcgataggcaccagataaatcaaatacgatacagcctgcctgtagaaattccggagcaatgtcatggctgacttcgtgtgcagtagcaaggaaaacgatatcaataccgcttgcggcttcagccacatcagttaacggctgtaaaggtaaatcaagggttcctttatactgtgggtaaagttctgacaagcactttccggcatcagagctttgagcagaaaccatcagacccgcaagatgtatataaggatggcgttgcagacatgctgctaactctgctccggtatagccactggcaccaactatcagcgtattaagcatgggatttattcaccttgtattaacccaatgtattgtattaacccaatgtagtaacccgattacacgattgaatttatattcaattaaattgcattaatattgatactatcttgaataagggctgtcaacagtgaatattaaattaccaacgtttattgagttatatcgccagcttatcgcagcaccttccatcagtgccgtggatgaggagctagatcaaagtaatgaatctgttatctctctattggctgactggctgaaacagattggttttgaaattgaggttcagcctgtgccggaatctcgcggaaaatttaatatgctggcaacgttagggagtggctctggagggttactcttatgcggtcatacagacactgtgccatttgatgccgggcgctggactcaggatccattcacactgacagagcgtgatggcaaattatacggtctggggactgctgatatgaaaggtttctttgcctttatcattgatgcaatacgagatattgatattagtaaactatctcacccactctatattctggcgaccgcagatgaagaaacctcaatggctggtgcccgatattttgccgcaaacgcaactatccggcctgattttgccattattggcgaaccgacatcactacagccaattcgtgcccataaagggcatgttgcccatgctatccgtattgaagggaaatccggccactccagtgatccggcgcggggtgttaatgctattgatttgatgcatgaatccatcacacagttgatgaaattacgtcataccttgcaggaacgttaccataatccggctttcgccattccctaccccaccatgaattttggtcatatccacggtggtgatgcggctaaccggatctgtgcctgctgtgaactgcatatggatattcgcccgctacccggtctgatattacaggatttgaatgaagcactgaatgaatcactggaacccgtcaagcagcgctggccgggacgcctgaatgtgacagaacttcatccccccgttcccggttatgagtgcccgaccaatcacaaactggttagtgttatcgaaagactactaggaacaaaagcagaaaccgtcaattactgtacggaggcgccttttattcagcaactctgcccgacaatagtgctgggaccgggctccattgagcaggcccatcaacctgatgaatatatagaagtgtcgatgattgagccgacaaggaaactgatcgcccagattgtggagcatttttgtttgggtgtgggttaaagctcatttttcggagtgggaccacggtcccacttattttaaatggagaaattcattgaatcgccattaggtaatttaacaccaagggtcatttctccccccatagactcaatgtactttttgagtgtggaaatttttaattcatttccccgttgctcgattgcagcaactgatgactgtgcaatacctaaattttttgcgacctgagtttgttaaagctctaaggtttcacgaatttgatatagttgtgtttcaagcaacaactccgctgctttttctttaattctctcttggctctcggggctgcgtttttccattagttcttttaacgtagccatatcatctctccagattttctagatgagttctgaattgttcatccgcaattctaatcatctctttatagaacaatcgttgattctgtccttctttgttacctgcacaaagaataattgcctgacgttttggatcaaatgcaaaaaaagcacgaattggaactccattatgttggattcgtaattctttcatgttcggataacaggaaccatttaatgtatacacaatggatttcaagatgcatcgcggcggcaagagagttcatccctgggagcatagatagctatgtgactggggtgaatgagcgcagccaacaaagaggcaacttgaaagacaaagtgtatatcaaccaatggtcggcccagtactgcccctttgagcgctaacacatgtattactgccaaaacacttttttcccaacatgaatttctttcctgatcacactgaatattcctcactggaaataagccatttcctaattgactaaaaatcccgcttcgctcattctatttggacgtctaaatggatagacatataaacacttaagcatctaaatataatcggagaaaaactccgttcgttcacgagggtacagggtatgagtttctttcacgctaatcatcaagaggcactaaatcagaatctggctgaacttgaaggtcaaattcgtgtttccttcgaattttttccaccccaaacggctgaaatggaacagaccctgtggaagtccattgaccgtctaagcaaacttaagcctaagtttgtttccgtgacttatggagccaattctggtgaacgtgatcgtactcatagcatcattaagggcatcaaagacagaacaggccttgaagctgcgccgcatctaacctgtattgatgccaaccgtgaagagttgtgtaacatcgcccacgattactggagtagtgggattcgtcatattgtggccttgcgcggcgatttaccaaatggcagcagtaaacctgaaatgtacggtgctgatttggttgaactcttaaaaaaagaggctgattttgatatttccgtggcggcttatccggaagtccatcccgaagcaaaaagtgcgcaatctgacctgattaacctgaaaagaaaaattgatgccggtgctaatcgcgctattactcaattcttttttgatgtggaaagttatcttcgctttcgtgatcgctgtgtttcaacaggaattgatgtagaaatcgtgccgggcattttgcctgtctctaacttccgtcagctacagcggtttgcgactatgactaatgttcgtatcccaagctggatgaccagaatgtttgaaggattggatgatgatcctgaaagccgcagcttagtgggcgcttcaattgcaatggatatggtgaaaattctgagccgtgaaggagtaaaagatttccatttttatacgctgaaccgagcggaattgagttatgcaatctgccatacattaggggttcgcccttgttgaattccatttccgccgaactctttagttcggcgaagacaaaacttccttactgattacaatcaaacggtgacgatgtaaatctttgtctcttccccaacaaaacgcatcccatttatcaagaagttcatccatactggttaccgctgtgagtgggcgatctatttctccaccatcagaaatataaacgtgataaccaacagacatagaccaagcgatcataatttgccaaaaacgtttaccatcacctgtctgctcttcatctgtcacgataatcctgtaattatctaacaagaatctgaaaaaacgccggggaaaaccactggcagcatcctgatgttcagggctgaaagtacgccagaccatgatttgagtacaggtttctttatcaacaataatgtcgttgcgaaaaatcagtttgacggcgtaaaccgtttcgggtttatcacctgatgtgatcatacggtattgcgcctgctttaatgactttacaaagcgatatccatgtggagtcacaaaatcaggcaaaataaaatcttttgcgccattttcaagaaaagaaaccgtatgttctacgtttttttcagaaatacgtagtttacggttaaaatctacgtctgctatcaaatacggcatcgaaatacgctgtccttcatgattgttgttattcatattttgcccctcacactggacaagttggttttaaatcatacagagatctgagcaatttcccatcaacatatcctgttatttctggaagtaaaccaaaacacaaatccaacaataataaccatactaacaatattcaggatataccacccagcctgatcgctcatcaccatacccactgacaaagaagcaagcatattagacagataggtaataagcgaattcactccctgtaatttgtgtttgaatggactaccgatacaataagcaaaaccggacagtttcccatccggtttcaccttttttctcatcaagaaaacgaaatactaacctgtattgcgcatccccgccgcaacccctgctattgttaccatcagcgccagctcgacacgaggatcaggctgttcctgctggcgggagcgttgtaataactctgcctgtaaaacattcagcgggtctgtataaacattacgcaatgcgatggattcagctatccacggcagatccgccatcagttgcccatcacgtgaaacggccagaacagtctcgatatcggctaaaagttgattacgcagtttcgtacccagcggccacagttttttatcaaccagacgttggtcataatattctgccagccataaatcagccttggcgaaaaccatctccagcatagcgatacgcgtcgtaaaaaatggccagtcacgggacatttcagacaaagtatcctgctgaccagcctctatcacatgctgtaatgcagcccctgcccccagccatgccggaagcatcaggcggttttgcgtccacgcaaaaatccacggaatggcgcgcaagctttctactccacctgtcggacggcgtttggcagggcgagagcctaacggtaacttcgccagttcctgttcaggagttgctgaacggaaataaggcacaaattccggctgctcgcggacgtaatcacgatacatatcacaggaaatatcggaaagcgtatccatgatttgcttccattcaggtttcggttccggtggtggcaataagttcgcctccaaaatggcgctggcgtacattgccagactactaatcgtcacctgtggcaagccgaacttaaagcggatcatttctccctgctctgttacacgcaaccctcctttcaggctgcccggcggctgagaaagtaatgccgaatgtgccggagcaccaccacgtccgattgttcctccccgaccgtgaaacagtgtcagtttcacaccttctttttcacacactctgatcagtgcatcctgagcacgatactgtgcccacgatgctgccatcacgcccgcatcttttgctgagtcagaatagccaatcatgaccatttgtttatcctgaatcagttcacgataccattcgatatggagcaattgctggatcacgctttccgcgttattcaggtcatcaagcgtttcaaataatggtgcaacaggtaatgacaatgaacaatccgcagcttttagcagtaatttcactgccagtacatctgaagggactttcgccatagaaatcacataggcggcaatcgcatccggtggcgattctgcaatgactttacaggtttccaatacttcctgggtttctgcacttggctgccagtgacgaggaattagcgggcgtttcgaattcagttcacgcaacaaaaaggcctgtttctctgtttctgaccagctcgcataatcgcccatttccagatatcgggtcagctcggcgatagcatcagtatgacgggtactttcctgacgaatatcaatgcgaaccagtgacagaccgaaacaacggatacgacgcagaatatccagcaactgaccatcggcgataatttccataccgcaggctttcagagactggtaacaggcataaagcggctgccacaattgatcgttatgcagcaataaatctgcgggagggataacctgttcacctttcaggcgtttttccagatatgccagcgtattatttaattgagtacgcaactgtttagcaatttcacgataaggctcgataatctcatctcctcctgccagctggcgcagctctggcgtacattccgacatcgaaagctcggataccagaacctgaatatccttcagaaacaggtcagcggctttccagcgactaagtaacagcacatggcgggtaacttctgcggtgacgttaggatttccatcccggtcgccccccatccaggaagtaaaacggattggcacagactctaccggtaagctgtaaccgatagattcttccaattgctcattgaattcacgcaaaaacgcaggaacaccttcccacaggctattttccactaccgcaaaaccccatttcgcttcatcaatcggggtaggacggatcttgcggatttcatcagtatgccaggactgagcaatcaactggcgtaaacgacgcatgatattgttatgctcgtaatcagccaaatcatcatgatccagctgtgccagacaagtattcacttcaaccagtttatggatcagagtgcgacgggcaatttctgtcggatgcgcggtcagcaccagttcaatggaaagttcattgaccgcctgaaccaaatcatcattattgaagtttttacttttcagccgttcaaagagtgctgctaatgcaaccgggttactggctgcttcaccatgcggtgagatgctgtgatattgttcagcagcattggccaaattaagaaactggttaaacgctctggcaaccggcagtaattcatcattagataaattttgcagtgtcgataacagttgctggcgatcagcgtcatttccggcacgggatgatttggatagcttccttatcgtttcaactttatcaagaatatcctttccctgagcctctttgatcgtgtttcccagtatcttaccaagcatactgacattacttcgcattgcggaatattgttgattcatgtgagttctgaccttgtgttgctgtatgcatatttacccttcgcctttcaagctgcctctttgttggctgcgctcattcaccccggtcacatagttatctatgctcccggggatgatttcccttgccgccgcgatgcaacttgaaattcattgggtatatttaatctactattcatatcagaaaacaaacaatttgggcggattttatgaaattttgctcaaaactttctttaacctgagtcagactattggctttgaaaattcccaacactgaaggaaaaacaacgaacttttgctggtaaatgggggctacttgagcctgctccaatcaaaaataaaagatggaacaggcataaatcaaatattctgatagaaagtgcggattactataaaagttgcgataaacgattcaaatctgactgaatcgcgccggccgtgacatcacgccctgcgcccgggccacgaatgaccagagggttatcacgataccagcggctttctatggcgaacacattatcccccggtaataacgaagctaagggatgctctgaacgcaccgcttccactcctactttagccttacctttggcatcaaagcgcgccacataacgcagtaccatgcccatttcacgcgcagcttccagccgtttctgcatctgctcattaatcgcagagctgttttcaaaaaactcgtcaatcgagccaacgctggcttctggtggtacaagtgattctatccgcacctgatccggctcaatctcatagccagcctcacgagccagaatcactagcttacgcatcacatcctgacctgaaagatcaatgcggggatcaggctctgttagcccttgttgccatgcctgttccaccagatcgctgaaaggaactgtgccatcaaactggaggaacagccacgataatgtaccagagaaaatcccactgatagacaggatcgtatcgccgctttcccgcaagtccctgacagaatagttaatgggtaaccctgcaccaacagttgcgttatataaccagtggcggcctgtttttgtaaaagcatcccggatcatgcgataagtattactgtcggaggcaccagcagccttattagcgctaatcacatggaaaccataactggcaaaatcgatgtagttacccgccaactcctcactcgccgtcacatcaagtacgaccaaatcatcataagggtgtgcccgcatccacaaaaacagttcatcatctgcatgagtggtggcctcatcattgaagaatgccaatgcccggcttgcatcaatcccctgataattcagcaggcttcggcgactatcaacaatgcctgccagaatgaattcaaaatcactgcgcgccgagatatttttctgttcacgcgcaaacagctctagccagcgtgaaccaatattaccttttccaaacagaaccaaaccgatctgtttttctgcccggaacaaactctgatgtagtccctgaatcagatgagatgtctggcccaagcgcagtacagcaaccagactgatatcatcttcagcatgccagataaactcaaccggctggtctttaagctgctgataaaaacggtggctatgcaacggatttttacatactcctgccccgaccaacgccaccagagaaaacccttcgcgcaaggaaagttttcccggcaaagaggcatcctgtaatacttcaagggcactgttaactatttcagaggtataacaaagctgaatcaaattgcagtcagtatgcagccctgtcgccaacggcctgatttgggcgcgcttcagcaatgagtcgatatctttataagtttgtttaaaatcgagggccgaaaaaaggtgtaactcaatcaggcagacatcatcgtggctggtcacaatttttgctcccattcctgatgccagcacccgttcaatacgggtagaaccctgttcaggctggtaactgcaacgtaattgcaaatcgatatcactgagcgaaacaggctgtaatgttcgggtatgaagtacaggagcagccagacgcgccagttcactggcttcatccagacgcaataatggcaacaggcacgcgtcgctgactttacgtgggtcggcactgtaaactccggccacatcactccagatagtcacttttttggcacctgctaatgccccaacctgagtagcagaatagtcactgccattgcgccctaatagtacggtttctcctttgttgttactggatatgaaacctgttaccaccagacgcttatcagaattctcaactaataactggctcaataaaggctgggataagataacatcaacctgcggctgggctgcccgttcagcccgcaagaactgacgcgcatccagccatgcgctggaaataccctgagattcaagcactgcggccatcaggcgggcagaccatatttcaccatgaccaacaacttcagcgtaggtaatatcactcaccggtttatccagtaatgcactcagcctttccaaatcagcaacaaaatctgcgatcagtgtttcggcgacagcttctggcaacagtccccggattaattcctgctgataacgccgtaaggcctgctgaacctgatgcgctgaaatacgatcattctggctcaatttcagccagtcaatcagctggttcgtcgtactccccgccgccgataccaccattaaatcacccggctggctgtagttcgccataatatccgcaacccgcttataacatttcacgtccgcaaggctgctaccgccaaatttatgtaactggcggcccgattccgcccccgctattgccagttcaaccataatgaatgcttacctcgttgccgctgcctgaaatgcactatccagatcagcaattaaatcctgactgtcttctattcccaccgagatacgaagaagtgaatccgtaattcccgcctgtttccttgcttctgccgacataccggcatgtgtcatcgttgcagtatgagaaatcaatgattccacaccacccagcgattcggccagagtaaataattttaacgcagataaaaagccacgcattgtttgctcatcaccagcaagttcaaaactcagcatcgcaccaaatccggcctgctgccggagtgctatttcatgacccggatgatctttcagccccggataatagagttttttcacctgtggctgctgttgcagatattccgcaatggcagccgcattattttgctgtagaagtacccgggctgataatgtacgaattccccgcaacagcagataactgtcaaaagccccgcctgttacgccgatattattcgcccaccatgccaaatcctcggcaatagcgggatctttggcaaccaccgcaccagcaattaaatcagagtgcccattcaggtattttgtacaggaatgaacaaccaaatctgcgcccaaatccagtggtttctgtaagacgggactcagaaatgtgttatcgactaccgttaatgcaccggcttcacgagccagttcacagatgtaccggatatccacgatccgcagcagcggattactgggtgtctcaatcaataccagtttgggcttttgggcaagagcctgcctcagtgctgcaccatccgactgatccacaaaaataacattgtaggctccacggcggcttaaactgtcaaacaggcgataactcccgccgtagcaatcatggggagccaccagcagatctccgggctgtaagaacaccgtgcataacaagtgaatcgctgacatcccgctgctggtcatcacagcccctgcaccgccttccagttcagccagaacctgctggacaacatcacgccccggattaccgcgccgggaatagtcatgcgctctcggttcattgaatcctgtgaaattatacgtactggaaagatagacgggaggaacaacacagccatattgttcgtcaacattaataccactttgaactgcagccgttgcttgtttacaacccgctatttgtttaaaccccatagctctacccattattgtattttaggagtgacagaagaataacccccagaaatatagacgtcaatacatctagacatccaaaatgatttgagctttaataatacaatccgtctattacccctgttttgatgtcagattagggcatattttctgaaatccttaaccgtagcgatatagtcgataggggaaatatgctaaaatgcggaattatcgacacgaacatagttcagaaataatttcttttatttctgatttcaattgcttgatttaaaactatttaaggtatctcatggctgagtggaatggtgagtatgtcagcccttatgctgaacatggcaaaaaaagtgaacaagtcaaaaagattacggtttcaattccattaaaggtattgaagatactgactgatgaacgcacccgccgtcaggtaaataatctgcgtcatgcaacaaacagcgaattactgtgtgaagcatttcttcatgcattcaccggacagcctctgcctgacgacgacgatttacgcaaagagcgtcatgatgaaattcctgaagcagccaaagagataatgcgtgagtgtgggattgatcccgatacttgggaatattgatatctcttttatctcaagtcgttgtttatatgctgtactgcgacttgaaatcaatcagatgcaggcagttaaaattgcattcgtttaaaacaaaaacgcccggcatatacaccgggcgtttttgttggcagtaagaattacttcttagcacctggaacgctgaaacgtttgttaaagcgatcaacacgaccaccagtcgcaacgtcacgctgcttaccagtgtagaacgggtggcatgcaccacaaacgtccaagttcacatcgtgaccggtagatttgattttgataacgttaccgcaagaacaggatgcagtaatttcttcgtatttagggtgaataccttgtctcatggggaaaacctctgttaaggccgtgtcgctatccggccttattgccgccagacaccacacgtcgtgttgattaaaataagtttggtaatttttataccaaaggcggcggatcatacagaatatcgttttatcgcgcaatgaaatctgctgagttgctatgatactctttgtttatatgtttgccattaatcatccggaaatcactttatgacagttgttcaggttgcgttacctgtccctttggcccgctcttttgattacctgttacccgaaggattgcccgttcctgcctctggaatacgggtacgggtgccttttggcaaacgcagtgcaattggtgttgtctccgggatcaccgacaacagtgaattcgcgcctgaacaactgaaatcaattactgaacttcttgatgaagcaaccctgttccctgacgatctctggcaattactccaatggtcttcccgctattatcactacccactcggggaagttctttttcatgctatgcctgttttgctgcggcagggcaaaccagcagaattttccccgctctggcaatggcaaatcacagaaaccggccagcaagtgccaccagaacaacttaaacgctcagctaaacaacaacaggcattagccaaactgcgccagcaatccgtttatcgccatcaggtttctgaattagaaatcagcgaaagtgcactacaggcactgaaaaaaaagggattcattgatttgcatccggtacagccggaagcggagaactggcgggaacattttcaggttatcggcgaacggctgaaactcaacaccgaacaggccaccgcagttggcgcgattcgcgcagaagataaaactttcgctccctggttacttgctggtatcacgggttcaggtaaaaccgaggtttatctgagtgtactggaaaatattctggagcagggaaaacaggcgctgattctggttcctgaaattggtttaacaccccagactatccgccgattcagagaacgtttcaatgcacctgtcgatgttctgcattcggctttaaatgacagtgaaaggttatccgtatggttaagagccagacggggagaaaatgcgattgttatcggcacccgctccgcactgtttacaccttttgcccacttaggtgtcatcattattgatgaagaacatgacagctcctataaacaacaggaaggctggcgttatcacgcccgtgatctggcggtattccgggccaaaaaagagagcattcccattattctgggaactgccacacctgcactggaaacactgcacaatgtacagcagggtaaatatcggcaactcactttgacaaaacgggcaggtcacgccaaaccagctactcaacacctgcttgatatgaaaggattaccgctgactgtcggtctatctcagccactgattaaccgcattagagaacatctaaaagctgataatcaggttattctgttcctgaaccggcgtggttattcgcctgccctgctctgccatgaatgtggctggatagcagaatgtcagcgttgtgatcactattacacccttcatcagaatcatcgtcatctgcgctgtcatcactgtgacagccaacgccccattccgcgccaatgcccacaatgtgggacaacaaatctcatcccggtagggctgggaacagagcaacttgaggatggtatcagccaactatttcccgatattccggttacccgtatcgatagagataccaccagccgcaaaggggctttagagcaacaactggctgacgttcatcagggaggagcccgtattctaatcggaacccaaatgctggcaaaaggccaccatttccctgatgtcacactcgtcgctttactggatgtggatggtgccctgttttctgccgactttcgtgccgctgagcgctttgctcaactatatactcaggtttccggccgggctggacgcgctggcaaacagggagaagtcgtccttcagactcaccatcctgaccatccgcttttgcaggtattgctggaaaaaggctagacgcatttgcccgacaagcaatagaagaacgccagcaggttcttctgcccccttttgtcagccatatcatgctacgatcagaagatcacgataatcagcagtctcctgcttttttacagcaaatgcgccaactacttgaacaacaccccctgtataatgaccagctctggattatgggccctgttcccgccttacaggcaaaacgcagtggtcgttatcgctggcaattactggtgcagcatccttcgcgtatttatctccagaaaatgatgactgaggtctatccgggcattacagcactgcctctggcacgtaaagtaaaatggaatattgatgtcgatccgactgaaggctaataaaaattcaaaactaagcagaaccccatgaaaaacagtgaaacttatttccttaatttgcgaagcagctctaagaaatgatgcgtatcacattttttatgcaaacaaagtaacggcttgaactgttaatctgtttaaaatggatttattaatatgactgtagaaaacgaatccgccagcgtttccccacagaaatggctggcgtttttttactttcgttttttgacattaacttttttaactttgcggatagcaatcgtttcactgcctgtagaaagcgaggagtggctatggaaaaaaagaattgtgcattggcgacaatgaaagatgtagccaaagtagcgggtgtttctaccgcaactgtatcaagaacgctaatgaatcctgataaagtttctgcgcacacccgccaaaaagtagaaaatgcagtattggaagtgggttactatccccataatctcgcgaaaaatttaaggcggaatgaatccagagcaattctggtcattgttcctaatatctgcgaccctttcttcaatgaaattattcgtggcattgaagaggccgcagcacaacatggttatctggttctgattggtgactgtaaacaccagcaacagcaggaacatgcctttattaacctgcttatcaccaaacgtattgatggcatgatactgctcggttcaaacattccattcgatgtttccaaagaagaacagaaaaatatgcctcctatggtgatggccaacgaatttgcacctgagctggaacttccaaccgtccacattgataacctgacctctgctttcaatgccacacaccacctgcaaacactgggccataagcgcatcgcctgtatcaccggcccagaatcaatgcccctgtgccaataccggcttcagggttacattcaggcattacgccgcgccgggctgcctatccgggatgaatacattatcagaggcgatttcacccatgagagtggcgctgaattagcggaaaagctgctcattctagcaaatccacccagtgctattttctgccatagtgatgtcatggccatcggggcaatgtggcaagctaaaaaaatggggttaaaattaccagaagatctttccattattggttttgataatatcagcacagcgcaatatagcgatccccctctgacaaccgtggcacagccatgttatgaaattgggcataactcaatgcttttgttgctggaacagcttcagggccgtatggtttcgaaaggttcacgattactggatgcagaacttcttattcgaggaagtacttgctcgcctaaaagctaggcaaagaaaggcatgttcagtaacattaggtatctattccttaatttttttataactcagcgaattaaatacagtggcacaacgagattatgtgggtcgcgggcattctaatccccgcaagaaaggttctggtaagaaaaaaaatcaggctaaagggctgcctaaaacactattagtcattgctgtagctctggtcgtcacatttattggcgggctttatttcatcgtacacactaaacacgaaagtgaaaaaaatataccgacagttgctcaccagcctaaaggccatagtctgccaccaaaaccagaggaacgctggagctatattaaggagctggaaaaccggcctgtaggtctgccatcaattcaggatccatcgctaacaacaggccagccaaacaaccggccagcggaactgaccccagagcagcgccagttacttgaacagatgcaggccgacatgcgccagacgcctgtccaattgactgaagtcccctataacagcgagccagtacctcgctcacgtgtgattatcaatccaccgtcacaacagccgccttcagaatacgcgccacagcaaaataagccgtcagtgccactacagtcgcctcaggctcaggtacctcagtcgcaagcatccaatgaaaccactaagcccaagacagagacgaatggttcccgaataatgttacaatgcggttcgttccgtacgatggaacaggcggaatctgtccgtgccaaccttgcgctggcaggtattgagagtaagatcacaaccaaggacagttggaatcgggtggtattagggccgtataaaaacagagaaagtgcagaaaaaatgcacagacgtgtgactaatacaggtattcccagctgtattctccgccctgccgggggttgaaaaaccaaaaagttcccccatcttgatgtctaataacgtgcacacgctgtttttgataaacaatgtggcttacagccaaggtcttggtaagcaaaagtatcgtgtgtaccatcttctattttgtaaccaggggctaactcgtgactacaatcgtaagtgttcgccgtaatggccaggtcgtcatcggtggtgatggacaagcaacaatgggccataccgttatgaaaggcaatgtccgtaaggtacgccgcctttataatgacaaggttatcgcgggttttgccggcggtaccgctgatgccttcaccctgttcgaactgtttgaacgcaaactggaaatgcatcagggccacctgaccaaagctgctgttgaacttgcaaaagattggcggacagacagaatgctccgtaagctggaagccctgcttgctgttgcagatgaaaatgcatctctgattattacaggtaatggtgacgtgattcagccagaaaatgatctcatcgctattggctccggtggttcatatgcacaggcagctgcgcgcgcaatgctggaaaccactgaactcagtgcccgggaaatcgcagaacgcgccctgactatcgctggcgatatctgtatctacaccaaccaaaatcataacttcgaagaactgccttcaaaagcgtaaggatagatagcatgtctgaaatgactcctcgcgaaattgtcagcgaacttgacaaccacatcatcggtcaggataaagcaaagcgtgctgttgccatcgctctgcgtaaccgctggcgtcgtatgcagttggatgaatcactgcgttatgaagtgactccgaaaaatattctgatgattggcccaactggtgtaggtaaaaccgaaatcgcccgtcgtctggctaaactggccaatgcaccttttatcaaagtggaagcaacaaaattcactgaagtgggttatgtcggtaaggaagttgattccatcatccgcgatctgactgatgcggcagtaaaaatggtacgcttgcaatccattgagaaaaaccgctatcgcgctgaagaactggcagaagaacgtattctggatgttctgttaccaccagcgaaaaacaactgggggcaagctgaagagcaaccagaacaatcctctacccgtcaggcattccgcaagaaactgcgtgaaggtcagctggatgagaaagagatcgaaatcgaagtggcagctgccccggttggtgttgagatcatggctcctcctggcatggaagaaatgaccaaccagttgcagtctatgttccagaatctgtctggtcagcgtcaaaaaagccgtaagatgaagatcaaagacgcattcaagctgctggtggaagaagaagctgcgaagctggtgaaccctgaagagctgaaacagcaggcaattgatgctgttgaacagcacggtatcgtctttattgatgaaatcgataaaatttgtaaacgcggtcaaacctccggcccggatgtttcccgtgaaggtgtccagcgtgacctgctgccactggttgaaggctgtaccgtttccaccaaacatggcatggtaaaaactgaccatattctgttcattgcttccggcgcatttcaggtttccagcccttccgatttgatcccggaactacagggtcgtctgcctatccgcgtagaactggaagcattgactactgaagattttgaacgcatcctgactgaaccaaatgcttcactgacagaacagtacaaggcattaatggcaacagaaggcatgcacattgaatttaccactgatggtattcgcaaaatcgcagaagcagcatggcaggttaatgaaacaaccgaaaatattggtgcccgccgcctgcatactgttcttgagcgcatgatggaagatatctctttcgacgccagtgaatctcagggtcagtcagttgaaatcaacgctgactacgtcaaatcacacttagacgaactggtcgctgatgaagatctgagtcgattcatcctgtaattgatctggatcctgcttagtaacagtaaaaatggaatgggaggcttgcctcccatttctctattctgcttaaatcaaaatttatcacatatgacatatttgatgacaatatgaactcaacaacgacaagcagtcaaatgcaggcatggctggaaagtttgcgtcctaaaaccctcccgttggcaatagcggcaattatgacaggttcagcccttgcttcctggaccggtcattttagctggcctgtggcattattagccttcctgacagcctccctgctgcaaattctgtctaaccttgctaatgattatggtgacgtcgccaaaggcagtgataccgaaaagcgtatcggcccaatgcggggtatgcagaagggtctgattacagcccaacaaatgaaaaccgcgttaaaaattaccgtgctgctctcctgtttgtcaggcattgctcttatcgccgcagcctgtcataaccttggcgatattatcggttttctgggattaggtttactggcaattattgcagccattacttataccgttggcgccaaaccttatggctatatggggctgggtgacctttctgtcctgatattctttggctggctcagtgttcttggcacgtattatttacaggcccagactttttccttaagtaccgttctgccagcaacggcctgtggtttactctctgtagctgtgctgaatattaataacctgcgggatatcgaaacagacagccagaatggaaaaaatacactggcagtcaggctcggtggcaaaaaagcacgctattatcatgcagccctgctcacaggggctatgtcctgctttatcgcctttacacttctgtacctgaacaacagcgggtatagctggttatttctgctggccttccccatgctactgaagcatgtactacaggtactgcgcgatccaacagccgaaggtatgcgtcctcaattagtacagatggtcaaagtggcactcctgaccaatatcctgttttcgattgggctgatacttaattaagcgagtacatatcaattttatcctcacgttttaagattgatgattttgccaacgctagtcttaaaaggatatactgtccgttccttgcataaaccagacgtaaatcccatgaaatatgatacttccgaactttgtgatacctatcaagaagatgtgaatgtggtagaaccattattttctaactttggtgggcgtacttcatttggtggtcaaatcatcacggtgaaatgttttgaagacaacgggctgctctatgacttgctggaagagccaggacgcgggcgcattttactggttgatggtggcggatcggtacgcaaggccctgctcgatgccgagctggcccagcttgctgtcaataacgaatgggaaggtatcgtcatttatggcgctgtgcgtcaggtagattaccttgctgaatttgatattggtattcaggcgatggcagcaattcctgctggctccagcagtgaaggcatcggggacagcgatatcagagtgaattttggcggagtgactttcttttccggtgattatctttatgcagacaacactggaatgattttgtcagaagttccgctggaaatagatggggatgaagataatgatgaagtgtcataacttataacccagccatcactccttaccattgataaaaaagggcgcagtaattatcgccctttttttgcaaaataatttctgcaaaactatctttcggtaaagccagcggatactttattgcacgtcttccattttacccaacaaggtacgtaagcgttcttgccatgctgattgttcttgtttgagctgctcattttcacgtaccagtgaatcacggctgtctgtcgcattctggacatcctgagataacactgcgttctgttcttttaattcttcaatttccatttgcagcaaagtaatggtatcaattgcctgctgaactttagattccagcttttcaaaaacttcaaatgacattctcgagcccctcttataagcaatgccttgattgtatttagcctgttaacgactgtctagtttcatacttctaatgtgtggcatatacccttcatcttgcgagcgacctccttatttatgacatgaggtaacccgaaatttaccgggtatgacgagaaatatagtgactaatcctaaatgaagataagatcacattttaacgatgaataaaaccccaattaaatgcgaattcgctcattttgttgacgcaacacgcagatttcaatttcgctatttctcgtttccgctcattaacgataaattcacaccacctttctctgcgtaatcagaacgcagcaagaaaggactaataattaatctcctctctgtactttttataggatatagaaatgggccagaccaccactccaacattatcaggtcaatgtatttcagagtttctgggtacagcattgcttgttttcttcggcttaggctgtgttgctgctgcacgtcttgcaggtgcacaacttggactatgggaaatcagcattatctggggctttggtgttgccctggctgtttaccttactgccggcatttctggtgctcaccttaatcccgcagtaactattgctctatgcctatttgccagttttgacagaaaaaaagtactcccttacatcattgcccaaatgctaggcggttttgtcgccgcagctcttgtctatatgatgtattacaaccttttccttgattatgagcaagttcacaacattgctcgtgggtcgcaagaaagtcttttcacggctggcgtcttttccacttaccctgcaacacaaatatccgtattccatgcatttattgttgaagttatcatcgcggctgttttgctttgcctgatactggctctgacagacgacggcaacggtattccacgtggccctttggcaccattgattatcggtattctgattgccgttatcggcggttcttttggtcctctgaccggatttgcactgaatcctgctcgtgattttggacctaaattagttgcttattttgccggatggggaaatattgctctgaccggaggtcgggacatcccttatttccttgttccattggtagcccctattattggcgccattctgggtgcatttggttaccgcaaattaatttcccgccatttaccacgtgaaaattagttttgcctatatttagagatgataacagattaaaaaataaaaaattattaaataagaccaggttatagttatgacaacagaaaatatcactgataaaaaatatatcgttgcgctggatcagggaacaaccagctcaagggcggtgattcttgatcacgatgccaatattgtcagtatttcacaacgtgaatttccgcaaatataccctaaaccaggctgggtggaacatgatccgatggaaatctgggccagccaaagctcaacgctggttgaggtattggcaaaagccgatattcgctcagaccaaattgccagtatcgggatcacgaatcaacgggaaacaacgattgtctgggaaaaagagacaggtaaacccgtttacaatgccattgtatggcaatgtcgccgaaccgcagatatctgtacccgcctgaagaaaaaagaaggtctggaagagtatatccgtcataacactggtctggttatcgacccttatttttccggaacaaaaataaaatggattctggataacgttgagggtgtccgccaacgtgctgaaaatggtgaactgctgtttggtaccgttgatacctggctggtctggaaaatgacacaaggtcgcgtacatattaccgactataccaacgcttcccgcactatgctgtttaacatccatgacctcgactgggatcagaagatccttgatgaactggatattcctcgcgtgatgctgccaaaagttgcggcctcctctgcaatttatggtcagactaatatcggtggtaaaggcggtactcgtattcctattgcaggtatcgcaggcgatcagcaagccgcactgtacggccagctatgtgtccatccgggcatggcaaaaaatacttatggcactggctgcttcctgctgatgaataccggcaccgatgcagtacgctccagccacggtttgctgaccacgatagcctgtggcccacggggagaagtgaattatgctctggaaggtgccgtgtttgtgggaggagcctcaatccagtggctgcgtgatgaactgaaactcatcgctgatgcagcagactccgaatacttcgccacaaaagtacaagacagcaatggcgtttatgttgttccggcctttaccgggcttggtgcgccttattgggacccgtacgcccgtggtgccatttttgggctgacccgcggagcaaacagcaaccacattatccgagcaacgcttgaatcaatcgcttaccagacccgtgacgtactggatgcaatgcaggctgattccggcgcacgtttacaggcgctgcgcgtagacggtggagcggtcgcgaataatttcctgatgcagttccagtctgacatcctcggcactcgtgtagagcgccctgaagtccgtgaaagtactgcattaggtgcggcattccttgctggtctggctgtcggcttctggaaggatcttgatgaagtgaaaagtaaagcgaccatcgaaaaagaattccgccctggcatagaaaccacagagcgtaaccacaaatacaatggctggaaaaaagctgttgcccgtgctcaggaatgggaagaccgcgcttaaaaagcgcatatatgcgaaagctctgacaaattagcgtcagagctttttagtatccgataattcaatgaatatctcagacagtacgttcctgttgctggatcctctgagagattggcagccaacacaataaaataagtaacgccatacagaacatcagcatacccacgctgaattggctattttgtggcagcatcgccgataaccatgtagccacgccagaacctacattctgtaacccacccaccagcgcacctgccgctccagccagataagggaagggttccatagcacccgtcgtcgccagcggaaataacatacccgccccaaaaaagaacagcgcagccggaagcaacaacgtccagacattcataatgctgaaccagccgggcagccacatcagcgtccccgccaacagacagcaaataaccgcattccacaccagctgataaaacgttttgttttcacgccctgcataccatgcccccagaaatgcagcaggaataggcagaataaacaaaatactgactgttaaactatccagccctaaaacagcgccgagcaaaactccacagctagcttcaaacacagccactcccgccagaccgccaatcagcataatcagataagaaacaaaaatgccattggatagcagctgatggaaagaaaccagcattgtgctctgcgttgtctgctccggacgggtttccgggaaatgccggaataaaaacaggatcacgcctgaacccagcaacaataaaaaccaataacaggcacgccagccaaaataatggcccacgacaccaccaatcatcggtgctaataacgggctgaccagtatcgccatattcaacagactattggcacaacgcagtgatgctccagtgtataaatctcttggcacagtacgtatcattacgcctgcaactcccgttcccagcccctgaaatacactgactatcaccaatgccaataaactggaagaaaacagtgcacatatcgtagcaaccagaaaaactgacattcctgccaaaatcacggggcgacgaccgactttatccgacagtggcccataaaagagctgtgaaaacccataagcaaacaaataggccgccataacccgttgaacttccccagccggcttgccgaagctattcgctatatcagcaatcaccggaacataaattgtctgagtcatctgcccaacagcggctaacgcaattaacatcagcaataaattgaaatgtgctatttttctcatcgcatttacatacaattttatttaagcaaaatataccgcctgattaaggtacattccctatcaatcagatgggtataacggcaacaaagaagccctcaggttattaatgaacaaacctgactacagacttcactggattaaattttcccgagcaatgtatattttttatcggcagtatacaattttacatgaggaaaaaattgcagtcatattaccctataatgtcaataaaagtgtacatatccatcttaaaatacaacgaaaatacagttaattagactgcaacacgtaatcgataagcctatttccctcaatcgcgtagaatcaccagttgataagtcactcacttcgtacaatttcattctgtaaaattttatttcgtataattttctttcgtaatagtgcagagaggctaaatgcaatggcaaactgggttacaggaaaagtcactgacgtcaccaattggacagattcactattcagtatcaagctacatgcaccaatagaaaaatttactgctggccaatttgcaaaacttgctctcgaaattgaagaggaacgtatccagcgggcctattcttatatcaacgctcccaatgacaatagtcttgagttttatttagtcactgtaccgaatggaaaactcagccctcagcttgccactttgcaggtcggtgatgaagttctggtgacagaacaggcagccggtttttttgttcttgatgaaatccctgattgccaaaacctctggatgctctcaaccggaacaggtatagggccttatctttccattctccagcagggaagtgatttggagcggtttgaaaatattatcttagttcatgcggtcaggctggagcaggatttaagttatttgcctctcatgcggcaactggaaaaaacgtttcaggggaaattgcggatccagaccatcgttagccgggaacaatgccagaattcgctaatggggagaattccggcactgattgaaaatggtgaactggaatccgctatcggcttatcaatgcaggcagaaaacagccacgtgatgttatgcggaaacccccagatggtcagggatacccaacagttgcttaaagaacaacgtggcatgacaaagcacctgcgccgtaggccgggatgcgtgaccagtgaacaatactggtgatttatataaataactcatcaagttaaatattgttattcagcgttctttttggcagagatgtactcaaccatttctgccgattcaccaaaacggtttgcaccttccgtaccccggaatactccgcagtccagtatgatcatgacaaaaatcagtgtcgggataaaacggccaattccccactgccatatgggcgctaacatattccagtcgagagagagcaaaaaccaggccaatatcagcaataacgcccatcctccgcgtttattgcgatcatgcaggcgcttcgaaaaaatcgccgctgtcggatacaatatcagtgccgtgcatactgccgcaaaattcatggggagaacattcattccatgcagcgtgaggagaataaaaatcagagcaaaacagataccaattccgatccagaactcccgtcgcccgatgcgacctttgaatgaaaatccccattgttgtaatgtcatgtattctttcccaattgtggatactgtttttctgccattgacactttttccgcgacttacattcggcgagtaacaacatgaaaacaggcataaataaacttctgctgacaatattaatcgcttttggtatcggtttaccattctcaggcactgcaggtgagccttctgtcacaccagatctgcgcccacagttaatgtatctcctgcctgattccccgacttttgaagacaatatcccgaccttccgggaaaaatacaataaaagtcatcctgatattctgctgcacgaatataaagttattacgagcaccgatatctctctgccttttatccgtgctgccagcaagatcaacgaaaaaatctactcttccgccgtactggaaagaggcagtgaaaaaattaaaagtctgcaaattacattgctgccatcccaactcacacaggaaaaagaacaaaacctgctcctgacgaaaaagtatatcgccgccataacccgccagtttgaacccacactttctctggagcaggctcagacacaaacagagaaactttttaagatggcggaaacacaacctttttacagcctaaaaatcggggcgatacgctatatcatcgtaaacagcagcgaaaatataatgaccttcgctattgaaccgattaagctatcactatctgacgtaccagcaaatgaaaattagtgacatagcgcagagctattcgagccgatgatctttatactgtcggccttgcatttatataccctatggatttcgagttgcatcgaggcggcaagggagcaaattcccgggagcatagataactatgtgaccggagtgagcgagcgcagccaacaaagaggcaacttgaaagacgacgggtatagagaatggcgtatcgctactcacgaaagcacattcatttagttcgcaatttgattatttttctggttggagggaaaaacatgcgacatccattagttatgggtaactggaaactcaatggcagtacccacacggttaacgacctgattgcaggcctgcgtaaagaactgagcaacgttgacggctgtggcgtcgctattgcaccaccaactgtttatgtcactctggcaaataatgccctggctggtagccgtatcgctctgggcgcacaagatgtaggcattaacctttccggcgcatatacaggcgaaacatccgcagaaatgctgaaagatgtaggcgcaaaatatatcattatcggtcactccgaacgccgtacttaccacaaagaaagcgacgagttcattgcgaaaaaattcgctatcctgaaagaacaggggcttattccggttctgtgtatcggcgaaactgaacaagaaaacgaagcaggccagacagaagccgtctgcgcgcgccagattgatgccgttctgaacacactgggcgcagaagcgtttaaaaacaccgttattgcttacgaacctgtctgggccatcggcaccggaaaatccgctactcctgcacaagcacaggctgttcacaaattcattcgtgatcacattgctaaacaggatgcggctatcgctgagcaagtcattattcaatacggtggctctgttaacgccagcaacgcagcagaattgtttactcagccagacatcgatggtgctctggttggcggagcatcactgaaagctgatgcatttgccgttatcgtaaaagcagcagctgaagcgaaaaaagcctaagagcttacaaagataatcgccaccgcagaatgccgtggcgattatccttttcttacctgtcagttaacggcgaataatctcatcaaataccccacctgtggcaaagtgttctttctgcgctttttcccagccaccaaatacgccatcaactgtgaataacttcagctcaggaaaaacagcacggtacttttcgataatcgttttatcacgaggacgataatagttttttgcagcaatttcctgtccgaccggtgaatacagatatttcaggtattctgttgccagctcacgcgtgcctcgcttatcgacaactttatcgactaccgctacagttggctctgccagaatagacatacccggagtgacaatttcaaattgccctttcccctgctctccgttatccaaagtatgaattgccagtaatgcttcattttcccatgcaatcaacacatccccaatcccacgctcaacaaatgtattcgttgcgccacgagcacctgagtctaagacttcaacatttttatacagcgccttcacgaaggcttttgccttcgactggtcctgattgttatgagccagcgcatatccccaggcagccagataattccagcgtgcacctccggatgttttaggatttggggtcacaatcgaaacatcaggccggatcaaatctgaccagtctttgatatgtttagggtttccctttcttaccagaaacacaatggttgatgtgtaaggcgctgaattatcgggtaagcggtgaagccaatttttggcaatccggccacgctctgcaatcgcatccacatcataggccagagccagtgtcaccacatcggcctgaagaccattgataactgaagttgcctgtttgccagaaccaccgtgtgattgccggattgtgacccgatctccggttttctgctgccagtattggctgaatgcctgattatattgctgatataactcacgtgtcggatcataagaaacattcaggagctgtaaatctttcgcccaggcatttcctccgatcagaataaccagcaatagcaccattaagggggaataccggcttattctccattttatcctcttccatttcataggcgtaatcatcggaaatgctctcctcaatattggatatgattttcatcgtaaaattgacagaaagcgttatgccgcagaaataattttaaatttccacttattcattatgggaatatggcgtataaaaaggagagagataaaaagaaaaacagccatataaatatcatatggctgtatctgaaaaatgctcttatggaagttagtaaagtttcttcgctgtttctaaccaatctttcttgaagatacgctgcatattctgcaccgcatcaataatgtcatggtggacaagtttttcgttctggataccaacacaacggccgccgcacccttccagcaacagctgaacagaatacgcccccatgcgtgatgccagaatacggtcataagccactggcgcaccaccacgctgaatatgacctaataccgttgcccgcgtttcgtggcgtgtttccgcttcaatatattttgccagctcatcaacatcacagacatgctcagtaatcgcaacaatggcatgacgcttgcctttctggatgcccgcttgaatttcagctaacaattcttcgcgatcaaacggaatttcacgttcaggcagcacgataaactcacatccacctgcaattgccgcagacaacgtcaaatcaccgcagtaacgtcccatcacttcaacaatagaaatacgcttgtgggaggttgaggtatcgcgcagacggtcaatagcttcaacaaccgtatccagcgctgtaaaataaccgattgtgtaatctgttcccgcaacatcattatcaatcgtaccgggcaggccaatgcaggggaaacccgcctcagtcagttttttcgctcccagataagaaccatcaccaccaattaccaccagcgcatcaatttcattcttacgcatgttttcgatagcaatttcacgcactttatcatccctgaactcaggaaaacgtgcggaacctaaaaacgtgccgccacggttaatcatgtcggaaacactgtagcggtcgagctttttcatcctgttttcatacagccccagatagccatcataaataccataaacctctaacccttcggttaaagcggcacgaacaactccacgaatagcggcgttcatacccggtgcatctccaccgcttgttaagactccgattcttttaatcttgttgatcatgatgacctctgacttatagatgtaatatttgcctaatctgctgactgcccttccaaaagggaaggttcacgacgattatttcactcaacttttggttgccaattcattagctgaattgattcaaccgcacccatgatacggaaaaacattcagtctgcatcaatcttttgtctactttttgacattattttgattatgaataaattcttttatcaatcccaattgtttttacgttcatcgggaacaactgagcagggatcctgatggataataatatcggcaccgggaaacctatcacgcaatttattttcaattccttcggctaaagcatgagcctgtaccaacggtaaattatcatctatttcaagatgaaactgaataaacctcgtcggacccgattgacgggtgcgcagatcatgcccaccggaaacaccggggtaatttctgataatctctataatctcctgccgttcctcatctggcaaggcacgatccagtaaagactggatcgcatcgtatcccattcttaacgcgctatagagaatatacacaccaattcccaacgcgaataaagcgtctgcacgtcggaacccgtagacactcaaaaccaatgccaccaaaatcgcgccattcattaataaatcagatttgtaatgcaacatatcggcacgaatggcctgactttgagttttattaatcacccatttctgaaaaataaccagacagcttgttgaaacaatggcaatgatgattacccaaacacccacagcggcatgctctaaaggctggggagaaaataaatgctgaaagccggtcaaaaacagaaaaatcgctgagccggaaacaaacatactttgggcaagagcagccagtgactcggccttaccatgcccaaaagtatgttcttcatccgcgggctggagggaataacgcacgacaaaaaaattagtcagagaagcagccaagtcgaccagagaatctaccagtgccgccaataaactcaccgagccggtaaaccaccaggccaaaattttcacgactaacaatacactggccagtattgtcgccaccagtgcagcagtactgacccatcggccataattcatacccatattcacagccctcagagttattcaggatggtctgtatcaagtataaaaatagcgcgttaaatggaaaaatataggggcagaaaagcaaagagaatcgattctgtccaacataccgccgtgaccttcaataatctcaccaaaatcttttacgccgctgtcacgtttgatcgctgacatacacagcccaccgatgaaccccatcaaggtaatagccagtgacatccctcctgctacccacggagaaaatggcgttatccaatacagcgagattcccagcaataccgaagctaagataccgccgataaacccttcaaccgttttattcgggcttaatttcggtacaatcggtcgcttgccgaataatttaccaaacacatactgcaaaacgtcagacatttgcgccacaatcatcaaaaacagcaatagcttaatattctgcccctgatattccgctatatctaacatcaacaaagccggtgcatggctaatggcaaacaccgttaccagcattccccactgtatttttgcggtacgttccagaaagtgagttgtatcaccgaccaaagcaatacgggccggtaaaaacagaaaaacataaacggggataaacaccgaaaacagcccgtaccactgcattccaactaacacatactgaaccggcagaaaaccaaagaaacaccagaacagagcctcatggtcactacgacgagtcggggtgagagtgataaattcacgcagggcaaaaaaggacaataacagaaa

SEQ ID NO: 459 - DNA, 39957 bp, Xenorhabdus sp.; identical to SEQ ID NO: 345
  CDS (36724)..(37653)

SEQ ID NO: 460 - DNA, 8148 bp, Xenorhabdus sp.
  CDS (4112)..(4501)
gtgttcagccgtcgccgcaaatccggcctcggcaatagaggttgcgttaatggcctgattacgcgtaaaccgataagcggcttcaatatccgctggggttttgagtgattgcacaatagattgcccgatatgattggctaacgaggcggtgaatttgataagccgttttgtacgccgactatcgcccaaatttgcgcgagaaaaagtttcatcagcccattgttctgcgtgagtttggaacattttaccgtacctcaatgaaatcgttattactcagatcggtaaagtggaaaaagattcaaaaaatcccccgattttttatcgggggatttgtgtatgaaagacaggtctgtggacaggggagaaactgtattattctttcactgggatagctttcaggatagctgtcaataattgccagtactggccaacactcttaatgtgaaccctttcatcaggtgagtgggcaccacggatagttgggccaatggaaaccatatccatatcagggtagggttttttaaataatccacattccagacctgcatgaattaccataatgtttggtgtgctgtcgaacagctgatgataagtttcacgcactaagtgcattaccggagaatcggcatccggttgccagccagggtagtcaccacttgctgttgcttctgcgccggaaagtttggccagagagttgagcatcccgacaacataagccttaccactttcaatcaatgaacggataaggcagataacctcgacgtggtcttcttccatattgacaacacccacattcagggatgtttctacaacaccttttgcaacatcactcatgcgaataacaccattaggcattgtattcagcatagcgataaagcgggactgacaatctgccgttaatgcctgtgatgaggttttgacgtcatccaacaaaagagtcaggttagtttcagcgaccgcatattcgttcttcagtatttccagataattatcttttacctgatgtagttttggcagctgagctgttgggacggcaatgatagtagaaccttcacgagggattgcattacgcagagtaccaccctgtaaatggatcagtttcagctccagttcatcactgtattcagcaaggaaacgggccagtaatttattggcattacctaatcccagatggatatcaccaccggaatgaccaccttttaatcctttaatggtcagttgtagtgtttgatagtttgcaggtagaggttcgcgggaaagtggtagtgttgaaacataatctaccccaccggcacaacccatatagatttcgccttcttcttctgaatcggtattgatcagaatatcagcctgcaaccagcccggttgaagaccaaatgcgccatccatacccgcttcttcagtcattgtcagtaacacttccagagggccgtgtttgacagattcatcggccagtactgccagcgcggaagccataccaataccattatctgcgcccagtgttgtaccttctgcggttatccagtcaccatcaatgtaaggacgaataggatctttcgcgaaatcatgctgtgtatcattgttcttttgcggaaccatatcaagatgagcctgaagtacgaccgctttacggtcttccatgccttttgtggccggttttcttatcagaatattaccgacttcatcacgttcaacatggaggtttttatcctcagcccattcaatgatgtgagaagcaagttcttcctcatgataggatggatgtggaatggagcaaattttagcaaaaatatcccataatggttggggggataatgttgataattcggacacggcgaatctcctgtaacttcatcttgatgaaatataagtgtaatgtttgacatctcggggggctttgtcatcttgagctgcccagtgtctatgttatgcctgagaataccattttctgattagtaatgcgctttcaggatcaggatgttccttgtttttgctggtttttgcgggctcaaatcactataatcccgcgcaacctttattccgcaacaaactcttttctgaaaatattcttagtttccaggatcaaattttatgagcgaaaaatatgtcgtaacgtgggatatgttgcaaatacatgcccgtaaactggcgcagcgtttacttcctgtagagcaatggaaaggcattattgctgtaagtcgtggaggtcttgtgccgggtgccttgctggcccgtgagctgggtatccgccatgttgatacagtctgtatttccagctatgaccacaataatcagcgtgaattaacagtgctgaagaaagccgaaggagatggcgaaggctttatcgttgttgatgatttggttgataccggcggcactgctcaggcaattcgtgaaatgtatccaaaagcgcattttgtgacgatctttgccaaaccagcaggtcgtccgttagtagatgattatgtgattgatatcccacagaatacatggattgaacagccgtgggatatgggcgtaatgttcgtaccacctatttgcgatcagtaattattcccttcatttttccagttatttctttgctggttgctttgctttacataattacgccccagtcacatagttatctatgccactggggattttaatgagagaggctcttgcttctcaccggaggccagcctttggctgagcaaattcgttccgacgaatctggtattcttttattatcgcaatgcagctcagaatttattggatatcttgtaataagcagtaataaatttctttgtcatgactaaacagaacctttcagaatcactgtttaaaccgcaggttaaacagcaggaaacgtctacactggtaaaatacgttttgccatcatcagctcatgctgataataaaatgctcggtggcgaacatcaggaacgctggtatcgcatgattaactggcttgcctggatctggaggggcatcaatccgctggagattcaggaaatcctcagcaggattgctgtaacagatgctgaacgcagttatgaccatctattggatacggtaattggttatcgcaaagggaactgggtatatgaatggtctcagcaggctatgctctggcaacagaaagcacaacatgttgagcagtcgtctgaagccagtcagtgctggttaagagcttcaatgttatacagcattgccgcctatcctcatctgcacggtgatgagctggctgatcaggcggttgttctggctaataaagcctatgaaaatgcagcacatttctctgactatcaactgaaaaaactgaaatttcagctggaagatggcaaaactgttaccggtttactgcatattcctcccggagttcaggaaccatgcccaacaatactggtttgctctggtattgatagcctgcaaagtgattgctggcgactgtttcgggatcatttcttaccacagggttttgcgatgctaacggtggatatgccttccgtaggttattcagcgagatttacgctgacacaggatacctgcgctctccatcagcaggtattgcagcaattggatagcatcccgtggatcgatcacacaagaataggtatttttggtttccgtttcggcgccaatattgccgttcgtcttgcctatctggaatccagtcttattaagggtgtggcagtggtcagcccggttgttcatgaattgctgcataatgagagattgcagcagaaaattccgtcaatgtatatcgatatactcgccagtcgtttgggtatctatcatgtggatgaagcagttttgcgttcagaactgaattgttattcattaaaaaatcagggattactgggtcgtcgttgttctgtgccaatgttctcagtgtattggaaagatgacatttttagcccggcggaagattcaaaactgattgccagatcttcgctggatggctctttattagctattcctgctatgcctgcttatagtggtttcagtaaggcattacacgcagcaagtgtatggttgaaagataaagttaactaaactgaaatttaatcattgatattttttaatcatttgatacaactgttcttctgtttataaaggagacctttgtatgactgtacccgtaaattattccagaaataagttgttgaagagtttttctgcattagggccttatttacgcgaattaaaatgccaaaatgactatttcttctttgattgtctggcggtctgcgttagtgcgaaagcagcgccagaaaaacgggagttctggggctggtggttagaattggaacgacaggaaaaagggttcgtttataattatcagataggtctgtttgataaacatggtgagtggctgcctatgaatatcaaaaaagaagcagatctcaggcagcttgaattgacattacaggcatttcatcaacgcctgtctgattctttgggtaaccttaaactcacgcttagcccatctgaaaataccttcaccccacaaaattaagtctattaaccgggtttattttatccctgccagattttaagttgcagccttactggctgcgctgtttttttggatagctacacccccggctagagagttgtctgtgttgccggggtgtgctgatactttcctgcctatcaccagaggccggattttggctgtatcttgaaattggcagggtataaatcaactttttttgaattttgtgttatgccagttggcataatgcttctctcctgctaaaactgagcactgttttttgaatgtgttttgaatttattgttttttcaaattagctttttcaaattaataatggcagaaatatgatgaatggccgacaaacattggttgtgaaactgggaacgagtgtactgacagggggttcccgccgtttgaatcgtgctcacatagtagagttggttcggcaatgtgcgcagttacacgagaaaggtcaccgtattattattgtgacttccggtgcaattgcagcaggtcgggaacacttgggttatccggatcttccggcaaccattgcttcaaagcaattgcttgcagccgtagggcaaagccgcctgattcagctatgggagcaacttttctccatctatggcatccatgttgggcagatgttactgactcgtgccgatctggaagatcgcgaacgtttcctgaatgcaagggatacgttgcatgcactgcttgataatcacattattccgattatcaatgaaaatgatgcggtagcaacggcggaaattaaagtcggtgataacgataatctttctgcactggcggcaattctgggcactgctgataagttattgctcctgaccgatattgaaggtctgtatactgctgatccccgtaataatcctgatgctaaacttatccgtgaagtacacgatattagcgatgaactcaaaatgatggccggagacagtgtatcaggtctcggaacgggagggatggcaacaaaacttcaggcggcagggatagctggtcgtgccggcattgatgtcatcatcgctgccggtaacagaaaaaatgtgattgctgatgtgattgaagaaaaatcagtaggaccccgttttcatggtttaaccagcccgatggaaaatcgcaaacgctggattttcggtgctccttctgcgggcgaaattattgtcgatgatggtgcagaagcggctattctcgcaaaaggcagctctttactgccgaaaggtattaaaagtattacaggcgacttttcccgtggtgaagtggttcgcatctgtagtttatccggtaagaaactggctcacggtgtatgccgttacaacagtgatgctttacgcctgattgcaggccgtcactcacaggaaatcagccagatattaggttatgaatatggtgcagttgctgtgcatcgtgatgatatgatcgtaagttaaggattccaccatgctagagcagatgggaaaagcagccaaggcagcatcatggcaactggctcaattaagtactagtcagaaaaatcaggctctgagtcacattgctgatttacttgaaaaagaagcacaagtgatcctcacagccaatcagcaggatatggaacaagcccgtaaacagggtatgaatgaagcattacttgatcgcttattactgactccggagcgtttgagtgcgattgctaatgacgtccgtcaggtttgccgtctggctgatcctgtcggtcaagtgatggacggacaattattggatagcgggttgcaactgagtcgtcgccgtgttcctcttggggtaattggggtaatttatgaagcccgccctaacgttacgattgatgtcgcatcactgtgtctgaaaacagggaatgcagtgatattacgtggtggtaaggaaactcatcataccaatcaggcaatggttaaagtcattcagcagtcgctggaacaaagtggcttgccagcctcagcagtacaggcaattaataaaccagatcgtgagctggttgccgaaatgctgaaaatggatcgctatatcgatatgttgatcccgcgtggtggtgccgggttgcataaactttgccgtgagcagtccactattccggtaatcaccggaggaattggcgtttgtcatacgtttgtggatgagcatgtgaattttgaaaaagcactggaagttatcactaatgctaaaattcagcgcccaagcgcatgtaatgcattggaaactttgctcgtacatgaaaaaatagccgctgatttcctgccggaactgagtgccagaatgaaagcgcagggcgtaacactgcatgcaggtgcgtcagcaatggcactgttgcaggatggcccggcaaaagtggttgccgtgacagaagaagactattgtgatgaatggctttctttggacatgaatgtggaaattgtcagcaatattgataaagcgattgagcatatacgtcattatggtacagcccattcggatgctattctgacggagtgtttacaacatgctgattattttgttcatcgtgttgactcttcggcggtatatgtaaatgcaagcacacgctttactgatggtggccagtttggtttaggagcggaagttgctgtcagtactcagaaactacactccagaggcccaatgggtctggatgctctgacgacttacaaatggatgtggttacggagattacctttcccgtcgataatgacaatattcattttaagtaatatttaatcagagtaagtcacacttaatgtaaagtgtggctttttatatacaagaacatatattttttacataggtgtaaatgtttagttactatactttgtatttaggtttaacaacacaaaacttcaggaaagcaacgaaatgaaacagactctatttatcgtgggtgcacgaggtacagggaagacgacaataggtaatgtgttggctgaagtattatcgtatcaatttgttgacactgatgaagatgtccagatttcttgtggaatgacaattgcagagcttgttgaacagcgtggctgggattatttcagaaagctggaaagtgaaacactgaaagcggttagtcagcgaaacagagttgtgtctaccggtggtggaatggtgttagcagcggaaaatcggcagtatatgcggcaaaacggtattgtggtttatttgcaggcacccgcttccgttttggtagagcggctctctcttaatccggagaattcacagcgtcccagcctgaccggaaaatccataacagaagaaataaccggagtattggcagagagggaaccactctattgtgaatgtgcgcacctcattgtggatgcggccttatcgatagaaaatatcgttcttgaaattcaaagctatatattaagtcaatataaacagataatttgatatatttttttatttttacgcttatttattataagactaataaatcctgtatctcagatcatttatacctcttatagtatcattctactcactcactttaattttatttaattatttatattgagatatatggattgagatatggatatactcttaaaggttctgagattactagtacgtgtactcttcaggtgacagtcgaaggtgacgataagcatttaaaacaccctaaatgtattattacacccaatcatatt

SEQ ID NO: 461 - DNA, 7316 bp, Xenorhabdus sp.
  CDS (95)..(676)
cagcgaaaacggctcagacgtcacgaggcgaacaagctaagcaacaactttcttgaatctgcattagagatttttggtaaatcaggtctggaaggtgcaactaccccgtaatattgctcaacacgcaaaacaaaatatcgccgccattgcttattattttggctctaaagaagggctataccttgctgtcgcacaacatattgccgacagactgaaagcagaattttccctgctgattgcgtctattgaccaattttttatcacaacgcctcaaccttacccgccagaacagatactggcatttattcatcaggggctgatcagctataaccatctcattttcgataaaagcagtcttaatctcagccgcattatgtcgcatgaacaattgacgccgacagaagcttatagtgttattcatgaacaggggcttgctccgatttattcccgcctgaataaactcatcgcccattatatcggcgctgatgaaggtcacgtttccacccaaatccacacacatgccttattaggggaaatcctctctttccggctggcaagggaagcccttttacgtcagaccggctgggataatattggtaccagagaatatgagttaattaatcaggttttaactcagcatattaatatattacttaatggcctgaggaaaaaataaccgcccgcaggacgattcgaaaatttaataacgtataagggatagtagtatgaacactaaaaagtttgctcttgtcctattagcgatcatcatcattactgctgccattggtatttactattatcaggaacgaaatgacaaagatttaaccctatatggcaatgttgatatcagaacagtcaaccttgggttccgggtcaatggcaagctggaaaccctgcacgtggatgaaggagataccatcaccgcaggccagcttctgggccagctcgataactctccctttattaacgccctgaatcaggccagagccaaccgagatgctgctaaagcaaatcttataaaagcagaagcaggttatcgctccgaagaaattgcacaggtgcgtgctgaagttgctcaaaaagaatctgcattccgcttcactgatagtttcctgaagcgccagcaggaattatggcaacgcaaaatgatttcagccaacgagctggaaaacgcgaaaaccgggcaacgtcaggcattagccgcttatcaggcagccaaagataaattacgtcagtttgaggcgggaaatcgtaaagaagatattgcttcagccaaagcccagttcactcaggctgaggcggctgtcgctcaggctgaactcaatttacaggacacccatcttctttccccttccgacggaattatccttaccagagccattgagccgggcacaattctggccgccggcaatacggtctttacgctatcactgactaatcctgtctggataagagcatacattgatgagccaaatctcagtcaggcaacagcaggacgagatattctgatttataccgatggccgaaaaaatcagccttaccacggcaaaattggttttgtttccccgaccgcagaatttaccccgaaaaatgttgaaactcccgacttgaggacagatttagtttatcgcctgcgtattattgtcagtgatcccgatgaagggctaaagcaaggaatgccggttacgttgcgttttactgactcagacaagtaaggcaacaatatgaccagttcagcctatacaataaaactgaacggtgtggagaaaacttttccggggttagaaattccggcggtatcccagttaaatgcagagctgttcggaggatctgtgactgggcttgtcggcccggatggcgcgggaaaaaccacactgatacgaatgttggccgggttactgaaaccaaatcgcggcactattgaaatcatggggcttgatcccatcaaagacagcgtagaagttcgttctaaactgggctatatgccccaaaaatttggcctgtatgaagacttaaccgtacaggaaaacctcaatttatatgcagatctgcgtagtgtaactggagaagagcgacaatccactttccggaagctactgacttttactgatttaacccgctttactggccgactggcaggtaagctctccggcgggatgaaacagaagctaggtctggcctgtacattggtcggcagccctaaagtgctattgcttgatgaacccggtgtaggtgtagatcccattgcccgacgggaattatggcaaatggtgcatgagcttgcttctgatggcatgctgattttatggagcacctcctatttagatgaagccgaactgtgccctgatgttttattgctgaatcagggggaattactttatcgcggtcagccgcaaaaactgactcagggtattgccggacgctcttttctgcttgatatcaaaccagaatcccgccggagaattctgcaacaggcactcacattgccacaagtcaccgatggtgtaattcaaggcagataccttcggctaattttaagagccggtgctgacagtgctgagctatgccagcaactaggactacctgatatcaagctctttgatgcggaaccacgttttgaagatgcctttattgatttactgggtggcatcccttcccgccgttcagagctggcagaaatcatgccgcagaacccgtcaaatcggacagaacccgtaatagaagcccgtaatgtgacaaaaaaattcggcgattttactgctacagatcatgtgaactttcaggtaaaacgaggtgaaattttcggcttactggggcccaatggagccggaaaatcgacgacattcaaaatgatgtgtggattgatgcttccgacacatggtaatgcgctggtattgaatatggatttaaagactgattcaggtcaggctcgccaacacctcggttatatggcgcaaaaattttcactctatggtgatttaactgtagagcaaaacctgaaattcttttccggcgtttatggtttaagtggtcgccagcaaaagaaaaaaatggcagaaatgattagttcttttagcctgaaacccattttgtaccaaacgaccgacagcctgccactcggttttaaacagcggttggcccttgcctgcgctctgatgcatgaacccgatattctgtttctggatgaaccgacatcaggtgttgatccactgacacgccgtgaattctggttacacatcaatgggatggtggataaaggtgttaccgtgatggtcacgacacatttcatggatgaagccgagtattgtgaccgtatcggtttggtttttcgcggaaaactaattgcagcaggtacacctgacaaattgaagcgacaggtatcaacgacagaacgccctaacccgtcaatggaagatgtttttatcgacctcgtggtgaattacgataaggagccgcaatgagtcgtaatgaagaaaatcatgctgaacaagctctcaaaactcaaaaagctgtcagtttttcatggcggcgactaaaagcactttgtattaaagagagtaagcagattatacgagatcccagcagtaccttaattgctgtcgtgattccacttatgctgctgtttattttcggttacgggattaatctggattccagtaaacttcgcctcggtatcttgatggagcaacagagcaaagatgcacaggaactggttcatgcattcaccgggtcaccttatattgatgccacgatcagcaataaccgccagcttttgatcaataaaatacaggccggtgaaattcgcggcattattgttattccagtcaattttgatgcacagcttgcccgggttggtgatcatgcgccaattcaggtgatcacagatggcagtgaacctaatacagccaattttgtacagggttacgctaaaggggtttggcaaatctggttacagcaacgagggcaaaatcagggaacttcaataacaccactcattgatatgcaaatccgttactggtttaatccggctgcaatcagccagcattttcttattcccggtgcgatttcaattatcataacagtcgttggagcaatcctgacttctctggttgtcgcgcgagaatgggaacggggcacgatggaggctcttttatccactcaggttacccgaaccgaattattgctttccaaattactgccctatcaggtgctcggctctttcgtcatggtactttgcatggtttttgccgtctttattatgggtattccttatcatggttcgctttggatactggctttggtttccagcttgtatctcgctactgctttagggatgggattattaatctcaacaataactcgtaaccaatttaatgcggcaatgatttcccttaatgctgcttttttacccgccattatgctgtccggctttgtatttgaaataaatagtatgccgttgttaattcagctctctacttatattgttcctgcccgttattttgtcagtagcttacaaacgctgtttttggcgggtaatatcggtaccgttttaatcacaaatttgctgtttttaattgccagcgccatcgtgtttattggcctgactgcatggaaaacccgccgacatctggattaaaaaggaaagaacatgtttcatcgcctatatacactcgtcatgaaagaattacagtctctcctgcgagatcctcagacacgggcgactttgattctgcccgttatttttcagatgatactgtttccgtgggctgcaacactggaagttaaaaatgccaccatcgcaatttatgacgaagataaagggcaggtatccatcgaactgacccaacggttggcgaaatctaaagccttccctgatcttattatgctgaacagctctcaggagattcgaccgacactggataaccgtgatgccttgctattagttcgttttccacaaaatttcagtgctcatattgccagccattcccctacttccattcaggttctgcttgatggacgtaactcaaacagcgcgcaaattgcggccaactatcttcaacagattgtgatgaactatcagaaagaattacagggcaatacaccagggctcaataacagcgaactcattatccgcaactggtataacgccaatctggattataaatggttcgtagttccatctctggttgccatgataacaaccattggcgttctgatcgtcactgctctttccgttgcccgagagcgagaacagggaacattggaccaattgctcgtttcccctctgaccacatggcaaattttcattggtaaagctattccggcgttagtggtagcaacagtacaggcaagtatcgttttgctgattggaacattgtgttatcaaattcctttttcaggctcactactgatgttttacggctgtatcctgatttatgggctatcgctggtcgggtttggcttgctgatttccgctatttgttcgacacagcaacaggcctttatcggcgtgtttgtatttatgatgcctgccatccttctttctggatatatctctcccgttgagaacatgcccatctggttacaggatataacatggataaacccaatccggcactttactgacatcactaaacagatttatttgaaaggcgctgatttttcggtgatctggcacagcctatggcctttactggtaattattgtgacaacaagtggaattgcttatcggttattccggagcaagattgcgtgatgttttggaccatgctactaggggttcaataagtgacctagatagaacactattgttggttttttgttgtggtcgtgcagataatgaaggcaaaactctgtcattgagccatcgaccattaagatagacggctttttgcgctatgaattagtctattgcttaagtgaaaggcgttcagcgactttaatgcttcgctcacggtggttaggtaacatatgttcaaaatcacttttagcctgagccagaatatgcttctcggcagtttcaggtgtaccaccacttacaggaattacaggatcatactcatattcaagctgtatgagtttggcatgatcatccccctgaatagcagcagaaagtgcaaagccaaaatcaataccggcagtaacaccaccacctgttacacgattacgatcaaaaacaacgcgtcctttggttggaattgctccgaataatgctagatcatcacgcaatacccaatgtgatgttgcacggtatccttttaaaagaccggcggcagccaaaatcatagaaccagtgcaaacacttgtgacccattggcactgtgcgccaattttagtaacccagcttattatttcctcatcttccattacgtcaatactgctcaaaccaccaggaacacataagatatcagcagattgaagatcgctaaggcaatctgttggcaatactgaacagcctgcatctgtggtaacaagatcttttgttttagcaacgaagtgcaaggaaacacctttaagacgagctagaatttgggcgggaccagcaaaatcaagtagagtcacatcaggatacaatagaaaggcaattttcatattattttccattctgaaaagattaatgcaaaattgtcttggcataaatatcaatgtagttcaattttatgccatagaaaaaatccagcatattcaaaaaaacagctgtttaataattactgttgctcggtttcattttcgataaaacatgttttttaacaaaatagatgctaaaaatccaaataaagcaaagaataacaagccaaatcgtgaacgtgataatgacatgttcatccatcatcataataacaaatctaaggatctcacttttctctaaaaaccaatcaagccacaacatagaaatcattacaaagcatgcagtaccgataaaacaggtaaaataagccacagctgagccaataagattgagccataaaaacctgtatttttttctgaatagaagaaaaataccattgagcacagctataatgataaagacagctcccataataagggtaaggtaaacaaatgcggcaaacgtaggcgcaccaatcgacatttcaaattccatgagaaaaccctgatggcaatataattttttatccagagagaaaactactcttttatcgaaatattttaattcgagttagtctcattaagaaaataacaaatagtatttgcaatccattcaggccgttcctcgtgtaccacatgtgaagtataaggaacattgatcagagcactttgctttaccctatcaacgatttcctgtgaatgagacaaag

SEQ ID NO: 462 - DNA, 7557 bp, Xenorhabdus sp.; identical to SEQ ID NO: 67
  CDS (3763)..(5175)
  unsure (1)..(7557): unsure at all n locations

SEQ ID NO: 463 - DNA, 11844 bp, Xenorhabdus sp.; identical to SEQ ID NO: 71
  CDS (10611)..(11243)

SEQ ID NO: 464 - DNA, 11815 bp, Xenorhabdus sp.
  CDS (889)..(4329)
gacgcccagtcttgttgccagtttttcacctaaatcacaaaatagcgaccgggctgcaattggctctgatcaacattgacggtatattccgccaacggcgtatattcatccggcttaatacccaacataacgccgacacccacattatgggcactttgcagtacaacatctccctgaacaaccggctcaatacgggtgacatcttttaaaccagagagctgacttttcggatgctcggctggattaattgaaccattttctgaagtaataatgacatggggcataaagcccagaatactggcctccagtgaacgttcaaagccgttcatgactgacaatacggtaattaatgcagccacccctaatgtaataccaatggctgaaagccaggaaacaaagcggccaaatttatcaaccgcccgcccgcgcatatagcgcaatccgataaataatgaaacagactgaaacataggatccgccgtatcaaagggggttatttgaatgcattaaattaatgaaaaagatcatattttatctctgtttttgcatatgtattttgtaaaaaattcaatctatatcgttcacttattacatattatcactgtttaattaagttttgattagcaccttcgaaattgaagataaaaaagccctgttgttaacacgagctaatataccacctcaggccagacagcaaatctgtcactcagctgttgccaaagcaatgtgttcagggataataaagagcagctgtactatatgatggagccattcacattccggttctgtttttacttctctcaacctgccagcgtatttattgtaaaggctactgggttaaatatgtgttgggaatggactgaatcttagagaacacatcaaacgcttatgtccgcaaaatatcgttatcaacttcctgaacgtcgcggtgatatccgccagttaggccatctgatcggtgctgcttgtgccattgaatgtgctgaaatcattgaacgtcactctggccctgtgctattagtcacaaaagatatgcaaaacaccttacggctgcgtgatgaaattccacaatttacccgtacttcaataaacatgttgtcagactgggaaacgctgccttacgatagtttttcccctcatcaggaaatcatttcaaatcgtttatctaccctgtatcagctaccttttatgacagaaggggcacttattctgcctgtgaatacattgatgcagcgtgtttgccctcacgaataccttcaggggcatgctttgatcatgcataaagggcagcgtatttcgcgtgataaattacgggcaaatctggagcaggccggctatcgcagcgttgagcaggtgcttgaacatggtgaatttgccacacgcggtgctttatttgatctgtttcctatgggaagtgagcacccttaccgcatcgatttttttgatgatgaaatcgatagcctgcgtacttttgatgtggatagtcagcgaacgctggaggaagtggaaaaaatcagcttactaccggcccatgagttcccgacagataaagaagccattgaattattccgcagccagtggcgtgaaaagtttgatgtccggcgggatgctgaacacatttatcagcaggtcagtaaaaaaatgttacccgcaggcattgagtactggcagccattattctttgaacagcctttatctacactatttgattatctgcctaaaaatacactgattattgtgcaggatttgatgaacacggcagaacgtttctggcaggataccgagcagcgttttgagagccgtaaagttgacccgatgcggccattacttcctcccgaccaaatttggcttcccgtcgacaagctgttcgccgaactgaaaaaatggccccgcatccaaatcagaaatgaagagttgcccaagaaagccggaaatatcaatctggcttatcagcctttacctgatatctccgttgccgctcatcataaagcgcctttagataaagtacgccgctttatcgagcagttcagtggcaaggtcattttttcagtggaaagtgaaggacgtcgggaatcagtcaatgagttactgtctcgcataaaaattcatccgaccacaatacatcagctggaagatgctaaagaggctggatgctttttaatggtgggcagcgcagaacagggttttatagatgaggagaaaaaactcgccttcatttgtgaaagtgacatgcttggtgagcgtgtcagccgccgccgtcaggataaccgacgcacaattaataccgataccctgatccgtaacctcgccgaactccgtcccgggcagcccgtcgtacaccttgaacatggtgtcggacgctatcaggggctaacaacactcgaggccggaggcattaaggctgaatatctcattctgacttatgccggcgaagacaaactgtacgtgccggtttcatctctgcatttaatcagccgctacgccggaggcgcagaggaaagcgcaccgctgcacaaactgggcggcgaagcatggaataaagcgcgtcagaaagcggcagaaaaagtccgtgatgttgccgctgaattactggatatctacgcccagcgagccattaaaccgggttttgcgtttaagcacgaccgggaacaatatcaattgttctgccagaacttcccattcgatacaacacccgatcaggaacaggccattaatgcggtactgagcgatatgtgccagccaattgcgatggacaggctggtatgtggtgatgtcggctttggtaagacggaagtcgcaatgcgggccgcttttactgctatcaacaataataagcaagtcgctgttttagtcccaacgactctgttagcccaacaacactacgataatttccgcgatcgttttgcgaactggcctgtacacattgaggtgatgtcacggttccgcagtgccaaagagcagcagcaagttatagatatggcagcagaagggaaagtcgatatcatcatcggtacgcataaactgttgcaaagtgatctgcgctggaaggatttgggtttattagttgttgatgaagaacaccgtttcggtgtccgtcataaagagcgtatcaaagctatccgtgccgatgttgatgtcctgaccatgacagcaacccctattccccggacgcttaatatggcaatgagcggaatgcgcgatctgtcgattattgcaactcccccagcccgtcggctggcagtaaaaacctttgtacgggaatatgacagcttagtcgttcgtgaatctattctgcgtgaaatcttacgtggcggtcaggtttattatctctataacgatgtcgaaaatatcgaaaaagcaaaaagccggctggaagaattagtgcctgaagccagaatggttatcggtcacgggcaaatgcgtgaacgtgacttggaacgtgtcatgacggatttccatcatcagcgctttaatgtgttgatatgcactacaattattgaaaccgggatcgatattccgacagcgaataccattattattgaacgggctgatcacttcggtctggctcagttacatcaattacgcgggcgtgtcggtcgctctcaccaccaggcatatgcgtatttgttaactccgcacccgaaagctatgaccacagatgcgcaaaagcggctggaagcgattgcctcacttgaagatctgggagcagggtttgctctggcaactcatgatttggaaatccgaggagctggtgaacttctgggtgaagatcaaagtggtcaaatggccagtatcggtttcacactctatatggagctgctggaaagtgcagttgatgcactcaaaaacgggcgggaaccttcacttgaggatttaactaacaatcaaaccgagatagaactacgtattccggtgcttttacccgatgattatatcccggatgtaaatatgcgtctgtctttctacaagcgtattgccagcgctcagaatgacaatgaactgacagaattaaaagttgagctcattgacaggttcggtatgttacctgatccgggcaggcatttattacaatctgcttctatccgccttacggctcagaaactaggaataaaacgtattgaagcccatgaaaaaggcggctttattgaatttagtcaaagtaataaagtggatccccactatctgatcaacttattgcagactcagcctaatatctatcgactggatgggccttctaaactgaaatttattaacgagttaactgaaagaactgcacgcttatcgtttattcagtcattattggaggcatttgagcaacatcaggtatagcatcaatactgttgcttttaaatatcgttaaaatatcaaaaaatttcagcttatatacttatctccgggaatataataactatgtgaccggagatatttcatttctggaacacctctacaaatacggtgcaaggatcagcttcccctttccattcaatgggatcgatttatgtggtttatgtatcactcttacctttcccggcttattatcaatagtataaatgacatcatacccaataatacgcggttcccggatcttaaatgcaatgcaatgttttaattcataatagctcagtgcataagattctcttgttatgtttaatctttcgatgaaagaaaatagactatttttacatacagataagcggttgctttcagtattaccaaatactttaataaatggcaccaatgccccattacaataatatttttgtgcataacctattgttattataggttctgaagaaagtacctgagcatatttaggctgtggttttttagaaaaaaatattatagcgataccaacagtaataataacaatcagagagtagatcctgcactgccttgcctttagcttacttacataacacgttattatatttataatttgccacactccttacttaaacatatcccttagctattttcgggaatcaaaaacatactttactcgtgattaaaaaattttaactcactgtatttatgggaatttaaaactaatcaaatttagattttaaattaatttcatgtttttattacattaaatatttttatcattcctgaatttttttcaatcctaacagaaaaacatacatttttatgtcatggttacctagctaaaattagttttattacaaggattagcctgattaaaaaatgggaagaaaacgagttgtgataaatagaatgaaaaaatagcgtagtattgaataaaaataatgaaaatttagtggttcatctgaaatttattgaatatatcattaatcaaatccagatgaaccactctgcttaaattagtgcaatttcaatcgtggacggatcacacgatttattccaccaaccaacatcattagacctgttttaatatacccatgcaatgctacctgatgcatacggtataaagagatataaacgatacgtgcgatacggccttccaccatcattgaaccacgcatcaggttacccatcaggctaccaacggtgctgaatttagataaagaaaccaaagaaccatgatctttatattcatattctttcagcggtttttcattcagtaaagccagaatgttgtcatagcagcggctcgccatttggtgagcagactgagcacgtggaggaacaaaaccgccctcttttttcggacaggatgcacagtcaccgatagcaaaaatagtctcatccagtgttgtctgcaaagtaggcttcaccaccagctgattgatacggtttgtttccagcccgccaatctctttcataaaatctggtgctttaattccggcagcccagaccatcaaagaagctttgatctgctcgccatctttggtattcagaccattttcatctgcactggttaccattgtcttagttaagactttaacacccagtttagtcagctcttgatgtgcagcaccagaaatacgtggtggcaacgctggcaaaatacgttcgccagcctcgaccaaagtcacattcagggcatctgtattcaagctttcaaaaccgtaactatttagctgtttaactgcattgtatagctcagcggaaagctcaacaccggttgctccaccaccaacaatcgctatattaactttctcttccgggcattgattcgctgaatatttcaggaacaggttcagcatttcattatggaaacgatgtgcctgttgcggattatcaaggaaaatacagttttctcttacaccggctgtaccaaaatcattcgattggctgcctaatgccataacaagaatgtcgtaagtcaactcacgctctggtactaacaaatcactactttcatcacgaattgcagccagtgtgattttcttttcttcacgattgatatttgtgagtgtacctaattggaagttgaaataatggttacttgcatgagcaagataactcagtgcatcaacaccatcatccagagaacctgttgctacttcatgtaataacggtttccataaatggctgttgttgcgatccaccaaagttatttcggctttttgcttacgccctaatttatgtcccaaacgtgttgccagttctaaaccgccagcacccccaccaatgatgacaattcttgtctttggcgttgtcatgactaccccactgaaaatacaactaatgttatgtaaagcgctaaacgattttttgaataacgttcttaaatgacatcactcatgataaatttcatactgaaaatattgccagaatatcacggctagtcagtaggtcataccaaaaatgacccctgctaaattcttttgattaattagacaccaatcacaaaatttacgtactcaactctaattaatcagacttaaatccagtttattaatacttataatttacattgttaacattatgtgattagcagggttatttattgaaatacaggaagaatgttgccccaaaatagacagcaaaaagtaataaataaaaagagaataccaaaagacaggatcataatgtaacaatcctgcctttcgtttgatcgcgataaatcagtaatgattagccacagcttagccagtgttcacataaattatttaattgcaaatttgcccgctgccagcgttctgattttttcagttcttccagactgaacgaccttccctgatgatatagccgtgccaccttatctgaattaactatcggtaaattatctagtacgttagtcgcaccctgacggttattacacaccagaatcatatcgcagcccgcttccagtgaggcttttgcccggtcagcatagccccccataacagcagcgccttccatagataagtcatctgaaaaaataacaccattaaaccccaattgttggcgtaagacgttttttagccagtaaggggaagcgcttgccggacgatcatcaatctgagaatagataacatgtgcaggcataattgcatcaagtaagttacgctggataaaatcgcggaaaatcagcatatcgtgacagctaattgcatccattgggcgattatccactggcgtttctttgtgggaatccgctatgactgcaccatggccgggaaagtgtttacccgtcgatttcatgccagccgaatgcattcccctgataaatcgctcagccatcaccatcgcagattcaggctcttcatgaaatgagcgttcaccaatcgcggtacatttatggcccaaatccagtacaggggcaaaactgatatcaatatccattgaaatcatctctgatgccatcagccagcccgattcttcggccaaatgcccacccatcagttcgtcatgcaaacaggcaaaagactgagccgcaggtaatcgtgtaaatccttcatgaaaacgctgtacccgtcctccttcctgatcaactgcaatgactaaacgatgacgggaggcttcacggatttgacgcaccaaatcacgcaactgctgagtatcatggaaattgcgggtgaacaggatcaaaccgcccactaatggatgttgcagaatttcacgctcttcactatccagctcatgaccaacaacatctaacattaccggacccataatattcctcacttcttattagttacctatttatacacttcgtctttcaagttgcctctttgttggctacgctcgctcactccagtcacatagtcatctatgctcccggagatgaactcccttgccgccgcgacgcatcttgaaatccattgtgtatattggttgccattttattaattgccgaccttcgtgttaaaacgtcagcttaaagcccagacgcaaaggataagccagagccaaaaattgcggatcttttgtctgctgccagcgaacttcataccacatcagcatcatatatctgacccacggtttccattgcctaattttttgctgcaataaaacgatatcactataccctgatgcgtcagtacaataataattcaaaaaaaatttctgctgcatctcattccattgattcccttcaaacagccccgctaatgaaaaaccaatatcaacatccgccgcatattcccagtcaatcagtttcaaaccttccgatgtcataatcagattatcggggtgaatatccatgtgagcaggggctattttcagaggcacaggcattttcgctgatataaagaatttatgcagccgtaaccagtcaggagaaagccttaaattatcaatatcctgccattgagaagctaattgttgtttgagttggaaggcataccccaatggtgtttggttatggagaatggcgatggtattcgccaatgactgttgaaatgtgggtaaaccgaattcttctgctgtgatctttgtgcctttcagccactccagtaacagccagtcatcgtgcattgcgattacatcaggtgcgatgccagtcaaagataatttacgtaatatccgctgttccctttgacgattgacacccagagcgccactgtgccctgtatgtttacgccctaccatctgacgtacaccatccgtgatatagtggcttccctgagtcagccctgttaatggcctgatttcccagttttctgctggaatgtcaggccacttctgactcaacattccagatagagcttcactattagttaatatcacttagttaatatcactgctaccagaccagagtatttcacccgtcttaaccagcataagctgcatgtttatcttacggtgttgggtatcaccagaagccacggaatagatgacataatcggcattcaaataacgagccaaaccgatagatttgctgcgtgatgccagactatcttctgatgacagccccagagcctgccgggcgtaataaacctgatttttcggcacgacctgaaaaacatgtatcttactgaccacatcggtaattgcgtcagttgccttaagtgttctcagtgaaccactcgtattatttttgacactatcaacgagcagtattttccccgcttctacaccatgtgctttagccatctggtcaactaatggctgaacgatattattccagttaattgactggatcttcggtggctggggtactttctgtaacggcggttcagtgggttccgttttttgctctggttcagcaggtgtaacaggagcaggcggttgtgtggatgtcaatgtacaactcgccagcaacagtgctgataatacaaccaagaaaattcttttcattaatctactccggttacagctgtcaggatatctttcgtcttacaagtgaccgcattaaaaaacggcagtgagtaatgttattctgccagtaacgggcctaatggatgcccaccaaccagatgcatatggatatgaaaaacaacttgccctgaatgacggttacagttcatgatgagacggtagccgtcttcagcaatcccttcctgttttgcgatttttgcagcaaccgtgaataaacggcctaatgcagcctcatgctccggcataacatcattaaccgttgggatcagcacattaggaataatcagaatgtgagttggtgcctgaggtgtaatatctctgaatgcagtgactaactcatcttgatatacgatatcagatgggatttcacgacggatgattttgctaaaaatagtttcttctgccatctcatttctcctttattatcatttaatgttcttaaatgtcgatatgaaacaaatcacaaaagttccttgttgtcacttcggctaattcctcaagactgacgcctttcaatactgccatatactcagcaacatcacgtacataagcaggctgattttgcttaccgcgatgaggaaccggcgccagataaggcgaatcagtctctaccagaatacgatcgaggggaacaaacctcgcagcctcacgaatttgttcggcattgcggaatgtcacaatacccgaaaacgaaatataaaagccaagatccagtaaatctctggctgtctctttatcttcagtaaaacaatgcaaaactccgccacaatcctgcactttttcttcccgcagtaccatcagggtgtcatcttttgcatcacgggtatgaacaatcaccggcttatttaattcgcgaccaatgcggatatgctggcgaaatgaagttctctgtaattctgcgttatctttctgataataataatccagccctgtttcacccattgcgataacatcactatctgcagctaaacgggcaagctcatcaaaatcatatccttcatccagatttaacggatgaataccgcaggaatacgcaacgttgttacgtttgccaatcaggtttttcatttgcaggaagccgggtaatgtggtcgcaactgccagcatatacttcacatccctttctgcggccttcgccactacatcatccacacttttatgcagtgtttcataatctaaacaatcgagatgacaatgtgaatcaactaaaaacataatatgcccatatttaaatgtattaccgagtggagcaaagctgcctttcccaattgagtaattgttcagttaataacaattcccgattgatgcccgctacggatattaattgatgacgacagcgtatccaatcatcaactgtatttaacaatttttccacactttggctggaggccagatggtgaatcaacatctgctgatcctgattgatacagtaattttgcgccttctgacgccattttaccgcatcagacaacaggctgattagccagtacaaagactgttgtacatcatcacgattcaacgatggcaaaagtgacaaggtatcacatttatgtagtgcctgcgtgatagcctgacaaaatacatttctctgttgccatttttcagtctggagtaactgttttgccgccagaggtgctccctgagacagtttcagtgctgtctggatatcctgtgatgatattgtcgggagctttttttgcagccaatgcaaaccggtcttggtttcaggaaccggcagatgatagtaaaaacagcggcttcgcagtgttgccagtaagctggccggacgctgacatcttaatagaaaataggtattgccgggcggctcttccagtgtttttaacaacgcatttgagggtgcatcagtcagtgattctgttgagggtacccacacaatcttggcacccccctgttgagaatattcataaagcttttcactgagttgacgatctgcatctacacctgatgtgcttttgcccatttccggggcaaggacaatccaggcagaatatgttttcgccaacgttcaagttgatccggtgcatttaccccaacattttatgtccagtttttttgtagccattta

SEQ ID NO: 465 - DNA, 6354 bp, Xenorhabdus sp.; identical to SEQ ID NO: 75
  CDS (227)..(850)

SEQ ID NO: 466 - DNA, 6996 bp, Xenorhabdus sp.
  CDS (1054)..(1944)
cgcgtgttgacgcttactcaaagggaattgagcggcataataatttggtatcttattttcgccaaaaaactcgttacccgaactatcatgccacgacccatgttatcagatcccgtgtggcagaagctaagctatttgtattcatgctacaaaaccggcttgtctaccataaaaaaacgcatcacctagtccaggaaagcggatcagggtaattgatttcccaaatcgatcagcagcccctgaaatgcagaagttgcccgcaggttcagttgcgtttcatcctgaataaataccccatccccacacctgatattggcatgagttgctgttccagacttgctatcagcatagatttcagcattaccgctgacagattgtaggtaggcgcgtttcccctgtaacggtacgttatgagcctcaccagcttgtagcataaggtagcttatccacgctgattggcgcaggtgcatgctgttttttccggaggcaggtgaagccagtaatgttagtggctgagctgacagcctcctgcactgtaccggttgcggagcctgatgtggcttggcatcaagccagatttgcaggcgatgcagcgattttttcttactgaggttatgctcactgtagcgtagatcctgacgagtggaaaatagcagacagtctccctgatgagcctgaatgtagtttcctgcactatcacgatattccgcttcaccctgtagaataatattcaggatatcgacatgaggataagcctttggcttgagttctgtttgcggagcaagtatttcctgattaagtactcgtagtgccccgtagttcaaaaaatttgggtcaaaatagtgaccgaatgaaaaagtatactgcgcttttaaccaaccatagtcggcttttccacactgatttgctgttctggttattatcatgagcatgttctccttgccacacactgttagcctcaatcttaattatctggacgttgaaatgttagccagttaatctgctccctatattcaaatttactgactgagaaattgtgggtaacggacatatatgggtaaagaacgagcgttaacactggaatccctgcgggttatggatgcaatagaacgtcggggaagttttgcggccgcagcggatgagttgggaagagtgccttctgcattaagttataccatgcagaaactggaagaagagctggatgttgtgctgtttgaccgctccggacatcgcacaaaatttaccaatgttggccgcatgttgcttgatcggggcagggtactgcttgaagccgcagacaagctcactacagatgcacaggcacttgcccgtggctgggaaacccatttatttatcgtctgtgaagccttatttcctgttgagtcactctttccccttgtggacaagctggcgaataaatcgaatactcagctttcattagtcacagaagttctggcaggagcctgggaacgtctggaaactggctatgcagatattgtgattgcgccagatcttcatttcagggcatcagcagaaatcaactcacgccctctttactccatcaagaatgtttacgttgccagtatggatcaccctatccacaatgaaccggagcctttatccgatgctacgcgggttaaataccgaggaatagcggtagctgatacggcaagagaacgcccggtgctgacagtccagctactggataagcaaccccggttaacggtcagttcgctggaaaataaacggagggcgctgttggccggtctgggggtcgcaaccatgccctatccgatggtagaaaaagatattgcagaaggtcgtctgcgggttgttggttcggaatatatccatgaaactaacattattatggcatggcggcgtgatcggatgggagaagccaaagcatggtgcctgcgggaaattcctaaattattcaagtagtattatcaaaaagcccctgagtgataggggctttgctgtgtgagggtattttgtattatggcaggtaattaccagttctttttcagcaagcggtcaatactgaatttgcccggtcccatcattgccagcaacagataacctgcaccgatagagaagtttttcaggaacatcgtctggttcatatcgtctgaaaaatcatagtggaacagcagtgcggtcaggatacagaaaataaaagtgaatacggctgtcgtacgggttagcaatccgaacagtacagcgaggccgccgccgagttcaagcaagatagtgagtggcagtaaaatgcccggcacgtgcattgcttccatgaattcttgtgtgcctgcataagcactccctaacttcccatagcctgcaataatgaacaggactgaaattaaaatacgtgcgactaataaaccactatcttcaaattttttcatgaacgtctccaggcgtgtgttctaaaaagcacaattaagctcatcatttattgatggtatttgttgatggagagtattctaaggagaggtgtcattggttgatagtaaggaatattaacaatttaatgcaatttttttgaaggaatacctcaatatacgtaaagagatttgaaaaagaataatccggtagaaaatattaacgtttgttaaagatattacgggcagtatcaatgagtttccagacgccaagcatacggagcgaccaacgataaagctttttagggtggcggatgccatagagcagtaatatgccactgccgacagcaaaataaggtttgaaagagagcagtgtctgccagctatgatcgtaagtgcgggtaagggcgagccattgctgaccgtgctctgaaagagactgacgctgtagctggatttgttgtagtaatgcctgcttgcgctcttcccgttgcaggcgtcgcggcttattcatggtcattttccaacatattgcgatcgattctgagttgctctcgggtagcattgaaaaaagccagatggcgggattttctgatagtccaaatcgtgccaagcacggcgagaagcagcaaggttcctgcggcaatagcgataatggtcatctggtagaccggatcaacggccagaaagaccagtattaacaaacatgttatgccaagggctgcgaataacagcgtgaaccctaccagcaacagtaatttcaccagcgtggcggctccctcttccagctcaaccgctgcaagctgaactcgggtttcaaccatgccgacaatcagagttgctactcgccgtaaggtattaaatactcctctccccgggccttgtgaatggggtaattgcgtcatattagcgtcttgccagtaatacacccagtacgatacctactgctgcaccaatacccacaccggtccagggattatcgcggacataattatctgcacgaccggctatttctttggtctggcctgtgagtttatcaccggcatcactgataacagtgcgggcatctttcaacattttctctgctttattgcgaattttctccagttctgctttggattgttcaccagagctgttgagaacttcttccagagtatccgcaagggactgtaattcagcacgtaattcgtcagagttttttttctgtggcatggaattctcctcgtatatatacggtgaatgaatttctaccatagacgtttttgtaaggagtttaaaggcaatatggtgaaaaattattacatgatgcgacagattaatcctaaatatatagcaggaattggtgttcaaaccccctgcaacatggttatccacaatgctacaggggaaataaagggggagaattattgggtagaattatttgtgcgttttttgcgccagataaacgtcaggctaccaattaaaccgatcagtaacagacctacaggcagcagcaccagaaagttcatcagatagtgttcatactcgcggaatagggggcttttaccgagagcatagcccagagtcatcaggataatgacccataagaaaccactgagccaattgaatatctgaaaacgtgtattattcagtccggcaagacctgccagtgtaggcagtaatgttctgacaaaagcgatgaaacggccgattagcagtgctgacaagccatgacgatggaagagattatgggcacgttgatgataatggggaggaagatgggacagccatccctgcactaattttgtgttccccagccagcgtccctgaagatagccaacccagcaaccgagacttgcacccgcggtaagaacaattaatgtaatggaaaaatccattgtatcctgagcaaccagaacgccaactaatatcagtaaactatcgccgggcaaaaatgccgcaggtaacaccccattttccagaaacaggattgtgaatagcagaaggtaaatgacccaaactaatgaggggttagctagtgttgcgtaatcttggtgccaaagtgcataaataaggtctgttacaatttccatcaaatgttcctaaaacgcgggttaaggattacatcttacttttatggtgtatttatgattttttactattaaataatcataatatacaaaaagttatatacggattgacaattatgatccttcaaactcctttcaaatggcatgaataaatgacagggacactctaacaaaatcatcagtagtgaaacagaaaattttggtgagcaattgaacatttgtatgaatataaaagtaacatcgcccagagatatcaattaattaattcagttacgaagtttgcataaaataactctgttttctgattttccctgttgtatagctgtatttctgctttttccagccagaataactttgttttatcatcacatagtaaaaataatccataaataatattggagataatgccgatgatggtgactatcgccaaagcgggttattcatataattatttgattataaaatataaattttaatcctcattccttttgggatttcagggatgcctgatgaaataggaaatgtgtagaatggatcacacaaatgtgactattttgttatcacttgttgagttggttgtatatttttattaattattattttcagttttctgaactttcctactactggaaaagcaaacacaaaaccaacaggctgattaagccaaaatatcaaatggataggctatggaaaaacaacaaaaaggctttgtgcaatatattgtacagggaagcctagtcacacaaattattatcggattaattgcaggggtattactggcatgggtaatgccttctgctgctcaatcaaccagcttattaggtgagctttttgtcggtgctttgaaagcggttgcaccggttctggtttgggttctggttatgtcttctattgcgaatcataagaaaggccagaaaactaatatccgaccgattgtcgttctctatattatgggaaccttccttgctgctgttgtcgctgtgatcggcagtattttattcccgtcaacattaatactggtgacgaatgaagctcaaatgtcaccaccggataatatcgttgaagtattgaagggagtattgctcaatgtggttgctaacccgattgatgcgatattgaaagggaattatgttggtattctggcatggtcaatcgggttgggtatcgcattacgccacgcgaaggaatcgaccaaatcagtggtgcaggatttggctgaagcggtgactcaggttgttcgtgttgttatccgtctggctcctctcgggatttttggtctggttgcttccactattgccacaacaggtttcgatacattgctcggttatggacatctattggttgtacttctgagctgtatgattgttgttgtactggttgttaacccattaattgtatattggaagatacgtcgcaacccttacccactggtttttgactgcctgcgcgaaagtggtgtgactgctttctttacccgcagttctgccgccaatatcccggttaacatggcaatgtgccgccgtatgaatctggatgaggatacctattcagtctcaattccattgggagcaacgatcaatatgacgggtgccgcggtgaccatcacggtattgacgctggcggcggtaaatacactgggtatatctgttgatattccaacagcaatattgctgagtgtggtttcagcaattgcagcatgtggagcatcggggatagcaggcgggtcattattattaatccctctggcatgcagtatgttcggtatctctaatgagatttccatgcaggttgttgccgtaggtttaattattggtgtattgcaggattcggctgaaaccgccctgaattcctcaacagatgtattgtttactgccgcagtctgtcaggctgaagatgccaaacaggtacctgaagagttagcacggcgctaatgataaacagcaagagtgacaataagcggtaggtttattgtcactcttcttttatccgctctttatttgtattaatttttcatttctgcactaaatctttactgccagccgggttccctgatcaatcgctctgcgggcatccagctcggctgcgacatcggctccaccaattaaatgtacacttttacccatatcctgtagtggctgatacagcgctttcagcggctcctgtcctgcgcagatcaccacattatcgacttcaagacattgctgctcaccctcacggctgatatgtaatccttgatcatcaattttcaggtactggacattattcagcatcgtgatgccacgcatcgagagactggcccggtggatccagccagtggttttacccagaccttccccgactttagtctctttgcgttgtaacagataaatcttccggggcgagagttccactcgtgcgccttctggctgtaatccgccccggtgagaaagcgtttggtcgatcccccattcctgagagaatgcgtggctgctcaggctgctgctttgcccactctggctcagatactccgcagtatcaaaaccaatcccaccggcactttagag

SEQ ID NO: 467 - DNA, 12203 bp, Xenorhabdus sp.
  CDS (215)..(1108)
actcagcgaaatggtgaaaatcacgacgccagttttgtagttgtccggcgatttggcgaatagattcattcaataaagtttgcatattactatctcttttagttatcacatcagtagtctgtttttaattaatgtagacaagaagctcagcttaaatgagatacaattaacttcatctatataactaatagttatcgcaaaagagaaaatagtgatgccaataaaactcaatcagttacgggcttttgttgaaattagccgctatggcagtattcgagctgcaagccgaaccctgtcgctttcgcaacccgctttaacgaaatcgattcgtgaattagaagattcactgggggcaaaattatttatacgcagtaatcagggcattcatttaacggagtgcgggcaaagttttttatcacgtgccagcttgatacttgaagagttgagaattgctcaggaagatattcagcaacgtattggcttactcggtggtgtcatcaatattggtgttactggctgtattgtccgcacaatcatgccaaaaatcattacacaatttcatcgaaattatcccaccgtcaaattacgtattgttgaagggcagttattggctatgttaccccaactcagacaaggtgaactggatttctctgtgaatacctattatcccgatagcacagatgcagacctcagctttgagaaattgatggaaaaagagtacaaagtgattgtgcgtaaagggcaccccaaagagcatgcaacttctttagaagagttatctgattgcgactggaccatgccaacaccaaaaggcacttattatcgccaattgtttgaaaggctctcattaatggagaggcctcctgtcttcagcgtcatatgcgaaacattaacgtcttgcatgagcctagtcgccaaaagtgattttgtgaccattgtcgctgtcgatttagcagatgatgcactgtttcatcagcaatttgtcgccctagatcttaaagaacagcttccattagccatgttttgcctgattcgtcgcaaagataccaatttaacccccgccggggagcatttagccagactgtttcgaatgtattgccgtgattgaccgcctgacatgcttcctgctgctagccaatgacgataatgccaagctgttccataatctctgcaacctgagagggttctagtttaacgccctgaaaatccactcgccgtatatcaatttctcctaaaacagaattggtcaaatcacaatgagtaaagtttgctgcataccaatcaaaagcggtaaattccccgccagacagatctgagccactgaacgttgcccctaaaatatgagtgccatgccaccggttttcccataattcacatttttcaagtaccacatcagaaaaattggcatagcttaagttacttttggtgatataagctgaacaaaaccgaattgtgggactgatgatattcataaaactcacgccacgaaaatcagcaccttgcaaccgacatccacaaatttctatccccagtgcattggcatatctgaaatctaccatcgataagtcacaatttttaaaactggcatctttcaaaatagcgtgtttaaaattgcagcttagctggtctttagattcataaaataagcaatcaataaactggctgtcgttaaatcagcatatgaaaaatcaccatgaaagaaatgcgtatttttaatcacctgaccacgaaattgatctttttcaatccgtttttcacggagatgggttacttgcatagctcctccaatttattaaccaatttccagtgggcagtcacgacaattccctactcccggtaatttattccgttggcaacaacagcgacgctgtataatatcatttctcaatatcacggtacgatataatgggttatctctgccatcgggtaatttcgcttcaaagaaaagattattgaccaatatttcatattgttcatcattcattctttctttgaaattacttaagtaccaatacatcacataaccaatattattccatagcaaacgcccattaatccctttgtaagattcaattttttcacagaccggaataatatggcgatccaataaagcatagtagcgatccagtagggatataggttcatccgtccaggttaattgatagtaaaccatatcaggccggccgctttcatgaaattcaacctgaaaaagattataatcagcatctgctgcttgagggtattccagcaatattagcatcatcggcggaacaactatgccaaaataccactgcgcccataaagaataaagccctttactatttggcttctgatcactctttgcataatattcattctggtaacgttgcattaatggtaaaaattctttttcatccgaccattggtgaaatatcatgctgccttctggaatattttccgcattcactttcatcgatgaattaaaatggctgaatgcgctgtcgaataaattgacaatattattaacctctatttctgacgttatctgagtcattctacccccttccattatatctcggaataattaatggcttatccgattcaggatcacggataatacgacatgccagaccaaatacatcggcaatgctctgctccgtgataatttcttcaggctttccttccgcataaatatggccactcttcatcataattaatcgggtggcatagcgcagtgataaattaatatcgtgtaaaaccaataccaatgtttttccctgctgatgtaagcgttggcataaatcaagcatttcgatctgatgggaaatatccagataagtcgtcggctcatccaacagaataatcggcgtttgctgtgccagtgtcatagcaaaccatgcccgctgatgctggcctcctgaaagttcgctgacaaatttttccgacatatcccataaatcgacagcctgtaaggcttctctgacaatgcgttcatcagcttctgaccattgccgcaggaaagtctgataagcatagcgaccgcgggaaacaaggtcataaatcgtcaacgcttccgtcactattgccccttgggttaacaatgacaactcacgtgcaaccgcttttggcttataacgatggatatttattccatcaagttgaatttcaccgtgttgtggctgcatacttcggctaattgcccgcaacaacgtcgatttcccacacccattagggccaataataacgctgaattcgttatcgtggattgcaaggttaatatcttcaataatcgtttttttaccgtatgccagtgaaagactctgggctttaagccgcgaagtcactactgaggaattgacgcccgatggcattattgtgttctccttaattcggcatacagtaaatacatcaagtaaattcccccaatcaccgcagtcactaaacccacaggcaaacgtgccggagttggtaagattagggtaataaaatcagacagcagcatcagtaaagccccaaccaaagctgagcaaaataatgcagcacctttcgcatggactaatcggcgggcaatttgtggtgcagaaagcgcaataaaagagatagggccaaccactaataccgacattgcagcgaaaatgacagccagtaatatactaataatctggataaggcgtacgggcacacccaatgtattggcaatatcatgaccaaaatgggtataacgtaattgcctgcccagccaaaataaaacaggagtaaaaacgaccaatccactaataattgccacatcctgccatcccctgctggcaaggctaccactcagtaatgcacgtatttgctgggcctgttcagcacgaatatttgcaacggcaaagtcaaccattgccatgcaaaatgcggcaatggcgatgccggatatcacaattttccctgtctgcattctgtccatcccagcaccattgccgagataaaccagcaatactgcaagtccggcacctgatattgctcctaccgaggttggcaatacatcaggccagacaagcaacgcaaccataatccccagtgcagcacccgcattgataccaatgatatccgggctgccaagtgtgttacgggtcgtcagctgaaaaagcgctcccgaaagtgccagagccattccggctcctattgctaacaacgctctgggtaagcggatttcaataaacttaactaccacctactgaagtaggtgggttagcgcacttcggtgctgacgactgaaagtcgtcgaaccacgcacctcgtaaacgcgcgtaggtcaaaacattaaagtcaaagtcaccgtctaaagacggtggttttaacctgtcatatggaaaaataaattcctgataggagtttcctgttcccaaaaaagggttatccattccttccctacccgatgataaagtcagatagaaaatcgccaccagcaacagcaaaatgagcatgattatcttactcgtgtgccatgatgggctgataaatatagctcttcccagagagaaagttctgacagcttgttgccttattggcctcggtgaataaatctgagtcatactttattccaccatgattttttgtgtccggtttttagcaaccagataaagcaacggagcaccaatacaggcagtaataatgccgaccataatttcttcaggcgctatcaacaaccgccccacaacatccgatatcaataacaggcaagggccggcaaacaggcagtaaggcaacaaccagcgaaaatcactgcctacccatacccgcatcagatgtggtgctgccagaccaataaaagcaactgggccagccattgctgtcgctccggcagccaacatcgtggcacttaatagtgacagaatacgggtacgggcaacgttagcaccgagagcacctgcaattccctccccaaaaaccatgacatttaatgaagcactgagtgaaagcgtcaatacaatcgccaccagcaggtaaggtatcagtaaactggcctcattcagcgacatcgcactcaatgaatccactgtccagaaacggtaactatccattacctgtgcgtttattaataccactccctgtacaactgcaaacaggcaggcattgatagctgcacctgtcagaaccagccgtacagggttagtattacggacaccgccgctgagtaaatagaacaataaagttgataaacccgcgccaataaatgcactccaaaaacgggagaattcctctagcgccggaatgaaagagaaaaaaaccacggtaaccgccgctcccacattaattcctaataatcccggctcccccaacggattgcgcagcaagccctgagtgacggctcccgcgagagctaataaacattccaccacgggtatgattaatctgataatcagcaccaatagttagcagagtgttgtctgtcaaatcagcttcaataatgccgtagaaggggtatttctcgtgtttgtcacgatcaataaaagagttggaacgctggtaagctgtgacaaaacggcctctgattgtgccgctttcatttaatgagctggagagatcaaggcctgttcgccatttatcccaagaaccgccttccaaagtaacttcaccacggaattctgtggttgggcgtttacggatcacattcactgccgcagatggagtacccggccccaccatcaaacccgcagcgccacgcacaacttccagacggtcaaacatgatggtatccatcaggttatcaccgtaattaaagcgaatgtcgtaaaaggttggtacgccatcacgcaacatatttctgaccgtcatccctcttgatgaaaaggtaaaacgatcgctgtcagcctgattcactgtcatgcctgtgatactgccgatggcactttttacactgtccagattctcatctatcatcaactgcttagtcatcacactgacactttgtggcgtttcacgtgcagataaattcaggccggttgatgtcaccattgaagtcgtattgtacatctcgctgtcttcagtgactccttcatgccccggagttcctgctgttacgacaattttatcattcttcccatgctcttcttccgctattgctatattgttccctgtaatcagtagcgggattaagactgaaagtaatttttttctggttaaacgattacggtgcaaaattgtgtgactcactctttttgtcctgttatcaaaatgattctttattatgttttcttcaattttttatttatttttctgaacggtaaccgtttattttccttagagaattcaagaaataaattcagcttcggtgtgcagcaggatcatttaataaagtctttcattcgtatccatcaccacaaattgtactcatgagaagcacatttttattttggctaataataattaaaattattatcattaacaactgcattaacgtaatgattttatacataacgcatttcaggataaattacggcgaccgaggatgattgggataagcagcctgagctagcaaagaggcaactcgaaagacaaaggaaatgggtaaagttcggttagaaaatatcacataagggagagaaataaatttcacaattgaatcattttacaaaaaattaatatttgtaatattaaaaccaaattattacggttgatattatttattaaatttaattgtggtgaattatttattttttcaaaagaataaggctctgattgaaaattcagagccttatttataaaagcaataatattctttattaacaatcagattttattctgacgccaccattccgccagcataacccctgtagcgacagaaacgttcaggctttcaacccgaccagtaccaccaatcgagagacggatatcaccatcttcccagacgctgtcactcaggccgtcaccttcctgccccagtaccagaaccattttttcaggaagtttagcttctgccagttttgtgctccctttatgacttgatgtagtcacaatggtataacctgcatcacggaattggctcagcgcggcagtaaaaccatctgcatcaatacctttaacgtgttcagcaccaccttccgcagtacggactgccgcaccggattccagcattgtcgtatcctgcaatatcacaccctgtacgccaaaatgagcacagctacgcataattgcgccgaggttatgtggattaccgacattttctaatgccaatacgcaatcttttgccggagcctgttgcagataagtttcagcattcaggccattacgttttttaatcagaaaacaaacgccgccatgatgttctgtaccggatgcttttgctaattcctcatcatccactacatggtaagccttacggtttgctgccatccatttcagagcatcacgaaaacgaggggttactgactgaacaaaccatgctctcacaattgcatccgggcgattctggaacattgcctgacaagcattttcgccatagatccgggtctcttccagtctctgacgacgcagttgttcagggtcgatatggcttctgccactaatgccgccatgatccggttttgactcttcatctggcgagcgggaaactgttctccatggagaacgctcttttggttgctcaggacgatcattgtcgtaacgtctgccgccctgctcgcgtcctttacctgacgggcgtttattgttgttatgacgatcattgctgttacggcgatcattgttgttacgacgatcgttattattacggctgtcattgttgccctcattacggacatacattactttgactttgccactcttaccactataggaatcgttcatctatttctccaacttctctatggcgcgcagattacccgatgttcgcttccgaagctacctctggcaacgacaatcaattaaaatatccgtcaattttcttctgactttgtacatgagcatttctgagttcttaaatgagaaataacaacgccgtttatcagcttcgccaacaccgtcttgcgcgttctacccgcccttttcaagcaagaggctgtcgggttaaacgttgtacgtactgtttattaccccaaaaaagatgtctgtgtgaaaatatttcacccgcaaaagctgacagccgtttttgccttattatgtttgatactgagccaatgaagcctagtaatacaggaaagttaattgcagatgttctgcctgatacacaggcttttctatggtcaaggactgagcctgatcaaagaatgcttgatgtactgcgtgatccgagccgacagccttatctgatttttcctgatagttacgccacgccatcgcgaactgtgtatcagcaactgccagacacacaaaaagcgccgttattcattatattggatggcacctggcctgaagcaagaaaaatgtttcgcaaaagcccgtatctggatgatattcctttgttatcaatcaatagcattgccaaaatcgactatttactgcgaatgccatcaagggaagagcaacactgtactgctgaggtcgctgccgctgcgttagagttagccaatgattttgaagcatcccaacaattattgaaccatttcaatcattttcgggaacagtatctggctgggaaatcaaatcatccagcggtataaatcacagtaattcctgtcgatcacggctaaagttattcatggtaattgcttaactaatgatgattgtttattgacgtgttcttaacaaggagcgaaaaatgagccagcgtggacttgaagccctgctacatcccaaatccattgccgttatcggagcttccgagaaaccagaaaaagccagttcgctcctgatgcggaatttgttagcaggaaattttaccggcccgatccttcccgtcactcccaataaaagttctgttctcggtgtgctggcttatccttctgtcgacaagctacctttaacacccgatttggcggttatttgtactcatcacagccgtaacttatcattattagcccaactgacggagctgggatgtacaacggttatcattctctcatcccatccctcccagtttgctgaactgaagcaatacagccagaaacatcatatccgcatccttgggcctaacagcctcggtattctggctccgtggatcgggctgaatgccagtttctcacccattcctattctaaagggaaaactggcttttatttcacaatcagccgcaatatccaacacgattctggactgggcaaaccatcgcaatatcggtttttcgtattttattgcactgggagatagcgttgatattgatattgatgacctactggattttttagcgcgagatagtaaaaccagtgcaatcctcctgcatctggaacatattagcgatgcccgacgtttcctttccgcttcacgcagcgcatcacgcaataagccaattctggtcgtcaaaagcagccgtacccgtaaagcgcagcagttactgggagaacagcaaaattttgatgtcgcttatgatgccgcaattcaaagagccggattgttacgcgtacaggatacgcatgaaatgttttccgccgtcgaaacactgagctttatgcgtccactacgcggagaacgcctgttaattgtcagtaatggcacggctccggccgctatggcgctggatgaactcatcagaagaaccggtaaattagctgacttagaggaagaaactattgctaaattggtcagcgtactaccggatgtacaaatcttacaaaaccctctggatctcggtgacgcttcgtcaactgcacaatatattgacgcactgaaaatactgctagatagccgtagctatgatgccttattgttgattcattctccctgtgcaatttccgacagtatgcaaacagccgtaaacgttattcggactatcaaagaacatccccgtggaaaatggctgacaatattcacgaattggtgtggagaatattcttcgcaggaagtcaggcggttattcagcgaagccgggatcccaacctatcgcacccctgaaggagcggtcaccgcatttatgcatatggtggagtatcgccgtaatcagaaacaactcaaagaaacaccggccctgccaattggtattacttcaaatacggcccacgcccatgattgcattcaacaggctcttaataagggtaatactcagttagatactcatgaagtccattctattcttgaagcctatgggctgaatacattgccgacatggattgctcactccagtgacgatgcggtcagtatcgcagaaaaaattggttatcctgtggcgctgaaacttcgctcacctgatattcctcataaatcagaagtacagggggtcatgctttatcttcgtactgcaaaagaagtgaaaaccgcagctcaggccattgttgaacgtgtaaaacagaattttccgcaagccagaattgagggtttattggtgcagaatatggcaaaccgtgccggtgcacaggagctgagaattgccattgaacaggatgaagtttttggtcctttaattatgcttggagaaggcgggatagactgggttaatgaaactcaggcggctgttgctctgccaccgcttaatatggctttggcccgttatctggtcattcaggcgattaagagcggtaaaataaaatccggagcatcattgcagcctctcgatattccctcacttagccagctgctggtgagagtctctaatttactaatcgattgcccccaaatcacccgtctgaatattcatccattactggcatccggcagtgaatttacactcctggatgtcacaatggaattaaccccaatcactgacgatccgcggaatcgactggcaattcggccttatcctaatgaactggaagaaactatctatatcaaagatgattttgcctgtttgctgcgcccgattttgccggaagatgaaccgctattaaaagaattcattgagcaggtaacaaaagaagatctttattatcgttatttcagtgagatcaatgaatttactcatgatgatctcgctaatatgactcagattgactatgaccgtgagatggcttttgtcgcaatacgttatccgacaacaaaaccagagattatcggtgtcgcacgtgcgatggctgatcccgataatattgaagcagaatttgctgtattggtgcgatcggatctgaaaggaatcacgttaggatctcagcttatggctaaactcattcattacgccaaagaacatggcattcaggtcttaactgcaataacaatgccagaaaaccgcaatatgatcaggctggctaagaaactgggatttaccatcgatatccagttagaagaaggtatcgttaatcttgttttaaaactttagccacaattgacaaaactagtggtatcatcgccagatcattttgattcacaaatttacgatgggattataaccatccaaactaagagaaaaatcgcactgtgatgttgtttaaatttaaacaagcaaaacaccaacaacaccttgcacaactgcctaaattaccacagtcagttgctaatattgaaaccctttatcaatccgaagagtttcgcagcacactgttggaacgtattgcaggcgccaaaaagcatatttatatcgccgcattatatttagaacatgacgatgccggtcaagatattttaactgcgttatatgaagccaagcaaaaacgccctgaactggatatcaaaattctggtcgactggcatcgcgcgcaacgtggtcgtattggcgcacaagcagccgcaacaaatgcagactggtattgctctatggctgaaaaatacccgaatgcccatatctccattcttggtgttcccgtcaatacccgtgaggcgctaggtgtcttacatttaaagggttttatctttgacgacactgtgatttacagtggtgccagtattaataatgtctatctgcaccgccatgaaaaatatcgttatgatcgttatcatttactgcataatgcgaagctcgcagccatcatgaagcagtatatagatgacagcattatttctgacaaagcagtcaataatctggcctgcccaaaccgccctcgtagccttgaaataaagaattttatccgacaatttcggggccacttacgcagtgcgacgtatcatgttgaaaatcaggcttcaaatgaagagctggcagtcactccgcttgttggattagg

SEQ ID NO: 468 - DNA, 12219 bp, Xenorhabdus sp.
  CDS (6275)..(6991)
gctgaccgtatattaagcggttactcctcattgggcgcgattatcggtgcgctggttgcacctttttacgtctggtggtttaaacctgaatttacctttcccgtcgccatgctttcatgcctgatacttatgcgccaccacgataatattcagcgtctctggcgagggcaggaaagccgtatctggcataaactgaaaaagaaaaaagaaatgactgaaaaagaaaaagttcaggcagagaaggaacagcatcaacaggacgattaacacgaatgtccccgcaagggggctattccctctttccaaatagcatggagagacattagtgattgccccaaaagagattacttttttcccgccgccagatcccaatgaaaatccgtgggtgcatggaaaacctatcgaagaagttatagaagtcgtggattatgatcctgaatgggtcactcagtggcaacaactttctgctgatataaaatctgtattgggcagcacagtcctccggctggagcatgttggctcaacgtctgtgccccatcttgccgccaaaccaatcatcgatatcgatcttattgtggaagatcccatacaggaaaaaaagtatttgccagcactggaaaagctaggttactacttaaccgtacgtgaacccagcttttatcagcatcgctgttttcgtctggcaaaaccaaaagccaatctccacgtatttggccctgcctgccctgaacatatccgccatattttattccgcgactggctcagaaaacaccctgaagatcgggaacgctatatctctgctaaacttcaggcagcagataatgtaactcacgttatggattacaatcagagaaaacatgcggttgtgcatgaaatatacatgaagatattcaagcaccaaggcttgctgtagttcttaacattgtaaaaccattgtgaagggggttatatgaaagcacttgtttatcacggagccggaaaaaaactttgggaagagaaagcgccaccccaactcattgagcccacggatgctattgttcgcattgtcaaaaccaccatttgtgggacagacctgcacatcctcaaaggagacgttcctactgttgagcagggccggacactgggccatgaaggtattggtattgttgagttaatcggcgattctgtccgtaacctcaaagtcggtgataaagttatcatctcctgtattaccgtctgtggtagctgtccctattgtaagcgccagctttatgcgcactgcaaagatgggggctggattctggggcataaaatcgacggtacgcaggcagaaaaagtacgtattccccatgctgataatagccttcatcgcctgccggaagatgttgatgaagaagccgccttaatgctcagtgatattctgccgaccgggcttgaaattggtgttatcaatggcagggttcagccgggccataccatcgccttaattggtgcagggcctgtcggactctctgcgctactggcatcccagttttactctccggcacatatcatcatgatagataccgatgataatcgtctcagcgttgctcagcagtttggtgccaacacaattatcaacccgacacggcaaaacgtggttgaaaccatccacaaattgactgatggcattggtgttgacgttgctattgagtgtgtggggatccctgcgactttccagatatgtcaggatatcatcgccgcaggcgggtttattgctaatgttggtgttcatggcaaatccgtcgatttacatctggaaaatctctggatcaaaaatatcaccatcaccactgggctggtcaatacaagcagcacgcccatgctgttgaaaagcgttcaatccggtaagatttcaccggaaaaattggtcactcaccattattcattgagtgaaatagagactgcttatgacatatttggcaatgccgccaaagagaaagcactgaaaatcgtcctgtcagcataaattgatgtagcaggaaaaaagacttttcctgctacatgctgaaacccgctgaaaaacagaagataaaacacgatgcagctgagtgtcacaaaaactatttgctattcaactgttgttgatatctgtcttgtttttcagcattctccgccaacattggaaaatctttcactgaccaataatgttgcggtgaaggtaagtttttcatgctctttgttggccataactgaaattcagccagtttatccaatgaaaaattccgataggaatccggtaatgagaggcgtaaagcaaacttttccttgccgaagggcattaatggataacgattatcccgggtttcataatccctgcgcaataccagaaacttttgtggaatacgctggtagctgttccaccataaaccatccaccttatcaaacatcttctttgtgcctgacctgtcgtaagcgcccagctcatttaaggccattggcaggatattcgctatcgcaacagaaaagtgactcacagaagatgcctgaccttgcagaataagcgtcagcgctagtctcgcgcccaataaattggagtagagatcttccggggaaaaagctgaaatagcctctgaaaaaccgggaatagactgataaccgtaccattgggcaatctcatgccaggcggctaactgaaatgccagctttgcagccagatacgcactcagagtgtagcgttctgcgggatctgttggcggggtaaaggcaaaaaagtgaatcttacgtgccgcaagctcattatccaaagacagtgtccattcctgaccaaggtgagcataaatctggctaaaaagataaagcgtatagtccgcagtatccctgacatgggaaatatcaatgaacccgcctttctcagtatacagcaggccgattttttcattgctgacccccaataacgccgcgcttgccccaagaacgctatcgttatagtgatgctctcccaatttatctgcctcaacaatattatcaatatgatagagaggtacagaaaaccctaatgtattcactttaagatcataaccgaatgcacaacatgcccttaaaccttcaggagatttaacaggaggcagggctagccagtccgtttttgcctgttcatgtgtcgtacttttgagcatcggctcgacagttgtaaccggtactgatttgttttggcaggctgccagcagaaaacttaacaatagtgtgaccaaatacttcaaaatgcttctccaacctgaaaataaaacccggtactgccttttccaataccaaaatctaacctgacattcatacgtggcttaaactcaaaacgataaccgacgccaattgaaggaagccagtgccgctctcccaaccttgacggagtatcactcaacgttcccattccaacccagccgacaacgccgtgacgccagtccagcttatgcctcagctccaattgagttgtgaaaatatttttgtcgcggtaacgtccttcataataaccgcgcatacgcaggctattccccaacagggatagctgattccacggtacttcaccggcactaaaacgcgcatagttatcaaaagcgagtactgttttttcagatagctggtgataagtcgagaactgtaactgtgtcgtagagaaacgatagtctgctcctaattcaggagagaaataggtgtaaatcagctcaatcgcctgaccatactgcggattaggcaggaaatcccggctatcataactaaagtatgcacttacaccagaactgataaccgaagccccgccaacagactgttcaaaatattttttcgcctgagcatcaccggcattgacggaggaaaaatttacacccagccccatataagtggcatcagcaacgcggtaaagcactcggggacgaatatcaaattcacgcgaacgataactttgtttattactgttatcctttcccgcgctgtaaccttttccccaataataggtaggtatgttattgagggtgccagaaacaaataaccgccactggtcactggcaagaaagttataattggtgaaattgaggccaaaagcgccggtggatgagccaaacccactgagccccagtgaagaattctgactaatatcgtcgtggctgtcagggcgataaagcccgaccacagccacaccaagccctacgcccatttccggtgtataaaaagggccgggcaatacaccccagtcaattttcttgctggcgtcgaactgattatctccacctaactcactgagccagccgtcaatttttttgcggtcaggcaggatatctgcatgagcagctgaggtagtcaaaataagaaggctggatatcaccagccttttgatagtcgtaaagcgcaacattaaaaacgaaactcgccggaaatatagaagctgtttcggttaccaaaaccaacttctgataatagattgaaattacgggtgacctcaaaacgggcaccaactgtactattccatttatgggcaaggtgttgtttgacgtcgaatttgacgttacctcctcccgcctgctctgccagatcgaccaagccacctattttatctggtaaattattaagcccgctcacattaccttgaaaacgttgagttatattctgatacatagcacctgtccataactggacttttgtgttgccctgtcccacaaataacggttgaaatacaaactcataaccaaggcgaggacttacgacagttgcatcaagctctccatctaagatatctaatttagtacgagtataattagtatctaaaacagcaaaaaactgattatatcctcctgccagagtaaaacctgcaccataagaattccctttgaaattcaacacaaaaggcacgggaccatcttctaatatttcagctcccatgaaatcaacactatctaaaatagtttttgatgtacctttagtttttccatatacgccatatacattcaaaaaaggtaaaacccaagtatctagttttagcatatgagattcacttttttgacgagtgctatctgtttttataaaagtagcgtcttcaaaaggtttccatattggattagcaaattcaaacttaatactatccacaataatattctggcgcaggttcatataaccataactgaccccgaatggttcaggaagatcatagcctctggctcgggcttcatccccccaaatcggcagaatacgggactctgatttagctgagtgggacaaactaccatcgctattagtttgctgtacaccagactcagtcatcgtcaatgaaaaaagtgggcgctcgctgtctgcataactatatgaagttacaaggcagaatgcagttgctaacaatttgctatagttagttaaggtcataataaactcaaaggaaaaatggaggactcggcagactagcataacctctgccacttaaagttaacctaaaatgcttaaaaatgaataactaacatgaaataaatcatttagagttgattgtttttcatcctaattatttcatgtactctcgataaactgactaaatcggagtaaataaccatcaggatcctgcacgagaaactcacgctgacataccgaagtctcgccgatgcaataatgattatctgttactgaacgatacaatttaataccgttatccttcagactaaccagtaaagaagcaacattatccacttcaatttggagattaatcccacgtcccagtggcttactcaactctccggtattccagccactatcatgaaatgcttccagcatgagttgtgcttcccccaaactcagataagcaaaatcaggatcttcccttcttatcaacacgttaaaacccaatatgcgctgataaaagtcaagagaaagcgaaaaatccgtaaccgtcagttcaggaaccattcggttccaataggttatattagtcgttgtattcatatctatccggtttattctgatttcctatctacgaaaacattattacagcttatgacttaactaccacctactgaagtaggtgggttagcgcacttcggtgctgacgactgaaagtcgtcgaaccacgcacctcgtaaacgcgcgtaggtcaaaacattaaagtcaaagtcaccgtctaaagacggtggttttaacctgtcatatggaaaaataaatagagtatctatggaatgtgagttagccagagttttttgctaaaaatcgtattatcatgacgcccaaatatgttaaaaacacactttattagtttgtaccccccaatattgattacaccgcattgaaaatgaagaaaaaacgccctgttttacaagatgttgcagatctcgtcggtgtcacaaagatgacagtcagccgtttcttacgcaatcccaatcaagtttctgaacctctgggaaaacggattgcggcagctctggatcaactgggttacattcctaatcgtgtgccggatattctctccaactccaccagccgaacaatcggtgttttactgccttcactgactaatcaggtatttgctgaagtgatccgcggtattgaatatatgactgaccgtcatggctatcagactatgcttgctcattacggttactctgcacagaaagaagaagaacgtctgctttccctgctttcctataatattgacggtctgatactggctgaacgaacgcatacgcctaagacactgaaagtactggaaactactggtattcccgtcgtcgaattaatggacagtgtctcaccttgccttgatgtcgctgtcggtatcgataattttgaagctgcgcgccagatgactgaatccatgctcggacgtggatgccggagtatcgtctatctcggtgcccgacaggatgaaaggacgctgatacgtctacaaggctatgaagtggcaatgcgcagcgcgggtctacaaccaaagaaaatgatgacgacggcaagttcatcaaaatcattaggtgcccagcttttacaggaaacctgcctgaaatacccctgatgtcaatggactattttgtactaatgacgatatcgcgattggtgctatctttgaatgccagggtcaggggatcaacgtaccggaagaaatctctgtcgccggttttcacggacatgatgtcggtcaggtaatgacaccaaaactcgccagtgtactgactccccgtgaccaaatgggacgcaaggcagcagaagcattactcgctcgcctgaaaggtgaaaaactggaacaaacccttattgatgttggatttacactttcattaggcgaaagtgtttaatttttgtagcttaatatgatgctttcccaccttcaattgcgataagcctcacattttccttttttgccaatcttgattgattgctcaccatcctttgctactgataatgttgccgataaatagttaccggtaacattacacgggtaatatttcacagagaaaattttgcagatcagtcacagggtagccaagtggcaaaatctgtataaaggagttttatatgagcgatacccagcgaccaaaccacgtttttatattgatgggggtatccggcagcggtaaatctgccgttgccaatggtgttgcccgtgaactgagtgccgcttttttagatggtgattttcttcatccccgcgccaatattcagaaaatggctgagggtcatgccctaaatgatgatgatcgtcaaccgtggctgaaagccctcaacgatgccatttttgccatgcagcgtactaatagtgtttctttgctggtgtgttcagccctgaaaaaacactatcgggatatcctgcgtagtggcaataaaaatctgtcatttttgtatatgcaggggaatcttgaattaattgaaagccgcctgaaagcccgtaaagggcactttttcaaaccgcagatgcttatctcacaatttgagaccctggaagagccgacaattgatgaaaaagatgttcatttcattgatatcaaaccaagtcttgacgaagtaattaaaaatacaatgacaacaattgaacgtattactgagggacattcatgagtacattaacgttggtgctgacagccgtcggttctgttcttctgttactgtttttagtaatgaaggccagaatgcacgcctttatcgccttaatgctggtttcaatgggcgccggtatgttttccggtatgccattagaaaaaattacccaaacgatgcaaaacggcatgtccggcacactgggcttccttgctgtcgttgttgcgctcggtgcaatgtttggaaaaatcctgcatgaaacgggcgcattggatcagattgccgtgaaattactgggtagtttcggtgaaaaacgggctaattatgcgctgggtgttgcggggcttatctgtgcattacccttgttttttgatgtggcagtcgtattgttgataggtgtagtttttgccgttgcgcgccggactggcggcaatgtcgtaaaactggctattccactgtttgccggtgttgcggcagcggcggcatttttggttccgggcccgacgccaatgatgctggcttcccaaatgggtgcggattttggctggatgatcctgattggcctgagtgcagcaattcccggcatgttactggctggcccgatatacggtaatttcatcagtaaacatgtcacactggatttacccaaagatctgaataccccaagcatcggtaagagccagatgccttcctttgctttaagtctggcattggtactattcccgctggtattagtcggtttgaaaactatcgccgcccgttttgttgatcaacaatcagccctgtatcagtggctggaatttatcggacatccgtttactgcgattttaattgcctgtctggtggctatttatggtctggcaatccgtcgtggtatgagtaaagaaaaagtgatggaagtgtgctctgcggcactccagccagcgggaattatcctattggtgactggtgcgggcggagtcttcaaacaggtgctggttgattccggtgtaggccctgcattaggtaacgcattggttggggcgggtctgccaatcgctctggcctgttttattctggcgggagctgtgcgtgtgattcagggttctgccacagttgcctgcctgaccactgtcggcttagttttgcctgttatcggtgaattaggttattccggcgcacaaatggcagcactatccgtctgtatcgcaggggggtcactgatcctcagccatgtcaacgactccggtttctggttgttcggcaaatttaccggagcaactgaaggacagaccttaaaaacctggactatcatggaaactattttaggcaccaccggggctattatcggtatgatctatttcgccctgctgtaataaattaacggcacattatctggtggataaagtgccgtttttgtttgttagtcacgtttgttcgccactaaataaatttcatttccttcccgtttacctactgcgataaccagtaaaacaatttcattgtcattaacttcgtaaaccaaacggtaaccagaagaacgtaattttattttatagcggttatgacggccacttaatcgagcagatggaacatgtggattttccatacgttcagccaacttctttttaaattgctcccgaacgggatgaccgagctttccccattctttcaatgcccgtttttcaaatttgagactataactcattgagatttacgctcacaaattcgggaaactccatccgctcatcagccattttgtttaactcagcatcttcggcaagttccaaatagtacgcataaagctctggaggtacacaatagaatgcgggttcattgcgattcaatatagcaacagccccaccttctccatctgcaacggttcccattgggttacgttttagatcggtaatactggctgctatcgttgtcaaaatctgatatgacatactgtcctccttattaataaagacttattatagcacttttaaaagtgccattttaagatctttttagcatcctgtcctcaccaccgatttactccccaactaactcaataaactgcttatagagcccttccgcactacgttcataacccgcagcagaaagatggatataatcaggacgcgcaaggccctgttgctcccagatgcgaattgagcatgttcctcccataaatgcctgccagttccagaacagcgtatgttgtttgctggcgacttcctgctgaactcgaataacatctctaagcaaggcaggttgctgctcttcacagcctgtcgcatatttgtttttcaaagaatcattcgggccaatcagcaggatcaccgcttcgggtataacactgcggatcctctgtattttcgcggtcagttcctgacgatagctatcaaggtctaaagcatcattaaaagcctcattcgtgccataggcgagaataactaaatccggcttcaattgtgccagagtattaatccattccggctgccatttattcagcatattaatggtcgcgccattaattccgagtgcagataacataaccccgctattctggcgacttatcagccagccacccatttttaactgagcatcatgtgctgagagcttaagcggaaaaaaaacagggttatccggtgaaaaacgccattcactttgtgtctcaggtaatcgccataaaggagaggattgcggtttcaaataagtttcatcatgagactgataaagaacacgcattcgatacttgtgattgtcagacggagataaattcattgttattgtgctaccagcacgttcgggcatagcgataaacccacccagagggaaatcagccctgtcctcttttcggctggaagaaagccaccagcccgtcttatcaccggaaaatttgactctcgcattgcgctgccccggaatagtcatcgggctgacaaaacctggccccgcatcgccataacgttgctgaaataaatcccgtagtttacctgtgaaaaaatcagcagctgtatgggagtctcctaattgtacgatatgcagcgtatgggaatgactgtgccgcaatttatcagccaacaatgcgagattaggctcagaaaagtccactagctgcttctgataatttatctgcgttacctgagattccgatggtggtagaggctttttctcatggcatgataataagcccatagaaagcaagaagattaaacctgcacccattaaccggaaaaacctatggaactgtctgaatggctgcattttcctcaactggctcctgaatcgcggtgattaatgaaaagatagagtcagcaatgactttctgcccactcaaactaaagtgaataccatcaccacttctgagtttgattgtactgctgccatcaccaatataatctgaataattttctgactgatatttgaacatatcattgacggaaacataaatctcacccatttttgccacctctgcctgatacaatttactgaggtaagccatattgccggaaagctttttctggcgcatattaggtggcccgatccagataacatcaacattatgctcacgggcatcattcaggataacttcgatcctttggcgataaacactttcccaactttcactcgcaaatttcaggtaactttctccgggccttgcaggaataccccacggatcattcggccctaaaaatacgataaccagcctgatatccggatcctgatttaacgcattgcggatcgctttcggccagtcaaagaaactagaataagtcagcccggtattttgtctgctcaaattgataccggaaacaccatattcctgataaagacggcgcttcagatgtggagccactccttgcatcatcgaatccccggcaaaaagtaccttatccctgcttcctaacctgacctccgttttctgaataacctcaaccggacggttggccttttgatcattgaccaataaaggtgatgatgggattttaatatccttacttaataagtcaggaaactttaaataacgattctctaccggataaatatagccctgcaaaaaatgtagcccaatctgaaattcaggcaataacgcgggagaagatccgccattatcacgggattgctgtgatttctcctgatgatgaccgcctgcatatgccataaacgtttcaccggccgcaacaaccccttgctgtatattatttcccaaatcccatagcgggctcaccttacaggaca

SEQ ID NO: 469 - DNA, 11888 bp, Xenorhabdus sp.
  CDS (8541)..(9500)
tttagttttaattttatccgtcactatcgaggtgtaccatttttaaccgagtagcaactttctgccggaatttgctgatccgtgaaaccaagataaaacgcgaaacacaggcagccagtgaaaggccagtcaccatatctgaccatcctgctcataaaaagagcagcactctgcctaaacgccgcagagtgaatcgcatatcttcatcaaatgctgaaaacatcaaaatgaagaataaatccggaaaggcaaaaccttctgattccccaattaccgttattccacgggaacagcattctatttcacgtaaagatatcagtgataatgcattgaaggttttatatcgcctgaataaatcgggttttgaggcttatttagtcggcggcggtgtccgtgatttactgttgcataaaaaacccaaagattttgatatcgcgaccaatgctacccctgaacaggttcgcaaattattccgcaattgccgtcttgttggtcgtcgcttccgtctcgctcacattatgttcgggccggatgttattgaagttgccacattccgtgggccacatgaacaagttgaaagcaatgatcgtaatcagtctcataaagcccagagcggaatgctattgcgagacaatatctttggttctgtggaagaagatgctgcacgccgcgattttacaattaatagtctttattacgggattgaagatttcgcattacgggattatgtcggtggcatggctgatctggaaaaagggatcatacgcctgattggtgatccggaaacccgctaccgggaagatccagtgcggatgttgcgtgcagtccgcttcgccagcaagcttaacatgaccatcgaaaagaacacggctgagccaatcccacgtctggcatttctgttacgggatattccatcagcacgtctgttcgaggagtccctgaaacttctgcaatcagggcacggttacagcacatataaactactgtgtgaataccagttgtttgagccactattcccgttaatccagcgcggtttcacccagtccggtgattcgccgatggaaaaactgctggaacaggtattaaaaaataccgattaccgtctccagaacgacaaacgggtcaatccggctttcctatttgcggcaatattgtggtatccactgattgaacatgccgagaagctgactcaggaagggggcttacagtattacgatgctttcgccctggccatgaatgatattcttgatgaacagtgtcgttctatcgccattccgaagcgtcataccacaacaatgcgtgatatctggctgttgcagcttcgcctgccgcgccgtcagggtaaacgggcaaataaattgatggagcaccccaaattccgggcagcctacgatttattagaattacgcgccagcattgagccacgccatgagctgaaagaactggtacattggtggacagaattccagcaatctacagcatcacagcagcggggcatgatctccgagcttggcagcgagcctgttcgtcgcagaacccgtcaccgccgtggcaaccaccttcgtcataacaggaacaacaactagtatgacctgggtttatatcgccattggcagtaatctggcctctcccttgcagcaagttaataatgcacttgctgcacttaaatcgatccctgatacaacgtttattaaccgttcctcattttatcggactaaacctatggggccgcaggatcagcctgattacctcaatctggttgttgcattagatacaaacttacaaccggaaatattgcttgatcacactcaggcaatagaactggcacaagggcgtgtccgtaaagacgaacgctgggggccaagaacgcttgatttagatattatgctgttcggtgatcacattattaatactgaacgcctgaccattccccactacggtttaaaacagcgtgaatttatgctttatccgctggcagaaatagccccggaccttgtgtttcctgataaagaaacattagcagaacgattaaaacatgttccagaaaatggcctgacgttttggttgtaacacagcagttttatgaaggaaaagtaacacaatatctcatacaatcatggcctatttctggataatcagaacctgttccagcgggtatcagcttagatacccgaatggacaaggctctatacccaacaacgggtatgaatattcaggagataacaatgaaacccacatctctggctcatcttagccagttaaaaaaagagaaacgtaagttcgcaacaattacagcctatgatgccagcttcgctcacctttttgctgcacagggcatcaaagtcatacttattggtgattcactcggcatgaccgttcaggggtttgattccaccttaccggttactgttgaagatattgcctaccacaccaaaagtgtccgtaccggcgctccccagacttttctcatctcagatatgcctttcatgagctacgccacaccggagcaaagctgtaataatgcggctgaattaatgcgttcgggggccaatatggtcaagattgaaggcggaagctggttgtgtgaaacagtaaaaatgctgactgagcgctcagtgcctgtttgcgggcatctgggcctgactccacaagccgttaatgtgctgggaggttacaaagttcaggggcgtgatgaagagacagctcagcaactgctcgacgatgccattgctttggaaaaagcaggtatgcagctattagtgctggagtgtgtaccaacagaattgggccggaaaatcaccgaagcgctggaaattccggttattggcattggtgcggggaaccatacagatggtcagatcctcgttatgcatgatgctttaggcattaccgccaaaccacccaaatttgctaaggacttccttaaagagaccggcaacatacgagatgccatcagcctgtacatcgaacaggtagaaaatggcacgtaccctgaccaagctcattcattcaactgatttatacccgcgagatttccagaaaaacactaagttttcagaaaaataacgagtataacccagcatgattgctaattatgactgctaattaaaggagtagagcaatgctgatcatagaaacaatccccattttacgccgtgaaattcgccgttggcgtcaggcaggaaaacgaattgcctttgtccctacaatgggtaatctgcatgatggtcacatggctctggttgataccgccaaggctcaggctgatgtggtaattgtgagtatttttgttaatccgatgcaatttgatcgcgaagatgacttagtcaattatccgcgtaccctacaggaagattgcgaaaaactgagccgtcgtcatgtcgatatagtgtttgcccccaatgctaacgaaatatatccgcatggcctgaatggcagccagacttttgttgaagtccctgaactttctcatatgcttgaaggtgccagccgtccggggcatttccggggagtcaccacggttgtcagcaaactgttcaacctgactcagccggatctggcctatttcggtgaaaaagattttcagcagttacaaattatccgcaaaatgatcactgacatggcttatgatatcactctggtttctgtgcctattgtccgtgataaaaagggactggccttaagctcacgcaacagccttctctctacagaagagaaaaaaatagcgccgcaattaaaccagattatgcagcgcgccgccgaaaaactgaaaagtggcgagcggaatattgaacacctgctcgagatagtctccacggatctacgtgaagaaggttttgtaccggatgaactgtttatccgtgacgcagaaaatctggaacccttaacgccacaaagtaaaaaagcagtgatcctgatggcagcatggttaggcaaaacacgcttgattgataatcagcaggttgatttaaccgcttgatcttgcttcgaggatgtgtgtcagcagtcgccccgacacgatccacatcctcatatgaaaatagctgtctgactggtcgttatccaaaatcagcactagtaaacgcaattttattatttaatattcataaaccagctttgttatctttctataccgttatccccgtctttatcaatgcatccggttaacaaggaaaatcaagcatggcacacaaattacgctttggcagtttactgctattactcgccctttctggcaatgcactggctatacaacctcagcaaattactattggttatcaaaaatcgaatatttttacgttgctaaaatcccgaggaactctggataacgcattagaaaaagaaggtatcaaggtacgttgggtagaatttcctgccgggccacaaatgctggaagggcttaatgttggcagtatcgatttggcatcaaccggtgatgttccccctgtttttgctcaggcggcaagagcagatttagtttatctcgcctacgcccctgctcacccgaaaactgaagccattgtggttccgaaagactctgccattaaaactattcaggatctgaaaggtaagcgcgttgcgctgaataagggttctgatgtgcactatctgcttgccgctgcgctggaaaaagccggattgagctataaggatataaagccggtttacttaccccctgccgatgcccgcgcagctttccagcgaggagccattgatgcctgggctacctgggatcctttcctgtccgaagtcgaaatcaataccggagcacgccagataactaatggtgaagggcttgtgcctcattacacgttctatcttgccagccgtaaatttgttgatacttatccgcaaacagcggaaaaaatcattcaggaattagttgttctcagtgactgggcaaatcagcatcctgacgaagcagctaccattcttgctaacgccacgaaacttgataaagctatctggcaacggacgcttgcacgttttacttatggggctgagcggatgacaccgactgtttttaaccagcaacaggttcttgctgatacctttacccgtctcagattattgcctgtaaaaataaatgtccgtagtgcaagctggtctttagataatataccggtcaatacaccataattgaccgtctgattggggtctgaagtcatccctgacaagtaaccctaatagatccgatatagccatcatcactattcgtgctacgaatccataaccacaccgattgataacctcattttacgtttgccaatgctccctacacagggagcggcaacggatgcctgaattatccctttcagtcttcatgcttgataatcttgcttatccacgagcgagcacttttattcagcatactctttctgaggttcctctgtgactggccgctcagcgccaccaatgctttcaccaaaagcgcctgctttggcagaacggatcgttgaattcgccttgtttacctgcgctgaatctgttttcagcaatggcatgaccaattcggcaaaccgatgtgcttcttcgaggtgaggatagccggagaaaataaaattactgatccccaatgcctgatattcgcggatacgttcagctacctgtccagggtttccgaccaatgccgttccggcaccaccacgaaccagacccacaccagcccataggttcggcgcaatctgtaaattatcccttgacccctgatgaagtgaattcatccgtgcctgtccggcagaatccatccgggaaaagattttctgagcctgagcaatagtctcatcatccaaatgagcaatcaggcgatcagcagcagcccatgcttcctcttctgtctcacggacaataacatgcagacgaataccatattccagagtccggccctgcttctctgcgcgctcacgaacctgttgtagtttctgcgcaaccagttcaggtggctctccccaggtcagataggtatcaacctgctgtgctgccacatcaagcgcatcttcagaagaaccaccaaaatagagcggagggccatttttctggataggcggaaacaataattctgccccttctacctgtaaatgtttcccctgataatctactttttcacctgccagcatacgggaataaatatcaagaaactcacgggtcagctgataacggtcagcatggctaaggaaaataccatcacctttattttccaccggatcaccgccggttacgacattaataagaacccgcccctcagaaagcctgtccagcgtggccgtcatccttgcagcaagtgaaggtggctgtaatcccggtcgtaccgcgaccagaaaacgcagattacgggtgacaggtaccagagcagaagccaccagccacggatcttcgcaacctcttccggttgggatcagaacaccgtgataaccaaggctatcaacagccagagcaatttgttgcaggtaaggaagatcaacagcacgcccacctttggcagtacctaaatagcgcccctcaccgtgggtaggtaagaaccagaagagattaatgtcactattgccataaactgtcattgtgttttccttgatagatagtgtcgcggacagatttgtatttatttttcttttagatgattgctcgtaatgattacgatgcctgattatctggcagcactttcaggattatccattttaccggaatgcagccaatcagaatttcgatcatgcttcccctgctcacccggtgccataatcgcctcaagaacctgggcttctaaagctgataatgtcggcatcgtaattgttctgggacgtccaagtgggacctccagatccataccgatctccccctgctctatcagtaagatccgatctgcgatcagaacggcttcatgaacatcatgagtcactaaaatgacggtaaatccatactgctgccagagtcgcgttaacaactgctgcatttccagacgggtcagagcatccagtgcgccaaacggctcatcaagcaataataaacgggggcggtgaatcagagcgcgagccaatgccacacgctgcttttgtcctcccgacaatgccgaaggccagtcattcgctctgtcagccagacccacagcttccagtactgccagtgcttccggtttccagttaccgctaagacccagcccaacgttatcaatcacttttttccagggaagcagacgcgcatcctgaaacatcatccgtacttcactctcagatgcactcaggggatcaccgtcagcactcagactacctgcggaaacagattccagccccgccagtaagcgtagtaacgtgcttttgccacaaccactacgtccgacaatagccacaaactggcctttttggatggataaattgagggatttaaggatttcacgctcaccaaactgtttgctgacaccctccagagtgaggcttaacccttgctgaactaacgacagatgcttcatgagtttcttcctcctgtctgccatgacggatgccaacgcaataaccagacttcaagcccgtatgccaccatatcagccagtttacccagcagcgcgtacagaataatcgccaataccacgatatctgtctgcaaaaactcacgggcattcatcgccagataacctattccggcgtcagcagaaatagtttcagcaacaatcagggtcagccacattaagccgagtgaaaaacggacaccaacgaggatcgaaggcattgctcccggcaaaataacctgccagaacaaacgccagccattaagcccatagttacgagccatctcaattaatccccgatcaagatggcggatcccatgagaggtattaaggtagatagggaagaaagtccccagagaaactaaaaatattttggcacgctcatcaataccaaaccacaaaataaccagtgggatcagtgccaaatgcggaacattacgcaacatctgaaccgtgctatccagcaagcgttccccggtttttgacaaccccgttatcacccccaatgcgagtccacaggtgccaccaatggcaaacccactcaaagcacgccaggtactgatataaagattgctccagagttccccgttttgcagtaacgtccatcctgcttgcagtaccttttcaggtgggggcagtatacgatccgatagccagccttcataaccagcaacttgccagcacacaacaagtaatcccggtagcaaccaaggcaggaaacgagacttaaataacgatgtccggttaccacctaaaaagaaaatacgcatagaaaccccacttatgcagccaggattagaatcagttatttcatttttaaatctcgaagcaaatgaagagaaataaatatttttactttgtaaatctaaaaagtggcaatagaacgcaacacacagcgtgtaatgcgcgaccaggtatattacgattggttcatgattcacaatttatttattacttaaaagaataacttttataattaaaatatttactagccagagaatatatttctatattgacgaaatatttttctgacaaccttggtgcaatgaactttcaacagctaagaattatccgtgaagcagaacgctgccattttaacctgacggaagtggcaaaagtgctctatacatcacaatcaggcattagccgtcatattcgcgagttggaagaagaattaggtgttgagttattcattcgtcatggtaagcggttccttgggctgacagagccgggcaaagagatgctgaccatcgcacgccgcatacttaatgatgctgacaaggctcagcgattagctgaacactttaccgggcagcatcagggagtactgaccattgccactacccatacccaagcctgttatagccttccccaagtgataaaagtattccgtgaaatctacccagggatccggctggtacttaatcagggttcgcccacagaaatcatgaaaatgttacttaacggtgaggcagatattggtattgcatcagaaatgctgacccagaatagcaatattactgcattcccctggtttgactggcatcactctttactggttcctgcggaacatgaactggtctggaaccctgatattacactggaacaactggcaacttacccattagtcacttaccgatacggtattgccgggcgttctcagattgataaagcatttcatcatgcgcggctcaacccggatatcgtcctcagtgcgcaggactctgacgtagtcaaaacctacgtaaaactggggctgggaatcggaatagttgctgaaactgccagccagcataatctcgatccagatctagtcacactcaaggcccgtcaccttttctcccccaacacggtctggatggcagttaaacatggccagttacaacgtgactatctctgggaattcatactcctgtgtaaccctgatttatcgctggataaaattaaaaacagcgtcgttgcaggtaataaaaatattcctacctggcttgattttgaaatttgagacattcgaaagcccttaaaaattagctaatttttaagggtaagcaaaaaaccgtcatctcccggcaaacggaatatactgccagcctccatctcattacccagtactgcctgaacccaaacggtgccatctgccaatctgagggaagagaggatcattccggttttacgccagcgggaacccaactgccattctaattcactcccgacctccggaagataactggaatcaccggccagccaatacatggcccgcttgttaacaccacggtatttggtacgggcaatagtcgccagccccatgtacatccctttttcaaaactaataccgccttcaatattgtggagattcactgcctgaggaacgagctgtgcgctgacagcagcctcaatcactggaaaaccggcttctatatctaatgccagccactgttcactattacttagctgtgccggaaatttttccattaactctgcggccatcacagtatctgtgattaataaaaatctctcctgcggcgatgaaaaataaagtagcgtagtagcaccatgctgaataaccgtattattcacatctggcaaaacagggaaaaatactgccaatgcagcccggcaattttcacccgcaacccccaatatcagacttttcgtttcctcagccaccataactttagagaacaccgcatatttctttaattcagcaacctgtatctcaattacactgcgacgctcaatataggcatacccttcatcacgatgaaataacctcagactactccacatttttcctttggcatcacagtgagccgtcagtacatgctggttttcagccagaatattgatatcggcagtcagttgcccctgaagatatttccggctatccataccggtaacagtaaccaatccccagtcattaagagaaataagtgccaatggaagactggttgaaggcactgggaaaaaggaagatgacttaggtagaatttagctgaccataatggctcctgtcgataaatattctgtttatatccgttatttttcaataacagtcatatattgaagtaaaaaacaaatgatgctgataagcacagatgaaatgaaaataaaaaatacaacccttttcaaaatatggaataacaatacaacctttttaaatttgacaaaaaaatcaaatgtcactataaaacctctagttaacctgaggtcaatagaaatggaaaaaaataaacatattgatattaatagggcattaacggttggagaagtggcaaaacgtagtggagtggcaatatcaacactgcatttttatgaatcgaaagggttaataaaaagttcacgtaactcaggaaatcaacgccgctttcccgctgttgtactacgttacatcgcaattatcaaagtcgcacaaagcactggcattcccttgaaggaaatacagaaagtccttagccaattccctcctaacagtaaactgacagccgaacaatggcgcatactttcctcacaatggcgtgatacgttggaacagcgtataacaaaattgacccatctacgcgactatctggatagttgcattggctgtggatgtctttccctgacagaatgcccgttgcgcaacccaaatgatattctgggagaaacgggaacaggagcaagaatgtttgaacaagaatatgacggacgtaaaaaataacttatcgaaaaattatcttttttaataatggaagatatatttttgactcaataaacacatgttatttatttttttattttatatcatcctctgtaattaattatcagaattttattttctctgcctactctattttcctgaaataattttaaaattgcataaattaataccattttattccgttaaatttcttcggagcacaatatgaaaaatattttaaaaaaatcatatctcgcgatgacattagcactaacaggtatcatcacaacatttactatccccaccgcattggctaaacctgctgagcaacctgtaaatcaggcacccggttattaccaccatatgctcggtgatgtaatggtgaccgctgtttatgatgggtatgttgatctttctccttctttattgaaaggacttgatatcaacagtatcaaaaatctgattacacggatgttccagattgaaaataaagagggtgttcaaaccgcgatcactgcctaccttgtcaacaccaaagaaggtttggtattgattgatgcgggtagcagcaattgctttggccctactgcgggaaatattgtagataatatccgtgccgctggttatcagccagaatcggttaaagcaatattactgacacacatgcacccggaccacgcctgtgacatcacctccccaagtggagaaatcgtattt

SEQ ID NO: 470 - DNA, 14229 bp, Xenorhabdus sp.; identical to SEQ ID NO: 229
  CDS (1936)..(3513)

SEQ ID NO: 471 - DNA, 15281 bp, Xenorhabdus sp.
  CDS (11014)..(12033)
tttttctttaaaacaatattgcccagcacgtctgaatgaaataagtgaaaaaactgatggagcgcctccaccaagttatatacgcgcttattttaattcagaaccaataaaaatagactctctctatgatgtgtatcataacaaaatcggtgattttaaggattcagatcaaggatggactattactcttcttcaaccaccagaagggacaaaacttgaatatgccggagatcccagccaatggacatgttggaattaattaggatagatgagcctctgctacttcagaggctctgaatatatctttatttagtattatactgagcttcggcttcgataaaacgctgctggatcgtcttatttggtgctttacccaacaagctcaccaccacaatggcaagcgaggccagaataaatccggggatgatttcgtacagaccaaaccactcaaacttcatccataccagtacagtcacagcacccaccagcatacccgctaatgcgccgttgcgtgtcatgcgttgccaaatcaccgaaatcaggattactgggccaaatgctgcgccaaaacccgcccaggcattactgactaaagccagcactttattatttgggttagtcgcaatcacaatggcaatagccgcgaccaacagcaccatcatccgtccgacccataccagttctttctggctcgctttcgtacggataaaggctttataaaaatcttctgtcagagcactggaacacaccagcaactggcagctcagtgtactcatgaccgcagccaaaaccgcagacaacaagatacccgtgatccacggattaaataacagtatgcccagctccataaaaatacgctcatggttttgtaataccgggccagcctgatccgtatggattgaaaaatatgcaataccaaagaaacctaccgctgacgtacccgcaagacataacagcatccacgtcatactgatacggcgcgctttatggattgtctgatgagaatctgcggccataaaacgggccagaatatggggctgaccaaagtaacctaacccccagcccaacaatgagatgatggccacaaaattcaggttcttaaatatatccatatagacaggatttttcgcctcaataatgataatggccttctccacgccacccacgttgagtaaaatcagcacaggcaccagaatcaaagcaaaaatcattaaggttgcttgcacggtatcagtccagctcaccgccaaaaatccgccgagaaaagtgtaggcaatcgtagctaacgcacccagccagatagcgtgttcgtagctgataccaaatgtattttcaaacaacaagccacccgttacaacgcctgacgcacagtagatagtaaagaaaatcaggataacaacggcagagataatacggagaattttactgctatcatcaaagcggttggtgaaataatccggtaaagtcagcgcattattattgatttctgtatgaacacgtaatctgcctgcgacccagcgccagttcagataggctcccagtaataagcccaacgcgatccagatttctgatacaccggataaaaaaatcgcccccggcaaccccattaataaccagccactcatatcagaagcgccagcagatagtgctgttactacactgcctaatcgccggccacccagaatatagtcatcgaaattcttggtggcacggtaagccatgaagcctatcagtagcatcccggctatatagacaatgaaggtaattagcattggtgaatttactgtcatgcaggttcttctccatagtattttttgcaaatcctgtttattcagactacttgatttgcgtcaatgatgtgttctgtacttatacccgtcgtctttcaaactgcctctttgttggctgcgctcgctcaccccagtcacatagttatctatgctcccgaggatgaactcccttgccgccgcgatgcggcttgaaattcattgggtatagatttcccacttctttcagcgcaatatctctctcaggacaaggtgttctgttgtcaggttttacccatcttactttcagactgccttttgctggctgtatgcaactcgaagtttactgggtaggccagagttgtacctgaagattatttcacctgaaggtggcgttgttccgatatgtaatttatatttgtaattatttaaaaatcactttctatcctaaattagctaaaacatttttaacaactgattaacggcattttttacaagaaacgctcaccaagtcacatttatcacccataaagttgcaccttccataaaaaactctatgtagccaaatgaaaataaatacttatctatcatacagataatagattaataatcatgagccacaaattatatgttcaaaatcagattgatttcacaaattctgaataatggcttttaacaaagttgcacaaagttgcaacatggaagatattgttccgtaacttgattagtcttcctattaaggagtgagaatgggtagtaccactatgggcgtgaagctcgatgaagcaacgcgtaaccgcatcaaagctgctgcacaacgaattgagcgcacaccacactggctgattaagcaagccatttttaattatctcgaacgtcttgaaaatgaggaaaagatcccggaaatatcagccgctcaggataacaaagaagaaaagatttccgaagaagaatcaccgattgaagcccgttatcagccgtttctggactttgccgagcacattttaccccaatcggtgaaacgttctgcaattactgcgtcatatcggctgcctgaaacacaggctgttccgatgttactgcaacaagctcagttacctgaagaacaatccaaagcggcacataaactcgcatattccatcgcagagaaattacgccagcaaaaacagggtattgggcgcgccggtctggttcaggggctactacaggaattttcactctcttcacaggaaggtgtcgcactgatgtgccttgccgaagccctgctgcgcattcctgataaagcaacccgtgatgcactcatccgcgacaaaatcagtaacggtaactggcactcccatctggggcaaagcccgtccatgttcgttaatgctgcaacatggggattgctgtttaccggtaaattagtctctacccataacgaagccaagttatccaaatcgctgacccgtatcatcggcaagagcggtgaaccgttggtgcgcaaaggtgtagatatggcaatgcgtctgatgggagagcaattcgtcacaggcgaaactattgctcaggcccttgccaacgcccgcaagctggaggagaaaggcttccgttactcctatgacatgcttggtgaagcagcactgactgaagaagatgcacaggcttatatggtctcttatcaacaagccattcatgcaattggtaaggcatcgaacggtcggggcatttatgaagggccgggtatttctatcaaactttccgccctgcatccccgctatagccgcgcccagtatgaacgcgtgatgaccgaactctaccctcgcctgcttagcctgactttacaggcgcgtcagtatgatatcggtatcaatattgatgcagaagaagcggataggctggaaatttccctcgatttgctggaaaagctctgctttgaaccacaactggaaggctggaatggaattggttttgttattcaggcctaccagaaacgttgtcctttcgtcattgacagtattatcgatttagcccagcgcagccgtcacagattaatgatccgtctggtaaaaggggcttattgggatagtgagatcaagcgtgcccagattgacggtctggaaggttatccggtttatacccgcaaagtgtataccgatgtttcttatattgcctgcgcccgtaagttgctatctgtgcctaatcttatttaccctcagtttgcaactcataacgcccatactctgtctgccatttaccatatcgcagggcagaattactatccgggacagtatgaattccagtgtctgcacggaatgggagaaccgctttatgaacaggtggtcggtaaaattgcagacggcaagctgaatcgcccgtgtcgaatctatgcaccagtcggaacccatgaaactttactggcctatctggttcgacgtctgttggaaaatggagcgaatacctcgttcgttaaccgtatcgctgataccaacctaccgatcgatgaactggttgccgatccggtaaaagtggttcatgaactggctaaatctgaagggcaaatcggcctgcctcacccaaaaattccattacccattgacttatacggtaaaaatcgcgccaattcatcaggattagacctttccagtgagcaccgtttggcttctctttccagcgcactgttgagttcttcaatggaaatatggaacagcgaaccattattaggtggtgattatacccataccggggaattaccggttgccagcccggtcaataacccggccaaatcttctgatatcgtcggttatgtgcgggaaactacagagcaggaagtcagacacgcgctggaagtcgccaccaatgccgaaaccatctggtttgccacgccaccatcagagcgtgcagctattttggtacgcgcagcggaattaatggaagataacctacaatccctgctcggcattctggtacgtgaagcaggtaaaacgttcaacaatgccatttcagaagttcgtgaagcggtggatttcctctactattatgccgatcaggtacgtcaggatttcgccaacgatacccatcgcccgcttgggcctgtggtctgtatcagcccgtggaacttccctctggccattttcactggtcagattgctgctgcattagcggccggtaacagcgttctggcgaaaccggcagaacagacaccactgattgcagcggtcgccgttaaaatgctgcatcaggcaggcattccacgtgaagtactgcaattattgccggggcaaggagaaactgtcggttcaatgctggtaggcgatgagcgtgtgcgtggcgtgatgttcaccggctccaccgaagttgccagcctgttacagcgtaatattgccggacgtcttgatgctcagggccgcccgacgccactgatcgcagaaaccggcgggatgaatgcgatgattgtcgattcttccgccctgactgagcaggttgtcactgatgtggttgcctctgcttttgacagtgcaggccagcgctgctctgccttgcgtattctgtgtatacaggatgatgtcgcagacagaacactcaccatgctgaaaggcgcaatggcagaatgccggatggggaatcctgagcacctgttcaccgatatcggcccggtgatcgatgccgaagcaaaagcgaatatcgagcgccatattcaggctatgcgcactaagggcagaacggtttatcaggcgactcatgaaaatgcggcagacagtcgggaatggccacagggaatgttcgtcaaacctacccttattgagctggaaagttttgatgagctgaaaaaagagattttcggcccggttctgcacgttgtccgtttcaaacgggacgagttggatcagctgcttgatcagattaacgcttccggctatggattaacattaggcgttcacacccgtattgatgaaaccatctctcaggtcacgggtaaggcaaaagtcggtaatttatatgttaaccgtaatatggtcggtgccgttgttggtgtacaaccattcggtggtgaaggattatccggcaccgggcctaaagccggtgggccgctctatctttatcgcctattgtcccagcgcccagttaatggtgcaactcaggcattaacgcgtcaggatgaggaatatccgctggatgctaccatccgcactgccctgcactctcctttcaacaaactggctgaatgggctacatcaaataatcactcggaactgaaccacatcattcaggaatacgctttactggctcagggcgggacaacacgcctattaccggggccaacaggtgaacgtaatacctataccctgttgccacgcggtcaggttctctgtcttgcagataatgagcaagatacgctgattcagttagccgcagtgctttcagtgggttgtcaggcggtctgggaaaaggatgagcttcaccagcagttactgaaacagttaccaaaagaagttcgtcacgccatttatttagtgaatgactggcagagtgaagacacggttatggaagcggttatttatcacggtgattgcgatcagttacggcaggtatgtgaaaccgttgcacaacgtaaagggccgattgtttcagtgcagggctttgcccggggcgaaactaatctgttgctggagcgcctgctgcatgaacgttcattgagtgttaacaccgcagcggcaggaggaaatgccagcttaatgaccattggttaaaaaagcggaattaaaaaaatagattaaccaatttatttgtaatcatttgattaaatcaaacgattaaatcagatgattaaactcaacaaccaccgactaaagtcggtgggttagtgattaacggactgaaagtccggatacgcatcggctaaacgatgcgtcaattatccagcctgaagtgatcattcgggttcggttcaaaatgatgcgccagataggcctttatcatctcttccgttaactgacctaccgtcgcacaaaaatagcctctgccccaaaaatgctgaccccagtaacgctttttcaagtgagcaaactcttcaaacaacttacttgctgtccttccctttattcgcctcatgatttctgagggcgctaagctcggaggacaactcaccagtatatgtacatggtctttgctcacgaccccttctactatcctgatttcgaacgcttcacaggtctgacgaactaactctctcacccgtaaaccaacttcacctgttagcactttgcgcctgtattttgttacccacacaaaatgatactcaatctgaaataccgtgtggctgccatatctgtaatccatattgcacctctcgtgcaacacagtatcgcagctaaagctgaccgactaaagtcggtggttttaaccttttatatggaaaaataaacgaattcggctgaaataacccaattcaatcccatatattgccgcaattcgattaataagacgaatatttctccatgcaataaaagccatatcgaccacagcaagcggactgactgcgatcatcagtgcagattctgcggctgatcggcggatctcttttttagcctgctcatccagcacaggctgaaccagtttgctgtataatatgaccatttcccgatcattgtgcgtttcatgtatagcactcagccaacgctgtaacgccggatgctgctggcctatacctgcctgatcagccagtttttcacaaaactgccgtcctttgccgataccatgactctgcaataatgtttttgcgatatcacgttcttctgtccgctggcgcaaacgataaagacgacgccattcaccgataacagcacctattccggcaaaaacaatcatactgcctgcggctgctacacccagtgcaatccagtcctgattctgccatgactgatatatccattgaataaactgagcgataacactgaaacccaataacagtaaagctcccgaaaatattttccgccacgggccgcgtttaggtttcagggccacattcactgcaccttcaagttcactgtcctgctcttccggatttaattctggcagaaccggataaaattcgctgtcctgttcattaaattcttgctgggatttcagggaaggttctgaaggtgctgataacatgtcatcaaaatccactcttggttttaaaggagcagaatctttatcctctgtgtttaaagagtccgtcatgtcagtttgtctcccaataaaaactccatcgcgctgtccatacgaatatggggtaatggtgcatcaatactgacctgccgtggccgaaatgattcaaaattaaagccctgtctctgccagaaatcattactgggcagacgctgtggcacctcccccggaaagaatgtcagtagtttgtcatctgacaggcgatttcctttgatagccgggatctgttccccctcgtgcatcacaatgccactttcagttgcctgaatagacgccagaccaacacaatccatgctgatcccttcaaatgccgcattctgccacgcttcctgcacaagctgttgaagcaacgaaacaagattcacgtgttgatctgctgtgacatggtctgccttactcgccgcaaacattaatttatcaatgcaaggggaaaataaacggcgaaataacgtccgtttaccataatgaaagctttgcatcagttgagtcagtgccaggcgcatatcattaaaagcgtgcgggccgctatttaatggctgtaggcaatcaaccagaacgatttgccgatcaaaacgcagaaaatgctctttataaaagccctttacgatgtgatcacaataataattaaatcgttcacgtaacataccgatattagtctgtttatccgctttcagtaattgaggttctccgattccgtcaatgtccggccacggaaaaaattgcagggcgggcgctcccgtcagatctcccggcagaataaaacgccccggctgaatgaaatgcaaaccttctgttttacattggtgtaaataatcggtgtaggcctgtgcaattctgctcagcagattttcatccgcaggcgccaatggatcacactgtttacataattccagccacggcttcgcccactcagccctgtttcctttcagtaagccattcatttgccgtgaccatgccagataactctgttccagcataggtaaatccagcagccactctccgggataatcgacaatttccagataaagtgttgaggtgtctttgagatagcggagtaaagaatcttctgagcgataacgcagcgcaaggcggatttcgctcacgcctctggtcggtatcggccaatacggaggggtattatacaaagcagcaatgttttcatcataggcaaaacggggaacacccaaatcccgctgtggtacacgtttcacacctaataaacgaccgtcacgtacagtagaaaacagtggtaatctggcaccagtatgaacattcagtaactgattgaccaaagaagtaataaatgctgttttcccgctacggcttaaccctgttactgccagccgtaaatgacggtctattccacgattaacaagtgacgtcagctcattttgcaaccgtttcatatttctcctgagtcggacactataatgttgtaatttcagaccgctctcccctcacccaaccgggcaaggggccagcagtttctgtggtattccgccgttcttatttaaatctgttctggcttagagctggcgaaaacgactacgtacattataggtgtcagaagtaatatagcgttccatttgacgcaggcgttcttcccctgctctcaattggtaatcaacttcatccagtattttccgggttgatggtgctcttgtttcctctggctgataccccacaggtgcgggatccatcacaaaggacaaaataatgtaggccactaccgttatggcagataacccaaagaatatcgacaatatggtaatggtacggataagggcaacagggacatcaaaatagttcgctaacccggcacaaacacctttgatcacgccctgttccggtaaacgataaagtttcccccggtaagaactgctcattatgactgcctccagtttggatgctctgcatcaagaatatcttccagcgttttgatacgttcctgcatacgccgggcgttttctgacaactgctccaaacgttgaatttcattgctctccagtttacctctgttctggttgttatagtgcagccataaccagacaggtaacacgaagagtacaaacaggatcagcgggatccccagaaatatataagccattacctttccttagttgtgaacgggtatacgaataaccttgtctatcattgtggatctttagcactcattttagctttgagggcagcaagttgtgcactaatttcatcatccgctttcagttctgcaaactgctgttccagagatttctttttcccaaggccaactgattccgcttctgcttccatatggtcaatacggcgctcaaactgttcaaagcgagccatcgcctcatcgattttaccgctgtccagctgacgacggacttcacgggaagaagccgcagcctgatgacgcagcgtcagagactgctgtcgtgcacgcgcttctatcagtttattttccagctcagtcacttcccctttaatgcgatcaagggtttcatccagaatcgatagctcatttttcagtgtttcaactaactggctgactttctgtttttcaatcaaagctgcccgagcaagatcttctttgtctttgctcaatgccagttcagctttttcctgccagccttcaatctggctttctccggtgctgatacggcgcagaagctgttttttctcagccagtgtacgcgcagatgttgagcgtatttccaccagcgtatcttccatctcctgaatcatcaagcggatcattttctgcggatcttctgctttatccagcagagaagaaatattagcgttaacgatatcagcaaaacgagaaaaaatacccatagtcataaacctctttcattagaatgtatgtatgttatgcctgtgtactgttaaataatgtataagatacaaggtaaggcattcaattaaatacaagatacatgccaactttttatttcttattatcacattgaaatatataaattaatttttatttgcttttttattacaatatcttaatgtagttaaatcaaccaataattggcgaaaaatacgatttgttagtggagaaatcatgaatcagttcactgataacctattaggggaagcaaacaattttattgaggttctggaacaggtttctgcactggcaaaattaaataaacctgttttagtgttaggggaacggggaacaggtaaagagttaattgcccaccgtttacattatctttctcccagatggcaaggccctttcatttccctgaactgcgctgctctcaacgaaaatttgcttgattcagagctcttcggccatgaagcaggcgcatttaccggagcacgttcaaaacatcaggggcgttttgaacgagcggatggaggaaccctgtttcttgatgagctggcgactgcaccaatgcaagtacaggaaaaactcttaagagtcattgaatatggataccttgaacgtgtaggaggtaaccagtctttacagatcgatgttcggctgatttgtgccaccaatgaagatttaccggctatggccgccaatgggaaattccgggcagacctgctggacaggctggcatttgatgttgttcagatacctccactacgccagagacagcaggatattatggtactggctcaacactttgccgttcagatgtgtcaggaactgaatcttcctttcttccccggattgactgaaaaagcaaagcgacagttacttgcttactcttggcccggcaatgtccgtgaactgaaaaatgtgatagagcgctccatctaccgtcatggggataatcaaaatgccttagacaccatcattattaatccctttgccgtatcttcagaaactcatgcacaaaagtcagctaacgattcatccatcaaacataagactgataatcgctctctgcctgatttaccactcgatttaaagcaatggcagaatgactgtgaaaagcaattaattatacaggcaatagcagaaagccagttcaatcagaaaaaagcagcagcaaaactcagcctgacataccatcaattacgcgggttaataaaaaagcacagcatcagtataacggattgaaaaattcagcaaatgatatcctcaatgagtttagaaaggggtcttgcggcaagggaataacagataaaaaaatagccagcacccgagctggctaataaaaaatactggaagcaatgtgagcaatgtcatgcgtattgagatctcagactggggtcataaaatacatatctcaacagcacgatgagaatgataatgcttatcacttatgtttgtaaagcgttttattgagaatttttctcacccgcgtgatctggttgttgtttttgagcaaaaagggctaattaagttacaatagccagacttttcccataattgatgttttatatgcgctatttgatttactggatcatattattgctttcaactcccgctctggctattgagaaagcaattccagaaacgactaaagccacagccaaagttgcttacagacagtcgtcagaaagcctatcctatgctccggcaactatacggcagcatggctttatttattgcgtcaacggcaatctgagtacgtttaacccgcaaatggctatcagcggcctgaccgtggatactctggctgcccagatttacgaccgtctgttgggagtagatcccctgacctatcggctaattcctgaattagcttcccgttgggaaattcaggataacggagcaacatatcgcttttatttgcgccataatgtcgcgttccagtcaacggcgtggtttactccgacccgtaccatgaacgccgatgatgttgttttcagcttccgccggttattcgataacaaacatgactatcactatgttaatggtgggcattatccctattttgatagtttacaatttggtgattccattcaggatatccgaaaaattgataaatacactgtcgagttccgcctgaacgcccctgatgcctcctttctctggcatctggcgacgcattattcgcctatactgtctgaagaatacggacaaaaactgcataacataaacaaagaagaacaaattgactggaatccggtaggaaccgggccattcatgctggaagattatcaaatggggcaatttgtccgtcttatccgacatgataactactggaaaggcaagccgctgatggaacaagttgttgtagatatcggagcaagtggtactggcaggatctccaaactgctcacaggagagtgtgatgtattagcctatcctacagccaaccaatgggacatactccacaatgaccccaatctgcgcctgaccttgcgttcaggaatgaatattgcctatcttgctttcaacaccagtaagccacctctggataaattggaagttcgtcaggccattgcctatgccattaataatcaaagactgatgcgagccatctattatggtacggctgaaactgccgcctccattttaccaagagcatcatgggcttatgataatcgggcagaaattaccgaatacaatcctgaaaaatcctgccagatactgaataaactggggttagatggtctggaactgacattgtgggttcccaccacgtcgaaaccctataacccaagccctttgaaaatggcagagctgattcaggcagatttagcgcatgttgggattaaaatgactattcgcccccttgaaggccgttttcaggaaagccagctcatggataaatctcatgacatgacattagcaggctggtctactgacagtaacgatcccgatagttttttccgcccactatttagctgcgcagctatcgcatctcagacaaacctgagccgctggtgtgacgcgacttttgataatgcaatccatcaagcgctgttagatcaacagttagcggcacgtataaaaagttatcatattgctcagcagatccttgctcagcagttacctgtactgccactggcttacccaatgcgatcacagatatttcgttataacattaaaggattagttctgagtccgtttggaaatagctcatttgctggtgttcatcgggaacaggaacactctatttcttctgaaaaaacatccaccggaaatacacccgctgaaaataaaaaaggaagcaaatgattatttatatattgcgccgtttgctactgctgattgtgacattgttttttctctcactgataagcttcagcctgatgtattttacgcctcatggccctttaagcggcgcatctctgtttgatgcttacctgttctattttcatggattactgcaatgggactttggcatttccagcatcaatggtgagagaattgttaaccaactctatgaggtatttccggcaacgcttgagctctgtctgctctcattcactctggcattattaattggtattccattagggattgttgccggagtatggcgtaacaaaaaagcagataaaattatcagcacacttgcactgtttggtttttccattccggtattctggttagctctgttacttactctcttgttctcactgcatctgggctggttgccggtatcaggacggattgatttactgtaccgaatggagcctgtgacaggctctgccctgattgatgcctggttgtcaaaaagcccttatcgcaacgagatgatcatgaatgtaatactgcatatgatattgcctgtcatcacgttgtctgtcgcgccaatgactgatgttattcgtttaatgcgtaacagcgcagaagagatttcagcatcaaactacataagatcagcagcgactcgcgggctatcaaaattaactattatacgtcgccacttattgcataacgcccttccccctattatccccaagctggggctacagttctcaaccatgctgaccttagctatggtgacagagcaggtgtttaactggccggggctgggacaatggcttatcagtgccatccgccagcaggattactccgcaatttcagctggtgtaatggtagtaggcactttagttatttcggtcaacgtgctgactaatattattggcgcgatggctaatcctttaaaacataaggaatggtatgccattagataatttttaccgtgaaaagaaagcgccctcgcctctgagagtcatttggcgtcttttctatgccgacgcactggcaatgacgggtttttacggcgtactgattttaattatattaagtctttttggtagccatcttgcaccctatcagcttgatcaacaatttattgaccagctgttgcccccttcatggtcacactacggtaatgtcgccttctttaa

SEQ ID NO: 472 - DNA, 15826 bp, Xenorhabdus sp.
  CDS (9940)..(10521)
  unsure (1)..(15826): unsure at all n locations
tctgcggaccaatgtgctcttaagatggacataggccagnagatgattctgtaatcccagttgttccggttcagggttagcgacagcgtattgggcgacccgttccagataatccgcctcatctaataaccagacaggaatatcagggttctgagcctgtggctgtaaatgctgttgggtgagcagtaatttaggcgtactgtcagacaggatataagcccgtcgcttatccgggtgattcggatcaagcggtacatacgccgcaccggcttttaagatacccagtataccaatcatcatatccggacagcgttcaacacacagagcgacccgatcatccggccggatacctgccgcaatcagggcatgcgccaactggttggcacgctggttcagtttatcataactcagtgtgtgttcctcacccactacggcaagggcctctggtgttagcgcaacctgctgttcaaacagttcgtgaataagggcatgctgcggaaaatcagcttgtgtggcattgaaaacctccagtaactgttggcgttcagctaccggcagaatggacagcgcccacacaggctgtctggggttgttttgcagtgcgtcagtcagcccacaaagagcagtatacagataattcaccacccgacgtggatcgacgctgttcactgcctgaacgaccagtgtaaaaccatccccaaaatcatccaccgacagatccagcggatagtttgaccattctttagaagacaacagtcgaacaccttcccagcctagtttatccgtggaatttgatggagaatggcgatagttaagcagggcactgaataacggctggggaggtataacaccgctgcaacgctgcgcgagagcgagtggaaattgctcatgttccagcaggtcagccagatcttttgccgttgcctgaaccacctcaagtaccgtgtgattgttcagggatattctgaccggcagggtgttgataaacatccccatcacctgatcggcccctgtggtgccttgcaatcgtcccgacaacaccgtgccgaagaccacgtcatcacgtccgctggtgtgagccaacacctgtgcccacgcgacatggaacagcacactcggactgatccccagttgacgggccagtgcgcggagggtttgcgccaacgtgatatccagacacaattgggcttccgtcacatcggtgccatccccctgtacattaagcaggccgaagggggcagtgggttcatcaatctcggcgagccgctcgcggaagtaaccttcatgcactgaaggcggtatgttcagcatttgggcaataaagttgcggtacggcagtggcgcaggcagggactcgacttctccttgtaataattgctggatttcatccatgatcaactctagtgtcacatggtcactaaccagatgatgaaaactcagccccagcagccactcattactggccggatcgtggacggtactggcggtaaataaaggtgcctgactgatattcattcgttgagcgatgtgcgcttgtaactgagacggaatattctgtacggacgtggggataaatgatgtcacaagtaacggagcctgtcgccagaccacttgtactggctgactcagcccctgccaacagaaggcggtacgcagaatatcatggcgatcgatgacctgttgcagcgccgcaaggaaagcctccagacgcgcttgggtatcaaaagccagcagggtgtttaacagataggtatcgtcattttcctgcaactggtagtggaacagaataccttcctgtaaaggggataggggataggtatcctgcacattagcgaccccgccggttacagttgcaatgacggtgtcaatttcactttgtgacagcgtcaccagtggcagcatctcaggcgtaataactgtgcagccctcgggaatgcggttggggggaaccagaaccggaaccagcggtacatccatccctgtctgtatcgcctgtgccatctctgtcagcagcggtgtagcaaagacagcggatacgtctagtgaatacccccgattacgcaattgttcaatcaggttaacagcaatcaaagagtgtccgcccagtttaaagaaatggtcatggcgtccgacacgatccacccccagtaaatcctgccagatttccactaacgcagtttccacatctccgattggtgcagcataatcatgggtgatcacagcggataagtccggagcgggtagctccttacgatcgagcttaccgttaggagttagtgggaaagtatctaaaatgacaaacgcacagggaagcatatactctgccagatggtgtgccagttgtcggcgcagatcaactggcagcagttccgtacccgtttcagcacagagataagccaccaggcgggcatcaccttccatatcttcacggacaataacaatcgcatcctgtacccccggacactgcatcagatgtgcttcgatttctcccggttcaatacggaagcctcgcagtttgatttgaaaatcattacgtccaagatattcgatattgccatccggcaaccagcggcccagatcgccggttttgtacattctggtattaggctgtgagctaaaagggtcgacaacaaaacgttctgccgtcagttcaggctggtttagataaccccgggcaacgccagcccccccgatataaatctcgccggttacgctcagaggcactggctgaccataagcatcaagaatatagattcgggtattggctatcggatggccgatgttggggtatggcagggaatgatccaccgaacaaaaggtcgcatcaacagtacattctgtcgggccgtagacattaataaaacggggcgtttctatttgttgtaagcgcgaccagacgacaggtgaaatggcctctcctccgattaaaacctgttggggctgataacccacatcggtacctaaccccgcattcagcagccattgcagctgcacaggtgtgcagtcaaacagatccacctcgtgatgagccagataacgccaaagctgcgttccattggcacgaatagcctccggaatgatgaccagtgtatgaccggcaagcaattgcagccaactttgtactgaagcgtcaaacacaatactggcattcagggcggtacgacatggcgtagttaaattgatcaccaattgcaacccggtatacagattgatgacgttgcaatgagtcaccataatccccttggggtttccggtggatccggaggtgtaaatcacataggccagatggtgtgaattcagcccgcgggtacggcaatcagggtttgtatccggcatgttatcaaaggcagatgaagcaggagtatccagcagcacggcaggcaagttgttgtctaaccttgcaactagctcggactgtgtgaacagagccacaggggcggcttcatggagcatatagcgtaagcggtccgtgggatagcggggatcgagggggacgtaagctgccccggccttgagaatgcccaacaaccccacaattatttccgggctacgttcaacacaaagcgcaacccgatcatcgggctgtactcccaacgcaatcagataatgcgctagccgattggcccggcggttaagttcgttataactgagggactgttcttcaaataccacagcggtagcttctggggtaagtgctgcttgttgttcaaacaactcgtggatgagcgcatcttgcggaaattcagcttcggtattattgaacgtgaacaacaggttatgcctctctgtctcaggtaagagaggagcatgcttaaccttcgtttccggtgatatcactgcggcttcagttaacagtgccagccgggattgaagggtgataacttcttcataactcagataattactgtcgtagctgaattcaatagtgaaaggtttattttccttttcaatttggtggggtgtggagattgaatattggtgaattgcaattgaaagcggaaacattacaccacgataggagccttttaacgtcatggctatattttccatactgacacagacattgaatggctcaaatgacagggcgatatcaaaaagttggctacgcccagttttttgtttgatttgtgtatgctgattgatctcagtaatcgggaatcgttgatgtttatagcaatgatgcagctcagtcgccactttatgcataatatcaagaacagaatcatccgcgtgaatgatcactctgacagggatcattgacgaaaacataccgagtgtcgatttttgttttttattttttcggttgtggacggggatgcctataacaatctcttctgtatcgttaatacgagtaaaatagcaagctaaaatggcatacataaaatgaaggacagataatccatgagcggctgcgatattttctatctgctgagaaagtgttttatccagttgccaaaagacgggtttagcaaattcactcgtggccggcttccttgaatgcgacagtggaagcagggctgatgacaacgtttcatatcgattctgccagaactgcaagtctcgcatgtacaatttagaattaagataggcttgatcttcagtaataaaatcaagataagaaggggctatatcaggcaaattttcaccggtcgttaaatgcctgtagtgttctaaaagctccttgaagagcagttttaatcccataccatctaagatcaaatgatgacagcagaattgccagtaccaacggttctcaccaaccctgaataatccggtatgccacaattcattatataaacaaaacgggcgtataaaattagcgtgcatctgttgttcggcgcggaattcagcatcagtttcctgtgaaaaatcgtataccgttaagggaagcgggagagtctcaacaaacgtttgccgaggcatcccgtaagtctcaatgagttttaaacgtaaagcatcatgatgagaaacgacggcttccagcgcctgaataaataatgattcgtccagttccccctcaagacaaattaatacactgaggttgtaatcggaggaattaggacgagtcatttggtctaaccaaataacttgttgagtagagcttagtgagaattcaccacatgatggtttgtggttacgttgtgtatgcattttatagctccagaatctcatagattaatctgtcaactaaaaaacctgatataattcttgtgattatgaaagaattcctgtatcaacaggcacagacagagcgttgtattttgtatacaggcgcttcattcagaacaaaaaggtatctagattatttcttcaagcgcgaggatagtgcttaacttgcacattaggatgccaacggaggtggcattaataatacgtaatcaaaactaaaccaatgaacttaaacagaaacaaaataataaaaaaattcttatgtttattttgttttacccatgtgttccgtaagtccaaaaaggtaaaagaatgaagcttgatcggcagtttaatgtggcaggagtaacgagtagttataacaatattacttaatgtttataggtaacattaacgtcttatcaaagcaggggggaactaaacggctgaagtgtgaactgacggaaggaacatcaacacgatgaataccaccttcccaagaggtaagaagatggtttcacccgctcggaggctatcttgcaaatcgtcgggagccaaagacacagaaaactacaccaatggttacaataatcatgaggaagcttacagattcacccagcaaacttgcagctaaagccagccctaaaaagggttgaagtaattgaagctggccgacagcagcaattcctccctgcaccaaaccgcgataccagaaaataaacccgatcagcatactgaagagtgaaacatacccaaggcttatccaggcaggcatactgacgtttttaaatgtatccggcatatatatcaatgttagaatcagcattatgggtaatgagatgagtaaagcccagcatatcacctgccagcctcccagttccctggaaacctttgcaccttccgcataaccgagcccgcatacaatgaccgatgccagcattaatagatctccggtcagtgaagcacttgaatcctgagtaaatgcgaaccccacaaccagtgcactgccgatgacagaaaacacccagaaaacaaggcggggacgctctcctccacgccatacaccaaagatggctgttgccagaggaagtaaacccaaaaatacaatggagtgagctgaagttatatattgtagtgccagtgcggtgagaagagggaaaccaacgaccacaccgatagaaacgataaccagagaagcgatttgttctaacttagggcgcttttcttttagcgctaataagatgaccagagccaataaaccggcaatggatgcccgggctacagtcagaaacacagggtcaaaatccattaccgccacttttgttgcaggtaaagagccactgaaaatcaatacaccaagaaagccattaaaccatccgttcgttctatcctgtttcatggttaaacttttcatgtttgttctgaaacctcatgtaattagattctataccaactcaacttcaagataggtgtctatctccccgcaccgcggggaaatataaggactcacctcatattacccgttgtaacctggagtttatcgagtatctaactgaagcctgtaaataaaatactgaccaatctgtgataacgataaatcatgatattgctcacattcatgacaatcaaattattgtcatgaatacattttcgtacaaatcgcatataaatcaggcgttatcatgagaaatgcactgaaaccggaggctttttttaatggcacactctcgatataaatttatagttgataaatttgctgctgatatacggacgggccgtttgcctcccggaacacgcctgcctactcaccgacagctggctatcgatgaaaagatgtctttagtcacagcaacccgggtttataccgaacttgaagcgatgggactcgtgagtggggagacagggagagggacatttgtccgtgaaatatcattacctgcggatttgggtatagaacaccatgttgcttcagatatggttgatttaagttttaactatccctcttttccctcccagacagaattgttacgaaattccctccgccaactggcgacttccggcgatcttgaagcattacttcgttaccagccacatggcgggcgtttgcatgaacgaacggtgatagcgcaatatctgaaaacaaggggattaaagagtatcacgacagataatacccttattgttagcggtgctcagcatggtttagccacaacagttatggctatgttgaaacccggtgatgtagttgcagtagatactctgacttacccgggttttaaagcgctggcaaagacttatcatctggaacttgtttcagttcctgcgggtaacgaggggactgatctggatgcactggaaaagctatgtcagcatcggcatgtccgggcgttctataccatgcctacattacacaatccattaggatgggtgatgagccagcaacatcggcaacgtctggtggcgctggcacgacaatataacctgctgctgattgaagatggttcttatgcttttcttgtcgagaatgcaccgccgcccttagcggaactggctccagaatccacaatctatgtttctggtttttcgaaaagtattgcaaccgggttacgcgttggttttatcgttgcttcggtagaaaagatccctgtacttgaacggataatcagggtaacaacatggaatacccctgctttaattaccgccattacctgtgagtggatcactaacggaatgatcacccagttagaagaagataaacgtcatgatgcgcaggcacgtcaactcattgttaaacgggtctttaaaggaatgaaatatatcagccatccatcatcctattttgtctggcttccgctggatgagggagtaagggcagatcaggttacaatggccttaatgaaggagcatatatcagtatccacagccgaaccatttgctacatcttcatatgtgccacatgcaatccgtcttgctatcggttcgatagaacaaaaatccctgcaaacggtgctggaaaaagtaaaaagcattgtcagcctgtattcgtgtttatgaaattctgcatttatagtttccaaatggaaattaacattctgaaaacacggatatcatccccgtgaattttttaataaacattaaatatactttccaaatggaaattatatcactcgttaatggattagctggtattgctggcttatcgccttacaccgtagcaaagcatggcgtgattggtttaacgaaaaccgctgcgctggaatttgcatgtaagaatatccgggtaaatgcagttgcccccggttatgttagtactccaaagataaatgaacttccagaagaagtattacaccgtttttcagactgccacccaatgaaaagaatggctaaaatggaagaagttgctgaatttatttcatttcttttatcagaaaaatccagcttttgcacaggggggatttatcctgttgatggcgggtatttatcacaatagtgcggcaacttgagtaaaaaatttagacagtggcgggatgattttctcctgccatttaccgttagctgaatcacagaaagaaaagcgttatatgaaaacggataatcagaacactcatgatattgcgataacaccttttggagatgcattgagcaggcttcagtgcgttcttgttgcaagaagaacgatggtaaaccctgaaggcgtttcctgggctcaatatgatgtattacatttactccggcagtatcaatccatgaaccccggcgttattggtgaaaagcttggttttacccgctcaaaaacatcaaagattttgcgctcacttaaagataaggagctggttaaacaagaatctagtgagcatgataagcgcgaactggtcactaaattaagcccgaagggattggtattcttgcagcgaaccgaagcaagtaaacacaatatggctgatattgtcatatcgaatatgtctcagggcgaaattgctatatttacagaattatgccatcgggcagcagatcttttatctgcgaatacactcattcgtgacgaagattaaatcttatgcagcaaaaatcacgtttcgctataaaaaacggtttgaaacgtgataattggctttgaattaacattcagatgaacagacacatcaagatattattgacgtatttttcttcatcaatttttaatgagataggttccttcccatataccttgaatcccattttttcatataaatgaatcgctgagacattctcttcaacaacagctaatgatagctttttaacgttactttttttcagcaatgttattaagttatccattagtttttcaccaactttcaaaccacgataacccggttttacataaaaaccccagataattcctttatgtaaagttttatagttactattttgctgaaatccaatcacaccaattaattcattatttaaataagcgcccaaaatcaaagaacccgttattttagtgataaactcctgctcacttttagttgattcttcttgataggtcgcgccaaaagattcgggattgatgtacaaagattcaagccgaagttctcggtaatctttaacatcactttttcctaatactctgataagtggtaacgattccatacctgacacctcaacaaatggaaaaggaagatatgtgataagcaaaatttaccagtcacgcatcagaaacaggcttatgctatctccataatcagttgtgaaatttattggacaaataactagacgaccagtcagttttatgattatgataaaagcattatgaaaaaatctgcatcagacacaaggcaacatattttggatgttgccaaatcaattatcgctcacaaaggttacactgccgttgggttggccgaactggtcaccgctgccggtgtccccaaaggttcattttattactatttcaaatcaaaagaagagtttggacagatcttgttgaaggaatatttcaatgaatatttgtccagagccagaatgcttttatcctcaaccgaaggcaccgctcgtgagcgtttgctcaactattttcgcgtctgttctgaaatacagacaacaggccagcctgaagacaaatgcctgactgttaaattaggggctgaggtctgcgacctttccgaaggaatgagatccattctttgtcgaggtactgtcgacattatcgatcaactgacacaatgtattgagtcagggcagagcgataattctatctcagcggatgtatcgcctcgcgtactagctgaatcactatatcaattatggctgggggcatttcttgtcgctaaagtagctaaagataccgctccatttaactccgccatagagatgacccagcgactactatcgtagtcgcattttttttatctttttatagacgactggtcaattattaaaaggaaatgttatggctgacaatagtattcgtaccgaccttttttcaccggttaagttaggagagatcgagcttgctaaccgtattgttatggcgccattaacacgcacacgtgttaatgaagaaggtgtgccgaacgaaatgatggtgacttattatactcagcgcgccagcgccggtttgatcatttcggaagcaaccaatatttcagctcagggacgaggatatgccatgacccccggtatctggactgaagaacaggtaactgagtggaaaaaaatcactaatgctgttcacgcagtgggtggaaaaatggtgatgcaattatggcatgtcggccgctgttcccatgttgatctgcaacctaacggtgaatcgcctgtagctccctctgctataaaagcagcaggaaatgtttataccgtaaaaggcttgcaggaagcctcgatgccacgtgccctgaatacggatgaaatccctggcattattgagcaatacagacacgcagcagaatgcgccaaacgagcaggatttgacggtgtagaaattcattcagccaacaattatctcttggagcagttcatacgtgattcaaccaaccaccgaaccgatcaatacggtggctctattgaaaaccgggttcgtctggttctggaagtggttaaagctgttaccggtgtatggggtgacggtcgggttggcatccggttatcaccagtgacaaccgaagtcggtgaaactccacttgatagcaatgttatggcgacttatagctacctgatccgacaactaaactcattcaaactggcttatctacattttgtggaaggaacaacaggaaaagatcgtctgattcctgaaggtgttgatttggatgctttacgctctctgtttgaaggagcttatatcggtaataataactatgacttcgaaatggccatttcccgccgttcggaaggaaaagttgatgcagtagcatttggacgtccgtttatttctaaccctgatctggtcaatcgcctgcgttataatattgaactgacgggtctggatcgcaatacccactacggttccggagcagaaggttatattgactggccgaccgcaaattattagttagttatctggcggctggtttataaggtaaagccgccagatttttgcccgaaaaagtactcagtaagtaaaccctaaatagagatagatactcagcacaatactggctgtcacaagagcatagggcatctgtgtacgaatatgttcgatatgatcacaatctgttgccattgacgccactatcgcatcaccagaaatgggtgaagtcatatcaccgaaaatagagccggaaatggccgctccaatcatatattccaccggcatcccaaccgaaaggccaagttgcacaccaatcgggatcataatcgcaaaagttccccatgatgtgccggttgccagtgacatgatagcgctgatgacaaagataaaacctaccgaaaatccgacagggagtacaccatgtgtgatctgtgcaatataagcccccgtattcagatcagccgaaactgttcccattaagaatgccagaatcataatagaactgattttcagcatactggcataaccaatataaagttcttcgaaaaaggtattaatggataaaactcggcggcctaaaaaccaaaagaaagaaataaccgtaccaaacatcacaccccaataaacggatgttgagccactgcctttgctgaaatcaccttcgtcagtaatatagagtgcgacaggaaccatcagcactgttgacagaatgggggtaaaaaaattcagaacactgttactgttagggtgctcaataacttcatcagattctgtcttttcgctgtccagtactggcgtattgtgttgatgcaaagcattctgctctgcttttttcatgggaccccaggacacattggtaaaaatataaaataatatgctggcaagtgagagccaggccatcaagttatatcccagagaatgtataacaatatcaaaaggctcacctgaaattagcccattggaaatttgcactccgactattcccatcatgacagcgccccagccattaatcattgccagcgagcagacagaaacaccggcagtctgaatcaggtaggacattttttcaggaggaacggcatactttctggcaaggtttttggtcgatgcaccggccactaattggttgatggaactttcgataaaaataagagcagaaataataatcgccagaaattgtacgtttttcttacttttaataattttagttcggtcagttaatagttgaaccaaagcccgtacaccacccgtgacagtaaccagccgcataataccgccaatcattatcataaaaataaccgttttggtatttcccgatgacgtaaaagtattaattactccctcgagcgtactttttattcccaatataatgttgtgatcgtgtattaccgtgaacccaaccagaatccccagcatcaatgacagcatcacttgtcgggttagaatggctaatatgatggtgacgacaggtgtaacaatcgtccagattccgtagtcatgcatttgtattctctgatgtttttttgttggttaattggagagggaatgtaaaacattaatgtatatggagttctaatatgaagcctagcaataccgaacaagaataccagtcaattgatatttctttctgttaattcaatatcattgtgtaattttttctaatgacctatattaatcctgcaaaataataataagtaaaatttatattttcatctgactaatgggataggagaaaagaaaaaatgatatcgcagaaaagatcggattttcggaatctaaatagaactctgggtatgtgtatagcagcactatttttcacggtagtctctgctaaaactgcaaaagcagatatcacagccccaattgtttaccttgatcgccaaacaccttccgtatcacttaatatcaatggtaaaaaaattgacaaaattgaaattgatacaggtgcatccagtgctctttatctgccccaatctgtctttgattctattttcacatcgcgcgaccataacattgaaacatctcgttctgttgatatttttggtaatgaaacattggataatgtagtagcaaaagcagttgatattactgtgaatggtaaaaaactttcaggcattgatgttgaagtattaaagccgtggggaaacggcatgttagatgataatgggcagcttcgtattaatggcttattggggctgggtgttgtcaaaaacaatacgctgattatcgactatccttcaaagatgctcacaattaccgataatgctaaaaaccttcctgacggttatcactggaaaaatattccattcactcgtaaaaattacggaatagaggtgagtgtatcgtccggtaataaaaagttaaatcatatggttattgatacgggtgccagccatactgtactttttacccgttcaaaggagggctgtgttgatttttcattattatgcccaaaacgaacgattgtgacacctgatggcattgaattatctgcatttctttttcaggtacctgatgaaaaaataaattttgacgggttactgggtgatgattacctttcaaataaggctcttgttatatctgatgatcaattactgataggtataccaaaataataaaaatttacctctcttttcttatttatttcaaattatggtgtaattttaaataaatttattacacctttaaaattaaatagcaaaataatgacattatcaaatagcatcagccgcatgattatttatagcactgtgcattgatataaatcatgatttaattaaatacttccataagtgaataataaaatagtgataatcaattaatcacaacaaggagtatttatgataaaaaccataaaaatggcaacattatttatctcaataataataacttcaatttccttcgccaatagtgaaaccagagccagaaattttggcattcctttttctggcacaaccggaaaatataatgcaattaccgatgttaatggtgtaactgttgggtattcaaccatgatcaaaggtaatggaaaactggaagtggggaaagggccgataagaaccggcgtaaccgcaatattacccagagggaaaaaattcagcccagtattctccggcatattctctttgaacgggaatggggaaatgacaggaaaccaatgggttcaggaaagcggctttctggaaacaccaatattaatcactaatacgcacagtgtcggcgttgtcagagattcagccatcagctggctggttgataaccatctggtatcaccacttaaggatgacttattctggttactccccgtggttacagaaacatgggatgggatattaaatgatataaatggtatgcatgtaaaaaaagaacatgtctatcacgcattggatagcgctaaatcaggaatgataaaagaaggtaatgtcggtggtggaacaggcatgaatctgtttgatttcaagggaggtacagggacttcatcaagagttttagataaaaaagacggcggatatacagtcggggttctggttcaggggaatttcggattcagagatgacctaattattgctgggattccggttggtcaagagataaaggatttcatgccgatatatcatggagataagaaaaaaataaaggatgcgggttctataatcgctgtcgttgctacagatgccccattagcacctcatcagttagagaaaatcgccaaaagagtctctctagggcttgccaaagtaggtggcgtggccagaaataccagcggggaaatatttattgcattctccaccgcgaataacgatgcattttccagagaagatataaaaacaattaaaatattaccaaatgacaaacttgatcctttatatgaggcaacggttagtgccacagaagaagccattattaatgccatgtttgcagctgaaactatggttggtagaaatggaaatacatcttattccatccctaaagaaagaattataaaaatattagaacaccatagcttacttagtcgaaactgaaacaaaatcattcagatttaatttctgtatttttatttaaaaactgcgaatataaaggagtaataataatgaaaccatacttagaattactctgttctccggctatttgggcggaaggcccagtttggctaccactttagagcac

SEQ ID NO: 473 - DNA, 15826 bp, Xenorhabdus sp.; identical to SEQ ID NO: 472
  CDS (6868)..(8202)
  unsure (1)..(15826): unsure at all n locations

SEQ ID NO: 474 - DNA, 17314 bp, Xenorhabdus sp.
  CDS (3361)..(4053)
aagggccataccagaaaacaacacaacagacccgattggcccgataactacggccagcacacagacgatacacatcatccaccagccacgaatacgggcattcagattatcgatggttgcgttccgtttttcccctgaataacaaagtgacagaataccgccaatcacactggcaataatcagcaccccaaaaattccgctaaacaacaacatcaaatcatgatctatccctgtcataacaccagctcctccaatgcagtctgggcacgttgtaaaaaggcttccttactttcatcatccgccaatttatccagaggctgaccaaatgtcgccgaacaaataacggggattaatatcctttttccttttggtaaagcgcgatttaaattttccagataaacagggataagttcagcatcaggatattttcgagccagatgatacagaccactcttgaacggattgatttgctcaccgttcccacgagttccttccggaaagatgatcaaagactccccttgcgccagaacacgttccaacggtgccagaatttcttttctgttactgttttctccctgacgctcgatcaagacagcacaaaataccttatgaataagataacgacgcagtttggttttatcccaataatcacgagctgcaaccggatgtactaaatgacgcaatacagatggaagacctgaccaaatgactaatccatccagatgactggaatgattggcataataaatccggctcttagtcgatggctggcaaccaacccatcgcacacgtacccctgtcaggacacgacacaggcccgataacatcgcccccatgcttctcgacagcaaactgattttatgaatttttcccatatagggtatccctatccctttttatatagagtaacagtgataagattttttaattgaacagactgggaaggtaagataatcaagattggctaagataacaacaggcctatatacacaatggatttcaagatgcatcgcggcggcaagagagtgaatccccgggagcatagataactatgtgactggggtgagcgagcgcggccaacaaagaggcaacttgaaagacgaagtgtatagcttataacaagaactgaaataccccctaatttacggcttacgatacctgcctgacggaacttacatgatcgtcctgttatttattcgtgcctcaaaccctaaaataatagagaatatccgctaaaatccgtgtttgttcaggtatggttatgtttaaagaaacaatcagaaatcatttatcttggagtacgtttttcgtaggagggtatatttcactcgtctacgttacaggtgttactcgttataaaaacttattctttgctttgatagcactggctgcgctctactggatcataaaaaaccctaaaggatgcctcgctgcgctgaaaaataaccttgtgttggctttgggaatattcacactaaccactatttattctgtcattatttctcctgacccaaaactcagcttccatgagataaaaacacctttttttagagatgtggtcctttctgccgtactgattactttagcgctaagccagacggataaattgaaaatccagaaaatgatcatcggctcatttttactcggattactctttatcacaatgaaagagatgtatctattttatcaggactatcagaacggcattatgcctttcacgaactacaatcaccgtaatatagcccatggagttgtattcttcttccccgcattagttgctctttggcattttcagaagccccagaattacattcgcctcgtgctgacaattttactgattctatcggtatcttttgtactgctgggaacactggcaagaggagcttggctggctgtttttgttatgtttttcataatgatattgatgaataaaaactggaaaacatcgtttgttagtatcattattatttgtgcagctttatttgctattaaacatggttacctcgctaaagaagctactttaaattataagctaactcaaactgatagcagctatcggtacaccaacggcacacaaggctcagcactcaacctaattctggaaaaccctctcaaaggttatggtgcaggcggtaagatctacgaccaaatttataatgataacgttaaaaactacccaaactggacattcaaagaatccctagggccacataatatttttctgaccgaatggtttgctgccgggatattaggattaggaggttttctgttcttgatatttattttcctgaaacaatcaggtaagcaatggagacatgataacggcagttataagcaagctgcactgattttactcatctctttcactggatattttatagtgagaggaaactttgaaaccgttcatctaaacaccttgggtatttatttcggcttgctgctcgcactctgtcagaaaaggctgaatgagtaaaacagaaatagaaaatgagtaaccaaaagcaactgtagataactaaagtgtccacgcgagtgtccacacttggaaaatttcagatcatctacagttgcttaatgaaaaattatcactttgattttaaagggaattaatgtttaagggcagataaaaaaaagccccgaaacggggctgaaagacagggatggtgtctatggcaaggaaaatcgttattgatgctgttctatagatagttataacaacatcagtacaaataccgggcagttcgtacctgacagcatctatgaagctctttttcttgctcaggcgtcagcacttgatacatctgattgcgaatacgcgcaaacttctgcaccgatatcaacattatatcttgctattttttcaagctgcgctctaatcgcaacttaatcaaaattctttgctaccaaaaggccgtatatcttctgatcttctatctgaatatccgttattaattgctcatacagataccgttttttcaccagaacccacatcacctaccgctgcttttcagttaatgtgattcccccaaagacacaactatagttatagttacgcagaaagttgccagaatcactgttgtcatatggcagacaaagcgatgaatcaacctcagagtcgttacacgtacccaacagtttcggctagagccatcatcgttccaagaacgggtattgacgctaaagctaacattgctattttacgcacttttggtaattcctcactttatcgaatagcactattcgattcagtgcgggtaatatagccccacggctgcaaactagcgtcagagcatgtaaaagaacgtaaagtcatggaatagcaaaatttgttatcgtattttgctctcggaggaagaatgaatgcataagatattattagttgatgatgaccgcgaactgacagctttattgaaagaacttcttgagatggaagggttcaatgtggttatcgcacatgatggtgaacaggcattacaatttatagactcttcaattgaccttctgctgctggatattatgatgccgcgcaaaaatggcattgaaaccctgaaagagctgcgtcaatatcatcagactcccgtgattatgttgacagcgagaggaagcgacctagatcgcgttctggggctggaactgggtgcagatgattacttacccaaaccatttaacgatcgcgaactggtagcgcgtatacgcgcgattctacgtcgttccaactggagtgaacaacaagccgacaacagcacacctatactggaaatcgataagctacaactcaatcctggacgtcaggaagccagttttgacggcgatattctggatttaaccggtacagaattcacactgctctatttgttagctcaacatattgggcaagttgtttctcgtgaacatttgagtcaggaagtattaggaaaacggttaacaccttttgacagagccatagatatgcatatttctaatcttcggcgtaaattacctaaccggactgatgaattaccctggttcaaaacactacgtgggcgcggatacttaatggtttcagagaaatgattaatagtttaacagcgcgcatatttgcaatcttctggctaacactggcacttgtcctgatggtggcactgatggtgcccaagctggattcccggcaattaactccgctattagatagtgagtaccatcagggaaatcagttagctagacatattgaagcagaattgacccgccatccccccagtgatctgttctggtggctaaggctggatcgcgccattgtcaaatgggtaccacccgatcaacgtttatttctcgcaaccggagaaggacgagttatcagcactgagaagcgcgatacgcagctcgtgcgcaattttatgggacaatcagataactccgaccaccctaaaaagaaaaaatatggtcgtgtcgaaataatgggaccattttcaatacgagatggtgaagattactatcacctttatctgcttcgcccgacaaacagtccacaatcagactttatcaatctgatgtttgatcgtcctcttctgttaccagcagcaactatgctcatcagcgcgccattactcttatggctggcgtggagtttggcaaggcccgcacgtaaactaaaaaatgcagcagatcaggtagcaaaaggtaatttaaaacaacacccagaactggaatcaggcccacaggaatttctggcagccggcagcagctttaaccagatgattagtgcactagaaaggatggtaactgctcagcaacgtctcatctccgacatttcccatgaactgcgtactccccttacccgattacagctcgccacagcattattgcgccgccgtcacggagaaagcaaagagctggagcgtattgaaacagaagcgcagttactggacagcatgattaacgacctattggtactttcccgtaaccagcataaaaacgaactactgcgcgaaaacatcaaggctaacaagatatggaatgacatactggaaaatgccaaatttgaagtcgaacagatgcacaaaacgctggatatcgtttcacctcccggcccttgggttatctactgtaacccggcagtactcggtagtgcactagaaaacatcgtccgcaatgccgtccgctactccagaagccatattgccgttgcatttaaagccgataatcacggagtgacgattaccgttgatgacgatggtccgggagtcagccctgaagaccgtgagcatatcttccgaccgttttaccgtacggatgaggctagagatcgggagtcaggggggactggtttgggactggcgatagttgaaactgcggtggaacaacatcggggctgggtaaaggcagaggatagccctttaggtggattgaggttagtgatttggttgccgttgcatgggagatagatagtgacctgactaaaatatagctaataacagcatgtaataattaaagaaaaaaggttattatacttgaccttgaggcgttgagggactaatctcgtcgcagcttaacacgaattgttgatatcattatttttgttaaaagataaacttgttttatcttaataagatagtctttaccaattccaaaaataataggcactctgggagccataacctagggcggtagctttaccaaagaaaaactagataaatattctttatacacattatattcggatgaatactcacacaattgttttaaaaaaacatgaaactcagtaataaatctatatttaataaaaaacagtattaatatcagataaatccgcataataaatataaactatagctagtacatgtatacacaatacagtcaagaaattgacagtcatcacagcccattttattatgctatcaagtatatttttatatgagtttatacgttcacaataaatatattatctatattttatattcattgttctctaccacaaagaatcctcaccattttatagaagagttttagacaaaaatagcaatttttaacgttgatttgcacttctttcctccttataacaccatctaaggcaatcgaaaagtattggaatacattaatgaactagcttataataatgtttatttttgaggttcataaaacctccaacaaatatattaatagctttacctaaaaacagataccccacccaacttactaaataaaaatttagtctaaacctataatccaaagctaattaaacatatgttataaaatgaaaaaattattaaattatctattttgttttttcttgccattattttataggccaaagaaagaattaattatattcacatttgataaagaaaatataaagttcaattctaaagcattatttgaatactcattaaaagaaaatttaatagcagtaaaatatataataaacaatgatacaaaaagaaaagagttaataaagaaatatggtgattatttcataacaacaacaaaaacaagagacataatagaaatatcaaatgcaaaaatttggattacagatggaggttttccactaaaaacaccatttgggcacaaaaaaagaactctaattaatttgtggcatggcattcccttaaagaaaataggtataatgggttactctggattatcgaaaataagagtatatttaacattaaaaatgttttcaaggcactattcactactatcttcaacaagttcaaatctctcctctatttattcaaagagttttctaattaataaaaataagataaaaccattaggtcagccaagaaacgatgctttatttcaaagtaatagtacaattaatgaatacatttacaatttacccgaatatgacaaagcaatcttatatgcacctacgtggcgatcaggtctttacggagatgaatgggcaggagaagatacaaaatttttcccattttctgactttgaccaaaagaagcttgaagagtatttagaaaaaaataaaatattactatgtctaaggcctcaccatttacaaaaaataaaaataaaaaactctaaatggataaaaaatttatcatcagatatctgtaatgaaattatggatataattagggagtttgatcttttaataacagactactcaagtatttatttcgactttttaatattaaataagccattattatttttaccatatgatttagatttatatgaaaaaaatgtaggactaaattttaattaccaaacagtcactcccggtcccaaaccaactaaccaaaaagaatttatttatgaaatatctaaattattattagaaaaagagtattttcagctagaaagaatgaaaataaataaattttttaatgaagttcaatataataactgccaaagaatttatgatattataattacaggcttaaaaaataaagtatgaataaaaaattagtattcctaactgaaagtatggttggtgctggtggtgttgtcagagtaatcagcacatgggccaattatttttcaaaaatagggtttagttgtaaaataatatctgttgttccaggtgaaccatatttttctttagataaagaaatatcctttaaaataaaaaaatatttttttaagaaaaaaatattatctttaccaataaatttttttcttatattaccaattcttaaagaagctaaaaattcatatcttattgttaataaatcagcttatatagagccaatatatctttggagaaaattaggctttttcaaagatgtaaagttagtatattttgcccacggtggaaataatgaattcgaaaaattctacatggctagaaagtcaacaaagcatcgagtgaagatgatatttgacgtttttgatgatgttatatgcctctttaagaatacagaaactacacctgatgtagtaaaagatgaaaaaatcacattcatctctaatccatgtccaattccaacctatataagaaagaaacatgaatatagtaatattgtaacttatataggaagagtcactaaagaaaaaggtgtcgatgatttaataaaagcatgggcattaatagaatataaacatcatgattggaaattagaaattattggtgatggttgtgataaaaatcatttcatatcattaagcaaacaattaagattaaaaaatattttattttataattcaacaaatagtatagaaaaacatcttaaaaaatcaacaatatgtgtattaccttcactatttgaaggctttgggttaagtttaatagaagcacagtctcaaggatgtgcagttatttcaacaaaaacaaatggaggtaaaagaataattagacaaatggaaaatggaatacttattgatatatctgatacaaaagatttagctgataagatagagcgtctaattacagacaaaaaattaagaaacaagttgataagccaagcttattcagagataaaattctttgaaattacctatatagctaaagattgggacaaggttttcagtgatgatatctgaatacactccaaactttttattaactttcgctctattttcattcataataaccgtttttattgcaagtttaaaaaatacagctatttcaaactcaattgcattatttatagttataatatatgtagtcgtttttggacttcgggattacaccattggatccgatactgaagcatatgttgagaattttatttatgataattgggattttgagcctttatttacagcaataacatatttaataaaattgtttactaacagctctacaatatatctaacaatattatctttaatttatggaacaaatatatacatatcatatataaaatatggaaaatctggaaaagaaaataaatactacgttatcatatttatttgggctgttttattcagccaaggaatgctcacaggaagtattaatttatttagacaggcccttggattttcatttttattgttaggtctttcattttatttaagcaaagaaagattaagtcccatatcttttattttattcacatcatcaatatttattcataattcaaactcaatattaatagcactattaattatatccaggatttcaagtataaggtggatagttattatctattttatatctttaataacttttttctttaatacaggcgaggctataatccatagctgtagtgatagctatataatacagagaacattggctaggcatatagactttaatgagcgtcgctcgatagaaactatctatatgaccattatcctgtattcatctcaatttttatattttttatcttttagaaaaaacctaatagaaaatacttcatatgttaatatattaaaaatgtatggattaatattatcactctcaattttattatcctttaatcgagaaatagccttaagatattatattctaatacaatatcttatacctatcctttatttttacatctcaacattgataaaacaaaaactaacttttagtacattattctcaatttacactatgttatacctttattacttattaagtcgcccgtggttcactgatcaatttttaggaaaaatcacatcataagacagacaaaggaaatatcatgaaaaaagttataacttatggaacatatgatttatttcatgtaggacatattcgcctcttaaaaaggctgaaagctcttggtgattatcttattgttgtaatctccactgatgattttaatcaaattaaagggaaaaagtcttttttctcttatgaagaacgaaaagaaattgtagaatcttgcaaatatgtagatatggttcttcccgaaaacacttgggaacaaaaaagagatgatattattaataataatgtaagtatattaggtatgggagatgattggtctggtcattttgatgatttgaaagacatatgtgacgttatttatttaaagcgtacagaacatatatcaacgacaaaaatcaagaataaactttctatcattacacctcaaaaattacaagaattagaaaaatcagttcataatatttttgatattgtaaagacaatttccgaggcaaataaataaatgttaggaccaaaaataatcacatgtactggttatggtggtacagggtcaagcgttgtttctgatttattaaatgaattctctaatatttgctcatttggaaatttcgaatttagatttttacaagatcctcatggaattagagatttagattatggaatcgttcaaaacaataatagactaacttcaagttaccatattaacaattacataaaatatgtagaatatctaagcaagagcaacatttatccctatgaaaaattttttaataataaattcttagaaatcacatatgaatatataaaaaatatcattgatgtagaatgggatggattttggcatcaagatattattgatgataatcgaatgaaaaaactaatatactatattgaaagattttatcaaaaaaaaatattaagaaaaaaagagtgcggtgctgaaatttatggcaagattttcaataaaaaaatgtattatgcttacccaagagaaaacttctataaagaaactcaaaaatatttaaggaaactaattaatgcatcaaactatggctcaaaagaatatgtagtatttgatcagcttattcctcccaatgatactaatcattacttaaaatactttgacgatttaagcgttgttataatcgatagagatcctcgtgatttatatctattaaataaatgcaggtggaatgaaaaatggatccccactgacgatattcataaatacattaattggttcaaatccattaggaaacatcaagaattcgataaggaagataaaaataaagtattaagattaccatttgaagatttcatttataaatatcatgaaactattcaaaaaataataaatttttgtggtataaaaaatgaagaacacatcaataagtacaaattttttgatccaaaaatatctataaacaatacagatttaaaaagtaaatatatccaatataaaaatgaaataaaaattatagaaaaagaccttcttgagttctgttatgagtttccaattaataaattaaagatatcttgattatgagaaatattatttatacttctggagtttttgaccttttacatgcaagtcatgtcagagcattacaatctgcgaaatctcaatgtgatgatgataatgttattttgatcgtaggcgtagctacagacgaagatactcaagcttataaaagaaaacctgtgattccttatgaacaaagaataaaaatgattgaatcgttagattttgttaataaagttataactgcccctctttttactaataaacaattttatgatttttttggtattagtttacatgtccaaggtagcgatgatgcaggtgaaattgattactacaaagggggaaaagatattggaattatgaaatttattggaagagacccaatagaatcaacctctacatgtatctcaaaactctgcgaaattgttggcaatgattttatcgttcagccactgcatggtggtatttccaatatgacttggaaagtagtatctccaaactctaataagaaatatgtattaaaatatttacaatcatccagtgttgaatcattcgtattaaggcatgactgtattatattaggcggaacatttgcattgtatgagtacatagatgggatcgtaggccatgtaacaagtaaggaacttatagaatatttcagagaaaaaaagaaaattaacaataattttatccctgcatatacagtaaagaaagaaataagaaatccctttccaactcttatgaaatatattgatgctgaaaacgaaatctttcttaaagaatatgatttctacgattatattttcaatgaaaaaagagtatggtgctggtctcataacgatcttgttagagaaaacatcattaaaacaaaaaatggtattaaatttattgattgggagtatgctgatttagctccttttgaaatggatatagcttcatgcatagttaatggtaccattgatttctctgatttagattctaaagagtttgatttaaaatttataagtatacttgtaatgtttcaatgcaaagtttggtcaaattggtaccaacagcaccctgataaatatgatataaatattttatcaagttactataaaatttttaatgagtttaaagaatcgttaaaattaatgaattaattctattcttagaaaaatagcagtctataatcatgcataatatattttatattttccaataaaaaggaatataagtgtataatttttcagtattaatatctgtctatattaaagaaaaacccgaattctttgatagtgctcttctcagtatttatgaacaaacctataaatctaatgaaattattattgttcaagatggggaattaactccagagttgtacgaagttatagataaatggaaaaaaaaattaccaataaaagatattattcttagcgaaaacaaaggactaggtgaagcattaaatgtgggactcaactcatgtacccatgatattattatgagagttgatacagatgatataaatgaaccagacagatttgaaaatcaatatatttatatggaaaaaaatccacagataactgtttgtggtagtcatattgctgaattcgataaagatccttcaaatataaaaagctatcggcgtgtccctttaggaaatgaaattcactgtgttataaacaaacgaaatcctatcaatcacatgactacttgtttcagaaaaaaacacgtacttagtgttggcggatataaacatttactctacatggaagattattacctttggattagattatacgcaaaaggctttaaactagaaaatttagataaagtacttgtattagcacgtacaggagaaaatatgcttaaaagaagaagaggtttagcgtatttcaagtcagaaattaatatgctaatgaaaatattgaatttaggtataggtaaaagatatagcacaattgtatgtttttcatttagagctattattagattaattccttcatcaatactttctaagatatactctttaataagaaaagataactttatgaaaaataaaaatcaatagatattattatagtaacattcttatgttataataaaattaagtgttttatcaaataaccataatatctaataaataaaaacttaacattaaggagtaaagttgatacacgtaacaattggccaaggtagatcgattaactctgaaatcataaactcctgccttttttatgataagctaactttaatattttcattatctaatggagaaagaattgagacatccttactacctaatagagtttctttctcaaaaaataaaagtttactttatgaaaaaattcatttattcgaaaaaagatttaatgaaaaaataattataaccaattctaatagaacactactttttatagagaacttttttttctattcatgcttagtttctaaaaatatcataactaaattttttatgccaaaccaatggatccttgcataccgaaaagttggggatattaaatggataaaactaagatacaaaaaaaatgaactaatggctgacccttttatttattaccataatgataagtattatgtgttttacgaagctttaaattatgatataaatcgaggatatatcgctgttggtgagttggatacaaataaaaacaagctcataaaagtaaagccaataatagataaagaatatcatctatcgtttccttatatatttaaaattgatgatggcttatatatgattcctgaatcatcagaaaataatactatcgatttatataagtgtgttgactttccataccaatgggataaagtaaaaacccttattgataacattcaagcagttgatacaatcttgtttaagaaggaagatatatggtatctattcacaagtgaaaaactatctggtgcctcttatggggatgaattaactatatttactacaaaagatccactaacagaaccatttaaaagaatgtcaaattttccatttatcaatgatgtttctttagctcgtaatgcaggagcaatttatatggatgaaacaggatctatatatagagcttcgcaagattgttctcgcaggtatggatataaagttaatatcatgaaaataaccaaactatcggaaaaaagttattctgaagaacttgtattaaaattagatttacctaaaaatgcaatcgcaatgcatacatataactcatcaaaaggattagaaatcactgacctaaaaataataaataaagatatttattcactagcaagaaatgcatatagaattttaaagaaaatgtttagaatacgttaagatgaataaatcaattactataaatggaatatataaactcgctttaaatttatttagatttactctacctgccttaattattccttatgtctatcgcacactatctccagataatattggtgagattaattatgcagaaagtatttattcatacatacatactatggctgtactagggctctcttattatgcaatcagggaattaggaaaaaaaaggaacaataaagaaaaatcttccgagctattttctaacatatatttaataaatataattgctgttttattttctttgataatatatatccttatcattacttttttcataactaaccaaaaagccaatataatatcaactatacttatttttaaattattgcttttagctttggatattgaatgggtaaatgaagcttatgaagaatacaaattcatatcaataaaaacaatgtgttgccgggctatttcgttgatattaatgtatttactggtaacagaaaaagatgattatattatatatgtggggtgaatattctttttgatgcaagcaatgtattgatttcatttttttatatcctattatataaaaaaagaatctatttttcgataaagttaataaaaaaaagtttattaaaaaaacattttaaaaaaatactttcgacattatttattatagatataggatttttctttttcagttttgataaaatcatgtgaggttcatactcatcggttgaagaggttgctttctatagccttgtagaaaaaatgattttaataattgttgttttttcttcaactttaacccaagtgaccttacctagtctttatatacttgcacattccgatagaaaagagtatgtctaacttatactacgcatttttccagcataaatgctttggtaaatcagtccttatttggagttttcttttaatctgaggaagataaattcaaaaccgtcgcaaatgaatatacaaatgctactcctgtaattaagatttttgttttttacatattactattttccatactaaaaatactaggtagtcaaatattattcgccctaaataaagaaaaatttttcataaagttattagcctttttcagttttttaaatatatgtgttaagttatatttaagggagcatttaacagctcagaatagtatatttataacgatgatacttctctctattttatgtatctcaatatatatatatatatatataatagaaaaaataaaatttaaaatatttaatgaaagtatatttatttatatcattgcttctttgccaacaataggaatcccccttattagaaggtattttgacaacatccctatttttactgcagtcagcatactatactcttctattctctatgctattatccttttactcacaaaagaaaaaatcttaaaagaattaataaaaaaaattctcaaaaaaacatagtttattatttaatatatatataaactatttacgctataaagtaaggttataaaaaatgattaacataataggtggttctggtttcatcggtactcgtcttgcaactcaattaaagctagagaatattccatttaaaataatagatatatataaaagtgaatccttccctaatagctgggaatatggcgatgtcaccaaacaagaaacactgataaaacctttagaaggcgcaacagtaattattaatttagctgctgagcataaggataatgtcactccaattaaactatattacgatgtaaacgttggtggagctaagaatgtttgtaacattgctgaaatactaaacataaaacatattatttttacttcttctgtagcagtttatggcttcgtagaaaaagaaactgatgagaatggtagatttaatgctttcaatgactacggaaaatcaaaattagaagcagaacatgtatataatgcttggcaagaaaaaattttggatagggcgttagtcacaattcgtccaactgtagttttcggtgaaaacaatagaggaaatgtttataatttgtttaaacaaatagcttctggtcggttcttaatgattggatcaggaaataacaaaaagtcaatggcatatgttgaaaatgttgctgcttttttaaagttctctactcagtttaaatcaggtcggcatacttttaattatgttgataaacctgactttacaatgaatgaattgactgaagttatttgcaactctttagataaaaaaaattcaaaatttcgaataccatactcagtaggaatattgggcggctatttttttgatctattatctaaaatcacaagaaaagagcttccagttagtagtattcgagtaaaaaaattttgtgctcgaacacagttcaaatctaatactatttctgaaacgggatttatgccaccaacaacactagaaaaaggtattgaaaagacagtaaaatatgagtttaaaaactcataaaatagtttatttttcgacttattatactcatttgggcaacgcgctataattcagtcgttgtccattatgatacctcctcactcaggtaagatataactgattatgctacttaatgaaaaactatctgcaaacttctatggactactctctggtacattttggggattaagtggcgttattctggctctattattaaaagacaatactctttcttcttattttatcattcctatagtaattgcatttttgaacgactctatttcacttatctatgtttttttatatctaatataccaaaaaaaacatcagataattttatcaatatttaaggaccaaaaaaaccttatcatttccattgctgctatatttggtgggcccatgggaatgtctttttatattttaaccataaaaaatattggtataaggtatacaacaactatttctgcgttatatcctgccattggtacattaatatcgt

SEQ ID NO: 475 - DNA, 12902 bp, Xenorhabdus sp.
  CDS (10717)..(11205)
  unsure (1)..(12902): unsure at all n locations
attgtgctctaaactctattgtaaaaagtctganaaaaagatccacttgagcccagtcggtgtattcaatctcttttgttgtatcagtttctcctccggtcatacgcataatgagctgaatcattatgcgatcaaaccaacggtagcgaggataaagcagtgctccggcaaaaacatcgcacaaatctggctgccaagggctttttaccaaaaacttgcgaacataagcattcgtctcaggcgttcttttttctggttttcttgctgttaaattgacactgaagaaagctgtcgttagttgattcaattgcttttgatgacgtacaacaaatttatgtaataccgaattaaagttcccgtaacgtattgaagccccgatcatcaccttattataaggaagcaaattcatatgattgactgtcgcaagatctctcaagtcacaattgatacctgctcgacgaatattttctgcaatacgcatgattattttcttagtctgtccatcctgtgtggaatagagcaataggtaattcataaatacgcctctgtatcttcgattaatcgcgccagaaagttggcgtaaataaaactaataaagtgaaaacttccaaacgcccaaacagcattgtcaccactaaaacccatttcgctgtcgggttcattgtagtgaagttatcagctaccgtacccaagcccggcccaagattattcagtgttgcggcaatagcagagaatgcagaaaactcatcaactcctgtagcgatcagcaacaacatactaataatgaaaaccaacgcgtaagcggagaaaaacccccaaactgcttcaataattttttccggtaatgccctacgccccagtttaattgtgtataccgcattagggtgaaccaaccgcttcaattcgcgggagccttgcagaaacaacaacaagatgcggatgactttcaaaccaccaccagtcgagccggcacatccgccgacaaatgcggagcacagtaacagaaatggcaaaaacagcggccacttagcaaaactatctgtcgtaaaccctgctgtagttgccatcgacacaacctgaaagaaggcatgattcagtgcatttaattttgattcataaacggagtgctgccacaaaaccagcatacagatgatgaccaatgccagctgaatactgataaacatacgaaattcaggatcacgccaatagactttcaggcttcttcctgaaagcacagcaaagtgcaaaccaaagttacagccagagatcaacagaaaaattgcaataatagtattaatcgtcgggctattaaaaaagcctacgctggcatcatgggttgagaacccccctatcgcaatagtagaaaagctatgagaaatggcatcaaaaactgacatcccggctgcccataaggcaaccgcacaggcaatggttaacaaaacataaatcagccagagcgtctttgccgtctcagcaatacgaggacgcattttattatctttcagtggccccggcatttcagcccgataaagctgcattccccctactcccagcaaaggcaggatcgcaaccgccagtacgattattcccattcctcccagccattgcagcatttgccggtaaaagagaatggctttaggaagagaatcaagcccaacgagtgtcgttgcccctgtcgtcgtcaatcctgagaaagattcaaaaaaagcatcagtaatagaaagattaggtttttctgaaaaaataaaaggtaaagcaccgacactacccagtacagtccagaatagtacaacgatcaagaaaccttccttaggtttcagttcatatttttgttcccgattaggtacccaaagtaccagaccaatcagaagtgcaaagatgaatgtctgactgaaagctctgccggcaccatctcggtaaatcaatgccaccaaccccggaataatcattgtgacagagaaaataatgacaagtagcccgacaatacgggttatggtgcgaaaatgcattcagcaggttccttcgaaatccggtatgacaaaataattatttttttgatgttaaaaatagtgaaccgcgacttaagtcacgtaatttattacctatttcatctgcaagagtagcaggtaatgagacttgcaatgtaacattttccgtatattcactggcaagtacttgccctgaaaattgctgtaataactgttctaccattgagatttgtgcatattcacattgtatctggtactgtttctgtggaactttatactctttttccaatagcttaagcgcctgctgaacgccattaccgtaggctttcactaacccgccagtacccagtttaatccccccaaaataacggacggatattgcggtgatctcccctaaaccacttcctatcaattgtgcaatcatcggtttacccgcggttccggtaggctctccatcatctgaaaaccctaactgctgagaatcatcaggagcgccagcaacaaaagcccagcagtgatgccgagcatctgggtattgctgtttgatacgttgaataaacgattttgcttcatcaaccccgctggtacgctccagcagggtaataaaacggcttttctttatttcttcagtaaagctgactgaagccgctggaattaaataaggcttcattacggcaactgtaaatctctggtcatattttcaatttttccatcatggataacgatattatcttcaatacgaataccgccatatggcttaagcgcctcgatctttttccagtcgaagtgtttgctatattcgctgacacgccacggcgccagtaaggtttcaataaaataaagccccggctcaatggtcaaaaccattcttggctcgagaacacgtgtacaacgcaaataaggatacatttccggcgcagccaaatgagttccggtatcatcctgcataaatccggcggaatcatgtacctgcaagccaagcgggtgaccaagcccgtgagggaaaaacggcgctgtcagccctttttcaaccatagcctcttcactgatcccattaatgatatagtgctttttcagcaatctggctatgcggtagtgcatattgatatgataatcggtgtaccgagttcctgctttgatcgtggttataattgcctgctgttcgtcattcagccctttaatcagagaagcaaactcgctatttgatttcgctgcataagttctggtgatatccgccgcatagccattatattctgcacccgcatcaatcaaaaaactgcggatttcagcgggtacagtttgctgcaactttgtgtagtgcaaaacagcagcattttcattcagagcgataatattgtcataaggaacatcagtatcgcggtggcctgttgcgatcagatagaacatattgatttcgaactcgctgacacctgacaaaaacgcatcatgtgccgccatatggccattcactgctgtcttctgcgcttcacgcatacaggccagttcgtaatctgtcttataggaacgatggaagcttaaataatctaaaacggctttggggttaagattatgctcggagatccccagcgatttagcacgttcaacttgttcgccgatgtaggccatatgttgttttgaaaagccattcagtgctgtgttgatatcttcggcactggccagatggaacatttccacttcttccgtccagtatccgtgaggaagtggttccacactgtgccaatagtccactggggaataaaaccataatttgggtttattgacaccatcaatccataaccagcaattcggtactttggttacaggaacccatgccttgaaatgtgcatttgccttaaacgggtaatggctatcatcgagaaatactcgtaataactcaccagagtgaataagcagggcgtcaagctgactgcgtgctaatatttctttagcgcgcttttgcaaaattttaatatgttcttgatacagagatgccaacttttccattttatgaacctttgggttatctggccggaatttgaattttaccacaatacattatttttcgtgtcatcactgaaaatcaacttaataagaattaactgataatatttatatttttcaaggcaataataaaaaatagcacttcccatcataaatcttacctgtgatccgccctacaaaaaattaatcattggtttgcattcacttaacacactaatcacaatcaactgtatctggtcataccagatggtatgcactcattgaggagaatgacatgctctacctaagtgaaactattcaagtaaactggctgaaagatggcattgcagaactgatcttcaatgcgtcagccgcaattaataaactggataccaagactgttgcatcactggataaggcaattgcaacccttgaacaacaatctgaattaaaagggctattaatccgttctgaaaaacaggcctttatcgtcggtgcggatatcacagaatttttatccttattcagcgctccggcagaaaaactgcatgaattactgaatctcgctaataacattttcaatcgaattgaagacctcgctgttcctacagtctccgcaatcaatgggtatgcgcttggtggtggttgcgagttggtccttgccactgattttcgcgtagcatcccccgatcttcgaatcggtttaccagaaactaaactaggtatcatgccgggttttggtggctcagtgcgtatgccacgcttgatcggaactgataatgcccttgaaattattacagccggcaaagatatcggtgctgaagaagcgttgaaaaatggcttggttgatgccgttgtgcctacagagaagctggttgactctgctgtttctattctggaacaggctattaagggtgatttagactggaaagccgcccgtcaacctaaactagtaccgcttagcctaaatgcgattgaacgcaccatgagcttcactgtggcaaaaggcatggtaatgaaagtcgcagggccacattatccggctccgattactgcggtaaaaaccattgaaaaagcagcgactctgaatcgcgatgaagcattaaaactggaaagtgatagtttcgttatgctggcgcatacttcagttgcccgtgctttggtcgggatcttcctgaatgatcagtatgtaaaaggtctggcaaaaaaacatctgaaagaagtttcaacacctcaacaggccgctgttctgggtgcgggtattatgggtggcggtatcgcttaccaatcagcacgtaaaggtgtgccggttctgatgaaagatattaatcagaaagcgctggatctcggcatgaacgaagcagctaagttgctgaataaacagtttgagcgcgggcgtctggatgcaatgaagatggctaaaattttgtcatcaatccaaccaacactgaattatgccggtattgagcaatctcaggttgtcgtcgaagccgttgttgaaaacccgaaaattaaagcggcagttctggcagaaactgaatctcatattaatgatgattgcattctggcatccaacacttccacgattccaattactgaattagccaaatcactgaagcgaccagaaaatttctgtggtatgcacttctttaacccggttcaccgcatgccgctggttgaagtcattcgtggagaaaaaacatcagaaaaaacaatttctgctgttgttgcctatgccagcaaaatgggcaaaaccccgattgttgtgaatgattgccctggctttttcgtaaaccgtgttctattcccatatctggccggctttggcatgttattgcgagatggtggtgatttccgtcaaatcgacaaaatcatggaaaaagaatttggctggccgatgggccctgcttatctgattgacgtagttgggattgatactgcccatcacgcacaaagtgttatggcacaaggttttcctgagcgtatgagccgcgattatcgggatgccattgatgtcttgtttgaaaaccagcgttatggccagaaaaatggtgttggtttctataaatatactcaggatagaaaaggtaaaccgaaaaaagagcaggacgaaaccaccgatcagttactggcaggtgtaagccagcctaaacagactttctctggcgaagatatcattgcacgaaccatgatcccaatgattaacgaagttgttcgttgtctggaagaaggtgtgattgccagccctgctgaagcagacatggcgctggtttatggtttaggtttccctccattccacggtggtgttttccgttatctggatacaatgggaacagcagcctatgtgaaactggctgaaagctatgcccatttaggtgcactttatcaggttccagccggcctgaaagcgaaagctgagagcaatgaaagttactatcctgcggcagcaaaacttgctgttaattcaggtgaaacagcgtgaggtctgaaaacatggaaaacgtagtcattattgatggtatccgtaccccaatggggcgctcaaaaggtggagtattccgtcagacccgtgccgaagatctctcagcacatttgatgaaatcactccttaaacgtaacccatcagtacaacctgagcagattgatgatatctcttggggatgtgtacaacaaacactggaacaaggatttaatattgcccgtaatgcagctttgctggcagggcttcctcattcagtacccgcggttaccgttaaccgtctgtgtggttcttcgatgcagtcattgcatgatgctacccgcatgatcatgacgggagatgccaatattgccatgattggtggtgttgagcacatgggccacgtgccgatgactcatggtgtcgatttccaccctaaattaagccgtaatgtagcaaaagctgcgggtgtaatgggtctgaccgctgaaatgctggcaaaaatgcatggtatcagccgtgaaatgcaggatgaatttgctatgcgttcacatcagcgcgctgcacaggcgacagaatcaaaagcctttgccagtgagattgcccctcttcacgggcacgatgctgacggaaacattcagcttgttaattttgatgaggttatccgcccggatactaacctgaaagatttagctggtctgcgccctgtctttgacccagtcacgggtagtgtaaccgctggtaactcttcagcactttcagacggtgcatcagcaatgctggtcatgagtgaaagtaaagcacgtgaactgggattgaagcctcgtgcccgtatccgctcaatggcggttgttggttgtgatccttccatcatgggctatggccctgttccggcaacacaaatggcattgaaaaaagccggtctggctctttcggatattgatctatttgaattaaacgaagcgtttgctgcccagtctctggcatgtatgaagggtctgaatctgctggatagtatggatgacaaaattaacctgaatggtggtgctattgcactcggtcatccattgggctgttctggtaccaggatcacaacaaccttgctgaatctgatggaacgtaaagatgtccagttcggattagcaaccatgtgtatcgggctgggtcagggcatcgccacgattattgaaagagtttagctatcggagtatctgacgattatttgtgagtattttccccttgtctgtcttatctattgcatcactcgaataagttgttgccgtagtttcccgcctgtcaggggcgggtttttttattattgctcaccagatggtaggtatatacacaatagatttcaagatgcgtcgcggcggcaagggagtaaatccccaagagcatagctaactatgtgactgggatgaacaagcgcagccaacaaagaggcaacttgaaagacgaagtgtataaatcagataaactcaaacgcatcaccatacatacgctcaagagaagcatcacgctcactgcaaaaccgttcacgggcaattttagccatttcaaaacggccggcgatataaatatcatacggagctaaattgccaaaatcctccagaacagcacttaatacagttcccgtccttccccgccaattaccatcagcctgctcaaccacaggaacgacggttaaattagagtaatgttcacttaaagactgtaattcacccaaatcatagagatgttgcagctcacgcccaccccaataaattgcaatttcgcgctcaggatcgttctctaaggcagccagtaaaatagaacgggtatatgaaaatccggttcctcctgcaattaatagcatcgggtttttactgtcttcacgaaaccacgcttgcccgtgtggaatatcaatatcaataactttctgatccaggatcctatccatcaccgccattgcatacaggttcaattcagaagcccctatatgcaattcaatcgtctgtttttctgatggcgatgatgccatagagaaggggcgtttatccctctcatccatcactaccataaggtattgccctgcacgaaaagaaaaaggcgaatcaggtaataaacgaacccgataaactgtatctgtaatggagtcaaccgatgttactttacagcttagtgttgtcatgcgttccctcttatcgcttcaaaatatctaattgatcccaaatttcatcgacacgggcccggatttcatcactcatgacaatcggacgcccccattccctttgtgtctctcccggccatttattggttgcatctaatcccatttttgagccaagcccggaaacaggtgatgcaaaatcgagatagtcaattggtgtattttccattaagacagtatcccgttgcggatccatccgcgttgttattgcccagataacatcattccagtctcgggcattaatgtcatcatcacagacaatcacaaattttgtgtacataaattgccgcagatatgaccaaacacccatcatgacccgtttggcatgccctgcatattgttttttcatcgtaacgacggcaagccgataagaacaaccctcaggaggtagataaaaatcgacaatctcaggaaattgtttttgcaggatcggcaccagcacttcattcaatgcaacgcccaatacagccggttcatccggtggacgccctgtataggtagagtggtagatagcatcacgacgctgggtaatgtgagtaatggtgaatacaggaaacatatctatttcattataataaccagtatggtcaccatatggcccttccggtgccatttcacccggctcaatatacccttcgaggataatctcagcgctggcaggcacttctaattcattggataaacatttcacaacttccgttttatgcccgcgcaacaatccggcaaaagcatattcagacagggtatcaggtacaggcgtaacagcacctaaaattgtggcaggatccgcacccagagcgacagaaacaggaaaacgctcccccggatgagcctgacaccattcctgaaaatcgagtgccccaccgcgatgtgatagccagcgcataataagcttatttttacctaaaacttgctgacgatagatgcccagattctggcgttctttatttggccctctggttacagtcagaccccatgtaatcaaaggagcagcatcttctggccaacagtgcatcaccgggattcgggtcaaatcaacgtcatccccttcccagaccagctcctgacaaggcgcagaactgaggcgcttggttggcatatttaaaacttgtttgaatttaggcaacttaccaaccaaatcacgaaaaccttttggtggctccggctctttgagaaaagccagcaacttgccaacatcgtgcaaagctttaacatcatcctgccccatccccatcgcaacccgtttaggcgttccaaacagattacacaaaaccggcatcgaatatccttttggattttcaaacaacaaggcaggcccaccggcacgaagagtacgatccgcgatttcagtcatttccagatagggatcaacttccatactaattcgttttaattcaccagattgttccagcaaggaaagaaagtctcttagatcgcggtatttcatattattcaattatgccgatttttaagggggaaggacattataagctctcgaatgcaggttacaaggtaaacccataacttactaaaaatcaatgaatttattgtattcttgtgggtcaacttgctaagacacagagaaacgttgttcagcctccattcctgcttaccaaattgcatgaaaaacgtctgattacgtagataaattttaagctattcatttacaccaataaaatagtgctatcctcttaatatgtgtttttcaaaaaataaactattctacaattttatctaaaaaataatttaaattcataatgataagtaaaatgaaacgattatcggtttaataatgatacacaatggatttcaagacgcaccgtagcggcaggagagcgtcaaattcgctcccgacgaattttttcagccaacaaagaagcaacttgaaagataaggtgtataagatatgggttttggcctgtaaaacactttactggctgtaaaaacatgtcattttctttaaacacatttttcactttatatatgatttgcttatattggttttgttatgcttcattttataggtgattctggtatatcggttttgttatgcttagtacattgtgtaatggagtcggaatattatgggaaattggtatcttctttattgtaaacgcgggcaaatctctcgggcgatagaaaacctggagagacaggatgtcatttgcctgacacccacagccaaaattgaaaaaattatacggggcaaaagaacgaccgtaaccgaacctctttttccgaactacctttttgtgaactttgatccagaagtgattcataccaccacagttaattcaacgcggggggttaatcactttatccgtttcagtacatacccagcggttgtcccacaacaattaatcgatgaattaatgaatgcgactgaacaggaattcactgcaccagaaactcctgtttccggagatactgttctgataactgaagggatttttgaagggattcaggccatttataatgaaccagatggagaaactcgttcaattcttctgctgaatattttgaataaagaagtttccaaggtattagataataaacaatttacaaaactctaattcaacctaattatacttaaaccgtcattaatatctttttttataacaaaagatactcaatgacggttttttgctgtttaactgtttttccgattgctatttggggtctgtagcccttctcggcggcccaagcctgtctagttccgctaagattgctgaaatctgttgttgccagtcggttggttttgaatttttacataaagtaaatattggtgattggcgtttaaaatctactgaactaactgactcttttccttgtatcaaatattttgccataaaagctaataaatactttttacttattacatcatctattaggttaggaatacgaggctcaaaagaataaatcatcagttcgttatttttatcaaatccataaactcttaagtacagaacattatttatattaataacatctaattgagagtaacgtgcaacatacatccttcccttacgccatgtataaaacagttttttttcctgatcaataacaagaggagatatttttcgaattaaagagaatccccataaatgaattaaaaccattgtaatagaaaatagaaaaaaaccaccatctagtaataaattttttctcaccctagatttttcataaaaaccattgtccatataacgaatataaaaatattgagaccaagatatatttttcgcatcagaaatatatttatatggctcaataaaatctggcaattttggatttaaataaaactcatctccatatttttttggcacgaacaacagtttccagataactctcttcattcgctctccatgtgttaataacatcactaataaaaaaataaaaccctaatacaaaaccagctaaagaggaaagtaaaactttctcaggaaagttattttttccataacgtatttcacattttttatcatcaattaaactaataaaaccctctgattctatttggcctttagaatcaagatctccaatgtcttcattcaaaaaaggatcgcatactgttgatagtctattaattttttcatctctattatttttataatccatgcctttcatcgcctatttttccacatcattcactattttaaaaataatcctttcaaataattacagagcgttttgaacgctctgatagcaagttatgtagacaccttagaattatttttattaaatctgttccttagaagttttttcagatacagaaacatgaggtggtccaaatcgctctacttcagctaaaattgcggcaacctgagcttcccaatctgctggctttggctcttcacgtaaccagaaaaatgattttctacgtttaaaatcaactaagctaacagcgtcttttccttgcacaaaatattttgagacaaagataagtaaatattctatatctatatttgtattgaaaatatttggaaatttaggtgagtaaaaataattaataaggttattatttttatcgtatccacaagtttttaagcctaaattacctgaggcattatagacctctaactgagcataattggccacatataccttcccttttaaccaagtataaaaaatctgcctttctctatctatgataaaaggaggaatagtacgaaccctaagtaaaaaacaaaaagaaataataataaaaaagaagtaaagtaagaaaaatccaccatctgccattaaaaaatatcttgcccgttcttcttgagag

SEQ ID NO: 476 - DNA, 19289 bp, Xenorhabdus sp.
  CDS (3872)..(4765)
aaactgcctaactgaatgaactgttgttgcaggcgagggttcggcataaaagaggaactccactgatttttccatcaatttttatttccttatattaagccgataataagtcagatttaaagtcatttataagtggaaagttatcacttattgactcccgattttttgagtaatggtatttttaccagccagtaaggcgacttactggcctattttcttttatgctggattaatttttaccgatgatattttgagcaataatgtcacccatttcatcagtgctgatagcctctccgttacccgccaaatcagcggttctataaccctgttccagtgcagcattgactgctgtttcaatggcatctgcaatatcatcacgtttaatgctgtaacgaagcaagagagcggtggataggatctgggcgattggattagcaatattttttcctgcgatatccggagcagaacccccggcaggttcatataaaccaaatcctttctcattcaggctggcagaaggcagcatacccattgaaccggttatcatggcacattcatcagacagaatatcaccaaagatattggagcaaagcaatacatcaaactgagacggtgctttgatgagctgcatcgtggcgttgtcgatatacatgtgattgatttcaacgtcgggatattctttcgcaatttcactgacaatttcacgccacagaacagaactttgcaaaacattggctttatcaatcgaagtcactttatgccgacgcttacgggctgattcgaaagcaatgcgggcaattctttctatttcaaaccgatggtagacttccgtgtcgaaagcacgttcgtatcttccttcaccttcccgtcctttgggctgaccgaaatagatcccgcctgtcagttcacgcacacataaaatatcgaaacctttttccgcaatatcatgacgcagcgggcaaaaagacgtcagactggtatataaatgtgccggacgtaggttactgaatagcttgaagtgcttgcgcagtggcaacaatgctccgcgttctggctggctggccgggggtaaatgctcccatttagggccaccgacagagccaaacagaattgcatctgctttttcacaaccagcaacagtggcttcaggtaaaggacaaccatgcctatcaatggcaatccctccaacatcatattcactggttgtgatgcgaatagaaaaacgacgacgaatagcatccagtactttataggcttgcttcatgacttccgggccaataccgtcaccgggcaacaccgcaatatggtaagcaggttcctgttgttttgtaatagagtgggtagacattgttatttagtttcctttgttgtgcttttggaaatattgtcttgtatgcgttgtttttcttttttgacctgttctgcctgccagatattgttcagcgcgtggatcattgctttagcagaagactcaatcacatctgtctctaaccccacgccatgaaaacggcgaccaaagcactctacgataatattgacctgaccaagtgcgtctttcccatgtcctttgccggataattgataggaaagtaattttatcggatagcccgtaatccggttcatagcatgatagatagcatcgacagtcccgtttccggttgctgcttcagatttaatttcatcaccgcaagccagacgcactgttgctgttgatactatgctggttccggactgaatactgaagtaatccagacgatagtgttcatcttcctgttgttgttggttaatgaataccagcgcttccagatcgtaatcaaagacctgaccttttttatcagccagtttcaggaaggcttcatacagggcatccagatcataatctttctcctgatagcccatttcagtcatgcgatgttttacggcagagcggccagaacgggaagtcagattcagttgggtatctttcaggccgatggaatctggcgtcatgatttcgtaggtttcacggtttttcagaacaccatcctgatgaatgccggatgaatgggcgaaagcattgctgcccacaaccgctttatgggccggaattggagtattacaaatttgactgactaactggctggtacgataaatttctttatggttaatattggtatgaacccccaacatttgctggcgggtttttatcgccataatcacttcttccagtgaacagtttccggctcgttcacccagaccgttaatggttccttcaacttgtctggcacccgcctgaacggcagtaatggaattagcgactgacatccccaaatcgtcatggcaatggacagaaataattgccttatcaatattaggtacgcgattaaataatgttttaataataccgccaaattggtagggagttgtataaccgacggtatcaggaatattgatggtcgttgcgcctgcttttatggcctgctcgacgatgcggcacaagttatcgatatctgagcgtcctgcatcttcacaggagaattccacatcatcggtatacctgcgcgcccgtttgatggagcgaaccgccatttcgacgatatcatcaaaccctttttttaatttatgttcaacatgcaggttggaagtcgccaacaccatatgcaggcggaaagcttctgcaacactcagagcctccgctgaaacatcgatatcattatcaacacaacgggacagggcacagatacggctgtttttgatctcgcgagcgatagtctggactgattcaaaatcgccgggggaagaaacggggaaacccgcttcaataatatcaacgcccagccctttccagtgcataagcaatttgcagtttttctttgacactcaggctggcctgtaatgcctgttcgccatctctcaatgtggtatcgaaaataataacttgctggctcatagttgtgctcctgtcaatgggttgtcatgttttagtttttttagggcgccgagcaggtataaaaaaacccgcgttagcgcgggtttttatctctggtaaagattaactctgaattcaatctaccagcataccgcgcacattaaaggcgtttagtagtaggcttagtagacgaatattgtgaatcatgtaagtcaacctttgaaaatctgttaattgagtattaccgtttcgatataattattgatacgtcatctgaaaaacattgtcaagcagtacaaatttaggccgggaatgaataatgtgcattaataggtttttttttgaccttttcgtagccggagtgactattttttacatttttaacgatgtttttatctatttttcatatctatatatgaagtaaaatccggccctaatggataataaatataatgcttataatgttataaagatgtttactaacgggacagggatagaatgaatactcactatggtgttcttggcttactaatcaataaccatattaaatataaatatattaatgaaaaacatttattcatcatatgaataagtttgtttctgtgcgctgaaaaataaccagccatagttaacataacaatttaatcctgctggaaaatttatataaataaattcataaggattattctaattcagagttatgggttaataatttatttttgattatttttaataatatataattgtttttatacaaggaagaatctcaattaaattgtcattgattgagataaatgatcttattatttgaagtagctctttaaaatgttgaaacttacatggtaaggcagtctatattcatttattaataataagatcgccgcaataaatatagtggagtgaaattaaataatggctggatgcaacctggtaaacacaggaaaaaaagaaccatgtgaagttcaattgcgtagtgtagatctcaatttgctgactgtttttgatgctgttatgcaaatgcagaatattacacgtgcagctcaggcattaggtatgtcacaaccggcggtcagtaacgcagtagctcgcttaaaaacgatgtttgatgatgaattatttgtgcggcatgggcgtggtattcagccaacggcaagggcaaaacaacttttcgggccacttaggcaggcacttcagattgtacataatgagttacccggagcagggtttgatcccgataatagtgtaagaacatttaatctttctatctgtagtccacttgatatccgtttagcagctcaaattgttggtgaaataaaaaggcattctcccaatatcgatgtcgtgattaaaacacaaataaacgacaatattgagaagaaattaaaatatcaagaaatcgaatttgttatcagttatacccaatttgaacatcctgattttcagcatttcccattatttgatgacgagttggttctggctgtttctcaaagccatcccagaattggtgaatgtatcagtcagcagcaattgcaggatgaacggcatgcaattgtagcattagataattcagattccttcagcaaaccttactatgaaaacagtgaattaatagattctgtctcttatcagggaactgatttaaatagtgttcttaacatcgtatctcagacttacctggttgccatcgcgcctaaatggatggttgagcactattccgggcagttaaatatccgtactgtatcattacctaataatagtgtttcccgtccgtgttatttaatatggcatgcttcaatgaacagagataaaggacatcagtggatgaaatcattactgagttgccttggcgatcggtaataaaacggggtattcacctgtcgttatcttttatccaatctatttcgaaccgcattgcagtagcaggcctccctctttttagggaggcctgtcttatttatggctttagccagtttaagtcgcgttagcgtcttaaacataaaaccacccgctttgcgggtggagttcaaaggttataccaagaaaaacacctttccgttacgatatagatgttcaagctaatattcgtaactcaaataaggaaaggtgtttatgggcattaaagcacaaagctcagcgcatacaaagtggctgtgtaaataccatatcgtcttttcgccgaaatatagacggaaagtgatttttaataatattcgttcaagtgtgggagagatcctcagagacctttgtaagtataaaggtgtggaaataatcgaaggtcatctcatgccagatcatgttcatatgttggtgagtattccaccaaagctaagcgtttcaagctttatgggatatttgaagggtaaaagttcgctgatgatctttgatagacacgccaatttaaaatataaatttggcaacagaaagttttgggcggaagggttctatgtcagtacggtagggctaaatgaagcgacaattcaaaagtatatcagagagcaagaaaagtcggatttaatctcggataaattgagtagtaaagagcatgtagaccccttcaaggggtgggccaaagcagcaaagacacttagtttgaacgaagagaaagcagcgtcatttaggcgcagtcggtaacaagcccttatagggcaagagcaaaccacccgttatacgggtggttatgatttttagacgctttttaacattaagccgcatcaagtttttcatttttaccgattattattcccaaaatcccttggattgccagaacgaggaaaagcaaccacagaacaagagtccaggaagaggtaaagtcatgaatataaccagaaataagtggcccacaaaatgcaatcaaatagccgattgactgcatcattgagtttgctttcgtaatattagtcgtatgattaaaacgcaacagtggtaacaagaatgcaactccggtacaaatacctgccccaatccccatgatcatgacagcaacaggaattaaatgtttttgaccataaataaataaaataatccccagcatgccaataatagggttaataacaaatatgaattcttgtctttttattttatagatataaaaagcagtcaatgttgcaaaaggtattgctactaatgagaagagtgcagcataagatgctgcttcagtcagccccatgccataagaactgataatttcagggaaccaggcagtaataatataaaagttaaacgataaaacagagaaatagacagccatcatccagcatgaaatgcttgaccacgggttaatcaccttcacaggtttctcgtcataatcattacgggcatttgggttactaactgaatttttttgttttttatcggaaaagaacaggataaggagcactgaaaataggggtatgagcacccaaacccaggaaacttcattccaggaaaaacccagcatatgcttaatcggtaacgtcaggccggtcgccattgctggccccagatacaaagatgccgtataggaagatgacagaagagcaaccctgttactacccaaacttttgaagaatgaaggtaacgcaatatttcccagtgcaatagcaaacccaaacataactgtagaagccaacagcaatatcagagaactatttaacctcaggatgtaagcaacaatagcaaccacaaatgtcattaataaggttttatacaaccctattcttctttcaaaataaggtgttaaaggagaaaaaaagaaaaaacacagcggtgacagggatgttattaacccaaaggtagaatagtttatgtttaaatcgtcaataatttcctgagacattggcgggatataagatattggtactctcaatcccaatcctgcaatcatgataaagagcaataatttgaagataaagctattattaaagtgtttccctatattcattatttcaccacagaagtttgaaggcttatcgtatttttaattaaaaagtttgaggatataccaaataaacttactgcataattcgtttaaattctggcagacaaaccttcatttagcaagcttacagagaattaacttatctatactcaatggatttcaagatgcatcgcggcggcaggggaactcattcccgggagcatagacaactatgtgatcgggatgagtgagtgcagcccacaaagaggcaacttgaaagacgaagagcatataacttccactacaaatgttcactatacgataactctctgttcatttttaaagagaagctcacagttaacgaattttattttctataattatttccgccagcatttcctcatactcatcgcaataacctacttcggtaaaaccaaaacgctgataaaactggctatgacgttgacttgtttcatcataacagacagatattttgtagcaatcagcgtattgtttcatttcatccagtaataatttcatcgcaagactgccaattcctttattctgatgagatttgtcaatcatcatccgataaagattatactcatttggttttccttcattaacacaacgttcatacatagcaaaaccaacaatttcttcgccaaaacaaattactcttggcctacaatattgattaaactttgattctgcaattgactctgaatttggtacaacaaactgctcctgtccagattcaacttcgagagacatcacttcgcgatagttatttttatttatatctattaaagaaaccttcacatttaactccataatcacaatgtaatagccattaatttattgacttctttataaccttccctttcataaaattttgttgccgaaatattttcagataacacggtcagctccagatgagtaaaattattttccttcgcccactttttcatttctgctaatagcttctggccgactccctgatttcttacatcttggctgacaaacaaatcaataacataaccatattttctctgaacaaggcaattaaatggtggtgtctgttttttttgtgcgatgcaaaaaccttttatatttccattattatcgtctgctactaataaattaaagttatcatcactaagagtggaaataataaatgccctgtcctgttcaacctttttcagtctttcaggctgcaactcagccatttctctgaataatgttgtataaagtaataaaatagcatcaagatcctgcccagaagctgcccttattaacatatcatttctcctgaaaatcatggtctatttatatttaagaaatagcataataatcaaagccgataaaatcatcaacgaattctaccaccctgcttttatacgaggatatcgctttcataatatgtgaattaagaggaattaatgactatacttcatgcttattcttttatacgtcagcctagtgatcataagacataatcatgttgtattctgtctatttcactgcgaagatggcacttctaaaataacatgttgtaattgaggttttctgtaaatgtccttttctaaacatcgggctgcgtctttttctctgcttccgatatttttgttattaatttcaatgacatcaattcaggctggcgcatcattagctaaaacagtatttcatgtcattggtgcacctggtgtgactgccctgagacttgcgctgggaacccttattttatttctgatttttaaaccctggcgtctgaaatttacgcgttcatctctcactcctctccttgcttacggcatttcactcggtggaatgaattatctgttttacatggcattatccaaaattccccttggtattgccgttgcacttgaatttaccggcccactggctgtcgctatgttttcctcacgccgccccgtggattttctctggatcgtattggatattgccggattaggttttctgttacctatcggtgatgacgtcagtactcttgatcctgtcggcattttatatgcactgggagcgggcgttttctgggcactttatattatctttggtcaacgcgctggggcaggttatggtgcagctacagtttctatcggctcattaattgctgctgttattttctttccggtgggattaatccaaaccggcccggaacttctgtttgatgcctcattactgcctattgctctgggcatcgctatcttatcgaccgcacttccctatacattggaaatgatcgcccttacacgtttgcccgccaaaacattcggtacgttaatgagtctggaaccagcattgggtgccttatccggtatcattttcctgaatgagcatttaaccacaacacaatggctcgcccttctgtgcatcatttgtgcttcaattggctctactacaaccatgaaacagaaaacaaaaatagaaaaaatccaataaagactgtatgttaacttaagctatctatgaaaaccgaaaggtatcagtacctttcggtttttactattaccgggattaattaccgatgtttttattagctatcaattcaatagcataaaacgatatgacgtctgctcaatgttcagctatttttaatgtatcccatgtcattagtttaaattaagggagcattacaaatgagtactgcaaaatttgtcagaaaaagttcctccaaactgatttatacccgtaataatatcagtgagggagtcaaacaaagttcaatttatgcactaaatcatatggtcatccagtttactgacctgtctctgatgactaagcaggcacactggaatatccgcggcagaaacttcatcgccatccataaaatgctggatgacttccgtactgcgctcgttgatcatctcgatacctttgccgagcgagtcgtgcagctaggtggagtagcgttaggtacacttcaggaagttcacaaaggaactcagctggaaagttacccgacgggtattcatgatgtacaggatcacttaaaagcactggctgatcgttatgctattgttgctaatgatatccgtcaggctattggtgatgcggaagatgaagatacagcagatatgttcacagctgcttcccgtgatctcgataagtttttatggtttcttgaagccaatattgagcactaagataaaaacaccatcatcatacacactggatttcatgatacatcgctgccgcaaggaagttcatccccagaagcgtagagctatgtaactggggtgaacgagcgcaaccaccaaagagataatttgaaagacaaagtgatttgaaagacaaagtgtataggccgttattacggccttttttattataaaaaacatctaaaatagaagttataacctaaaaaatcagactaacctttaaaaaattcatttttctctctataatcccgtctgctttaaaaataaacatgaggacaatatacaatggatatcgaagttaaagattccaacggtgcactgctgaatgatggtgattcagtacaagttatcaaagacctgaaagtcaaaggcacctctaagacactgaaacgtggcacattaattaaaaatattcgccttacccaccgtgaagacgaaatcgaatgtaatgttgataaaatcaaagggttagtactgaaaacttgtttcctgaaaaaaatcggataaataacagttatcagcctaactttaccttaaggataaataatattaacttttatattatttatccttttttcattttcagtaatatttcttccgaaggtatatccggttgttcaatcggaaaaacaggcaatgcatccagcaaacgagatccataacgcttggtcagcagccttttgtcataaattaccacatcaccatgacactcatgactgcgtatgagtcttcccacttgttgaataagactgaaagaagcactcggcaaactctgcacttcaaaagggtagcgtttcagggatttaagccactcactttcagtgataatgacggggtttgtgacaggcggaaaagcaattttatggatgtgtacctgtgaaaggtaattacctttcaaatccagtccttcagcaaaagactgcaacccaaccagaacactgggttgcccttcgtcaatacgtttgcaatgggtttccaccagccgatatcgtggctgatccccctgcaccagtaacatcagccgtaaatcttttacaaattggagaaaaccctccatcgcgcgttggctgctaaacagtactaacattccctgatgagcacccaacaatatttgcgaacggaaataacgcgccatttcctcaaggtgttgcatttcattatggattgtaggctccagcgtcattcgcggaataatcagacgcccttggcgcacatgttcaaaagaggatgtcaaggtaacaaagcgatcatcataattttcatgcaatcccgtcagctcctgaatacgggaaaagctgttaagagagcgcaatgtcgcagatgttacgacaatatgaggaatgtttcgccacaataactgagttaattgttcactgacccgaatacccgcgcagtgaaagtaaagatgtgactgattcttctcataacggcgtgtcagccactttgagataggagcatgggaggattcttcctgcgaagccaaccgccacagctttgccatattttcgaaataacccagtgtcctgctagtcagcaagatagcccgatgcaacctgacaatatcctgtttcgcggtttgatcggtaagatcattcagaatcgcttcagataagctacgcaggccatctgtcagcttaaatagtgtctgacagcacagcagcaaattatccggtaattttcccagttcaaacaggtattcttccgcatcccctcgttcgggcaataatgcctgtgtgatatcagccagctccctgaaacactcacgaattttttcacaatgagcctgtaaacgggttatctcagccaaagcaggcggttttgtcggacggaactgaagcaaatattgctcgacatgacgaacaaaggaatcaagctgcccatttagctgaaatagcgtaatctctccttccacctccagtgaatcccttgcaacatccgggatatggtggccttcatccagaaccagcaacatatttttagcttcaggcagaacggattcactttccaatgccgccatcaccaaagaatgattggcaacgacaacatcagaatcttcaatctgccttcgggccagaaagaatggacaacggtgataaaactggcagttacgggccagacagttcatcttatcagtactgacctttgaccatagcgaatccgacaatgccagctgatgatgatcccgcaaaccatcccagccaaaagtagagtaatcattgcgtaacctgcgacacagttctcgttcttcactatttgctacagcagtctgatcttccaccagcagcattaaatcaatttgctccccctctgcggcgcaaatagcttccagattacgcgggcaaacataacgcgcgcgaccaaaagccccggtgaatttcaaatctgggatgatttttcgtaatagcggtagatccttactgtaaatctgatcctgtaaagccacattagcagtactcactactaatagtttctgctcagcccgactgactgcaataccaggaataaggtaggataatgtttttcctactccggtgggtgcttctataaccaaatgccgtccttcatcatctgccagtgttttcgccacttctgcaatcatctgacgttggggagctcttggtatgaagccatcaatgtgggtggataacgccttataccattgactgatttgattttttattgaactggaaagtgccatatgttttgctgcatgagaattatcaccccattctcccacagagttaccctcagatcagcctgatatcacgattattgggaacagctttccagcttttttacagaaaaaaccagaaagtcgcttattgcttgtctggagtgtagaagccgatatacttctatacccgttgtctttcaagttgtctctttgttattggctgcgatgcaactggaaatccattgggtataacctcctacatgactaagaattttatcgggaacaaagatgaaaaagatcctgcttgttattatcgtactattcaccctcggctctatcggaggcattattttagcaggaatgaacatgtataaccgttcaaccgcctcagcagaagagacacaacaagtacagcaagaaacggtacatcaggaaaacggacaatccgggcaacagtaatagccgatataccctcagatttattgcagtacccaatttagtagtataacgcacggaatatccaatgacggggaggcttatgaacagtcaatattttgttattccacaatggctaagcgaacatctcaatgatgagaatgttgttgttattgatgccagtgctcccatgccaactgaatccattgattatcagcagaaatggctggagaaacatataccgggctccggcttttttgatcttgataaaatagctgatcttcagagtccattaccacatatgctccctgctccggaaactttccaaaaagccgttagcgaaatgggaatcagtgaaaatcatctgattgtcatttacgatcagggaaatatgttttcggctccacgggcgtggtggacatttaaaacttttggcgcaaaaaacatccgtattcttgaaggtggcttacaaggctggcaacgggctggttacccaactgaatcgggagaagtcagccaccatgcacaggtattcaatatccatttttctcccgaacatgtcatttcccggcaacagatccttgatattctccataatgaagaggagaaaacacaagttgtcgatgccagatcagtagagcgttttcaggccagagcacctgagccacgcccgggtttaagaatgggccatgttcccggttcaaaaaatgtcccgtggacagcgctacttgaaaatggacattacaaatcgccagatgaaattaaacgtatctttaaacaacaaggtgtcgatttagggcaacccattatcactagttgtggctctggaatgacagcggccgttttagttctagggcttgatataattggtcataaaaaagcagcattatacgatgggtcatgggctgaatggggagctgatgataatctcccatcagaaaaataaataataatgtacttaagtggttgagctgtttcacagtggcaaaaaacaatttaaaagatacaagggcatcaaattatcatgccctttctctatcactcatcttaaatctattattaagattaataaggataaataaattaattagagactttgtgatatataaacaggacaaccagtgcaccaataacagcaatagcaaaacttcccaaattaaatccatctacttttcccataccaaaaaatgtacttatatagccaccaacaactgcaccaataatccctaaaatcaccgtcataatgataccgctactattatcacccggcataatccacttcgcgatgatcccggcaattaaaccgaagatgatccatgacagaatacccatactcaaccccctgattcgattagatatacctaccctatctcaaaccacctcttttttggctggcttcattttctctgaccgcataattatctatgctctcgggaaccaacgcccttgacgccgcgatgcagctcgaaactctgggtatattgggtatcaataagagctaacgccctgatgagattttactgagaatgtcttaactacatttcctaatttaagacactaactaaaaaaattgcaaatagtagaaagctgtcagtttatgaataatcataaggaattatagggttcagttaaatcaaaatatgtcgttaattaatttaatatcattgttgtttttgattaattaaacacaaaatagtccggacgttataattatatgaattctatatacccgataaaaaagaagtgcagatgtgcgtgtgtcactggggaggtaaatgtaaatatagccgctcaccctcggtatgtggttatgaatatagaatagtctgtattttgcaggattactgagaggctcctgcctctcaccagaggccagcttttggctggacaaattcgttcctgatgaatttgtcattccttcgccactacaatataacttgcaattcgttggtatatttcaattattttgccatatccaatgcctgtgcaaggtctgcaataatgtcatcactgtgctcaatgccaatagacaaacggatcagatctcgtgatgcgccagcttttatcaactctttttcatttaattgacgatgagttgtagatgcaggatgacaagccaatgatttagcatcaccaatattaaccaaacgtgtaatcagttgcagagcatcaataaaacgtgttgctgctttttcctctcctttaataccgaaagatagaatagcagaaggtttccctcccatataacgtacagccaaatcatattcagggtgagttggtagtccggcgtatttaacccaggataccagaggatgttgttccagatactgagcaactttcaaggcattttcagtatgacgttccatacgaagagcgagtgtttcaaggccctgtaaaatcaaaaaggcattaaaaggagaaagggatgcaccagtactacgcagctgcccaacacgacagcgggcaataaatgctgctacaccaaaatgttcgagataatttataccatgataggaaggatctggcgtattcaaaacagcaaaacgatccttatgatctgcccaggggaaattgcctgaatcaatcaccattccgcccatggaatttccatgaccaccaatatacttggtcagggaatgtacgataatatcggcaccatgttcaaacggacgacacaaataaggtgttgcaacggtattatcgacgataagtggaataccgtgccgatgagcaatatcagcgaatgcgcggatatcagcaatattcccgcttggattagtgatcgtttcacaaaaaacggctttggttctttcatcaatcatcgattcaagagcagcaagatcgtcatgatcaataaaacggacttcaatcccaatattttggaaattatgtgtcatcaagttataagttccgccatacaattttgctacagaaacaatgttatctcccaggccagtaattgtctgaatagcataggtgattgctgccatgccagaagcaacagcaagtgcacccactcccccctctaaagcagcaatacgtttttccagcacatcattagtcgggttcataatgcgggtgtaaatgttgccttcaacttttaaatcaaataaatcagccccatgctgcgaatcatcaaaggcataggacgttgtttgataaattgggacggcaaccgctttagttgtaggatcaggagagtaaccggcatggatggacagtgtttctaatttcattggcatttccttcattgaattacaagtaaggtcataatgaaatagacatttctcaggcccgcttcagcatccgatgatgaataacatcagcaaaacatgaagaagtgtctcacggaacaaatgatcaagtttgtgacaatccaactgactgaagtggtcaattcagacaatttgcttatgaaattctcaatatgtatacacaatgtatttcaggctacatcgcagcagcaagggagttcccccccccctcccccaaagaacatagataaccgtatgtttataaaaacggtgacaggggggaacaagcgcaatcagcaaagacgcaacctgaaaaacgaagtgtatagcatctttcagaatagagaacaataacgataaaaataacatcattatcatcatagaaactgagaggaaactgaagatacgttaactaaaccaatgcattatcaatcaaatacatgtcgttctctacaacttgagaaatcacttcagctatagccgaagatgtttttaatgccctgacttgcataaataactcctcagcttcactgtattctctgcgtagataaccaagccattgcttaatgcgggcaacatgatataaaccggtatccccttgtttttccaacagggtgtatttctgtaatagccggagcacaccatgccacgacattttcggttcattaaatttaatcacacggcttaaattcggcacatgcagcgcaccacggccaatcatcactgaatcacatccggtgactttgagacactcctgtgcactttgccagtcccatatttctccatttgcaataaccggtatggcaaggcgacggcggatctcgccaatcgcctgccagtttatgcgttctgctttatagccatcttccttagtacgtccatgcactaccagttcagttgcacctgcctgctgaacagcatctgcaatttcaaactgccgggcatcggaatcccatcccagacgtactttgactgtaaccggcaattctgccggtacagcttgccgcatggctttggctcctcggtagataagttcgggatctttcagtaatgtagccccgccaccattaccattgacggttttggaagggcagccacaatttaaatcaactccccacgaacccaattccaccgctctgactgcattttcagccagccatgacggatcttgccctaaaagctgtatcctgaccggtgttcccgatggcgtcctgctctggcgatgcagctcaggacacaaacggtaaaaagaccttaccggcaataagctatccacgatccgcaggaattccgtaatacagagatcgtaatcattgacctcactaagcaattccctgaccagtgaatccagaactccttccatcggagccagcaaaacgcgcatggtattactctcctgctaccgctttaactgatctgcgattgcgaggtttctgtgatgaagcattctttggccatacattcttgttgcgtgaatggccatgattttgccgggtagcgccctgtttatcaccggtgcgctgagctcggggctgattgctgcgcccgttacgaccattctgaataggttctgctttaatcgaaggatcaggttcatagccgggagtggtaatacgcggaatttcccgcttcagcaagcgctcaatatctttcaataacttatgttcatcaacacataccagagatattgcctgccctgttgcttcggcacgaccggtacgaccgatacgatgcacataatcttctgcaacattcggcaattcatagttaacaacatgaggtagctggtcgatatccaacccacgcgccgcgatatccgttgcaactaatgcccgtatctgaccacttttaaaatcagccaatgcacgggttctggccccctggctcttattgccatgaatcgctgccgcagtaacaccatctttattgagctgttctgccaaacggtttgcgccatgtttcgtacgggtaaataccagtacctgctgccagttctggctgccaatcatataagaaagcaattcccctttgcgtttcttatctacaaaatgaacagcctgttcaatttgctcagaagctgaattacgacgggcaacttctacactggccggatcacgcagcaatttattagccagatttttgatctcatccgagaatgttgctgaaaacagcagattctgacgtttggctggcagtttattcagtacccgacgaatgtcatgaataaaacccatatccaacatgcgatccgcttcatccaggaccagcatttccacgtgggataggtctacggcattttggtgttccagatccagcaaacgccctggtgttgcgactaaaatatcgactccaccacgcaatttcatcatttgcgggttgatacttacccctccaaataccacaaaggaacgtagccggagatatttgctgtaattgtggacattttcccctacttgtgccgccagttcacgggttggcgtcaggatcaaagccctgactgggcgacgccctttagattgaatgggagattcactcaataactgtaagataggcaaagtaaaacctgccgttttccccgttccggtctgggcactcgccagtagatctttaccggacaacacaacaggaatcgcctgttgctgaataggggtaggctctgcgtatccttgttcttcaatggcacgcaaaatatcagccttcaagccgagtgactcaaaattcataaataagaaatactccagacttcaccattcctgatatcaattcaggggcagttttatgggaagagaaaagacgcgataaaacgcttagaaattacataaactgcaatgcaccataggtgcggcattataccatatatgttttttcatacagcatgaagcataggtaaatttatgtcatctttacatcaggatggcttagttttaaaggtaattca

SEQ ID NO: 477 - DNA, 16184 bp, Xenorhabdus sp.
  CDS (1502)..(2467)
gtgctctaaagtgcatattcaaccagaaaagggccacaacctcggataccacagtgtgttgccaacaaagaaatatgaggtaacttatgcttcattgataactgcataacacctacagaaacccccttaaaataagcaacaaaaaataccatacctaatttactaatattttttgagtcagcaatgtaacccgctatattttcctcaatcccctcaaatatatcgagtgactcatcatatcttgcattccaactttgttgctctgaactaaacgaatcagaactgcgccaatcctgaagcatagtttctttcattatcattctcgttgcatttagtgcagctgaggctttaacttctctaacggcgataaaatatctgatatcaattgattttagccataactctgaaaaggattttgagcgggttaaagaacctgaacctataggatgaggtatgttaaaagattttgatctaaacatattatgatccaccttcttttataaaaaataattcagcttactcgccttgttttattattatttcaataaaaaacattcatatttattgtcaaaaaaacataaatcaaaatagagcatcacaatgaaatagtaattaaataaaaccaattcactaataaataacttgtaactatttgctttatcacatcatttctatttatcaaaaacttcaaactttcattctggagtaatacaaaataacattcgttttaatgaactccatgttcttattttttacgtggaaataaatacgagacgaattgcaaatccaatcagaattatgccaattacacgctcaaaccagtatcccatctgaataaatttcaatctgatcactgaattggaaaacaaccaactaaccagaataaaccatgctgcattcaccatacacatccatacaccataaaaaacctgaacagatagcggcgtcgtagtgcttaccacggttgtaaatacagccagaaaaaatagcgttgctttagggttggtcgcatttgtcataaacccgataaagaaagccctgcgaagagtttgttgctgcgctggcgcttcataggaaagggcaaaatcagccttttccggtttgcttctgataaattgaattcccagatagcatatatatagaccaccgattatttttgcggctgtcatcagccaatatgttgaatggattaacgccccaataccaatcagcgtataaatcacatggactgatatccccacaccaataccgatagcagtaaaaatacccacccaacgaccataacgtatgctctgcctgatagtcacggcaaagtccggccccggagcaacaacagccagaaaatggatcagcgcaagccccaaaaattcatgtagatagttagaaagcatatttaatactctttatataagcagaatatcctgattgtattaaataaactcagtagcgataatccatccaaaaaccaaataacttttgacctatgagcacaaataacacgataacccttatgcgggaaatggctattttcgccaaagtcgttgaaacaggaagtttctctgaaactgcccgtcagttagcagctacgccttctgctattagtcgctctgtagccagactggaaaaagcgctcggaacccgtctgctacagagaacaacacgtaaacttcgtttaagtgagagtgggcaacaggtttatgaacattgtctggacatgatgaattcagctcaggcagtcatgtctgcatcaggaaactttagcggtgaaccgctaggtatagtccgggttagtgtacctaaagctgtagggcgttttgtcgtccatccccatataccggcttttcttacccgttaccctaaagttgatgtcagtttgcggcttgatgacaggtatgtggatttaatagatgatgaagttgacctcgccatacggatcactgatcagccccctccgggtctgatggggcggcggttactcaagatttggcatatgttatgtgccacaccggaataccttgcagaacacgggataccacaacatcctcatgatctaaaaacccatagctgtatctatcttggtgaagaaccgggagattcacgctggaagttcagtcagggcagcaaaactgccactgttaatattcaggggcgttacgccgccaatcataccggtgtgaggcttgatgcagcactgaaacacatcggtattagtagcttaccctattttaccgccagacatgctttacagcagggacggctggttcaggttctgcctgactggaactttaaggctaattattccggtgaattatgggtgctttacccgccaacgcggtatttatccccgaagcttagtgtatttatagagtttcttgctgaaagactccgtcaggaaaatatccaagataaaaaagtcgccaaagaacctcatcattatcattacgaattacctgaggccggggagtagtccatctttagcattttttataactgcccgtctgatctctgttttcctaatggcatccttctaagtctggcaccgcccgctattgccagttaagctgtaggcaatttactttatcacctcaattaaaaattgatattcactatagcgggggccttatggctgatacagatattcgcattgctatcgtaggggccagtggccgtatggggcgtaatctcattcaggccgttcagcaggcggatggcgttacactgggggctgctctggtgcgttcaggttcttcattagtaggagcggatgccggagaattggctggcactggtactaacggtattacgatccatgataacctccactctgttattgatgactttgacgttttgatcgactttaccctcccggaaggcacactgacctatcttgccatttgtcaccaacaccgcaaagcggtgatcattggtacaaccgggtttgatgacgcaggtaagcaggctattcatgatgcttcccgtgacattccgattgtttttgccgcgaatttcagtgttggtgttaaccttgtcctgaaactgttggagaaagcggcaacagtaatgggagagcacacagacattgaaattattgaagctcaccatcgccataaagtggatgcgccatcaggcaccgcgctggcgatgggggaatctattgctcacacattaggccgtgacctgaaaacatgtgcagtctatgcccgcgaaggctatacgggcgaacgagacccgaaaagtattggttttgccactataagagccggtgatattgtcggagaacacactgctatttttgctgatattggggagcgagttgagataacccataaagcctcaagccgaatgactttcgcaaatggtgctgttaaagcagcaacctggataaccaataaaaatagtggcctttatgacatgaaagatgtccttaatctcgaaaacttatgatttattgaattcataacatcatgtaattacgccattatttttcaatgaatgcgtaattacatatttaaatagtaaatataactttcatcatcaattactcacagttttacaccataaattgtcatttttatcatcttttctcccataggtactgaaaatcacacggttttttcagttttaaaatttaatttcacattaatcgagcatataatcgcactttacttataattttcaggcatatttcaacaatgttggattgagcctcgcaaaaaaaccaataaaaaagggattttttgtagacaagccccgttctcatcattagaatgcgcgcaatttgccaaaatttcgacaaagaacatgattggcattgatttaaaggattaattccgaattaatatgcattgagtgcgatttgttattcattcccggagggcgttttgattaagtcagctatattggttctagaagatgggacccaatttcacggtcgcgccataggtgcagaaggtgtggctgttggtgaagtggtcttcaatacctcaatgaccggatatcaagaaatacttaccgacccttcctattcccgccaaattgttactctcacctatcctcatattggaaatgtcggcattaacagtgctgatgaagaatctcccgccattcaggcccaaggcttagtaatccgcgatttacctctcatcaccagcaactaccgtagtgaaaacaatctgtctgattatctgaaaaatcataacattgttgcgattgctgatattgatacacgtaaactgacccgcctgttgcgcgaaaaaggtgcacaaaacggctgtatcattgcgggtaatgaagcggatgttcaagttgcactggaaaaagcaaaagcatttcccggtctgaaagggatggatttggcgaaagaagtcaccacggcacagtcttatcagtggttacaagggagctggacactgacagaagggttgccggaagcccgtaaagaacaagaattgccataccatattgtcgcttatgattttggtgtaaaacgtaatatcctgcgtatgctggtggatcgtggctgccgcgtgactgtcgtaccagcccagacccctgcggatgaagtgttgaaaatggcaccagacgggatcttcctgtccaatggtcccggtgacccagaaccttgtgactatgccatcgaagcaattaaaaccttcctgaatactgaaatccctgtatttggtatctgtctggggcatcagttactggctctggcaagtggtgcaaaaacggtcaaaatgaagtttggtcaccacggtggcaaccatcctgttaaagatttagatcgcaatgtcgttatgattaccgcacaaaaccacggatttgccgttgatgaaaattcattaccagcaaacctgcgcgtaacccataaatcactctttgacggcacactgcaaggtattcaccgtactgacaaacctgcattcagttttcaggggcaccctgaagccagccctggtccgcatgaagccgcttctctgttcgaccactttattgcattgattgaacagcatcgtctgcaaaacgctcagaacaccaaataatcaggagaaaaaggaaaatggcaaaacgtactgatattaaaagtatcctgatcttgggtgctggcccgattgttatcggtcaggcatgtgaatttgactactcaggtgctcaggcctgtaaagcgctgagagaagaaggttaccgtgtcatactggtgaactccaacccggcaaccatcatgaccgaccccgaaatggctgacgcaacttacatcgagccgattcactgggaagttgtacgcaaaattattgagaaagaacgtccggatgccgtcctgccaacaatgggcgggcaaacagcactcaactgcgcactggagctggaacgtcagggtgtattgcaggaattcggcgtaaccatgattggtgcaaccgctgacgccattgataaagcagaagatcgtcagcgttttgacaaagcgatgaagaaaatcggtctggatactgcacgttccggcatcgctcataccatggaagaagcactggcagtcgctgaagacgtaggcttcccttgtatcatccgcccttctttcaccatgggtggaacaggcggtggtatcgcttataaccgcgaagagtttgaagagatctgcgagcgcggtctggacctttctccaacgaatgaactgctgatcgatgaatcgctgattggttggaaagagtatgaaatggaagttgttcgtgacaaaagtgacaactgcatcatcgtctgctccattgaaaactttgacgcgatgggtatccataccggtgactccatcactgtcgcaccagcccagactctgacggataaagaatatcaaatcatgcgtaatgcctcgatggcagtactgcgtgaaattggtgtagagaccggtggttcaaacgtacagtttgcagtaaaccctaaaaatggccgcctgattgtcattgagatgaacccgcgagtctcccgttcatccgctctggcttccaaagccactggcttccctattgcaaaaattgcggcaaaactggcggttggttacacccttgacgagctgatgaatgacatcaccggcgggttgactcctgcttcttttgagccatcgattgactatgtcgtcactaagatccctcgtttcaacttcgaaaaatttgccggcagtaatgaccgtctgaccactcagatgaagtccgttggtgaagtcatggcgattggtcgcactttccaggaatctctgcaaaaagcattgcgtggtctggaagtcggcgcaacaggttttgacccgaaagttaatctggatgatgtacaatcactgaccaaaatccgtagcgagctgaaagatgctggcgctgagcgtatctggttcgttgccgatgctttccgtgcgggtatgtccgttgatggtatcttcaacctgaccaatattgatcgctggttcttggtgcagattgaagagctggttcgtctggaagatatggttgcagagcaaggcatcaacggcctgacttccggcttcctgcgtcagttgaaacgtaaaggttttgctgatgcgcgtctggcaaaactggctggcgtatccgaaaaagagatccgtaaactgcgccatgattatggtctgtatccggtttacaaacgtgtagatacctgcgcggctgagttttcaactgatacggcttacatgtactccacttatgaagatgagtgcgaagctaatccaaacaatgataagccaaaaatcatggtattgggtggtggcccgaaccgtatcgggcaaggcatcgaattcgattattgctgcgtacacgctgctctggcgctgcgcgaagacggttacgaaaccatcatggttaactgtaaccctgaaacggtttcaacagattacgacacctctgaccgcctttattttgagccggtaacactggaagacgtactggaaattgtccgcgttgaacagccaaaaggcgtgatcgtacagtacggcggccagactccgctgaaactggcgcgtgaactggaagcggctggtgtgccaattatcggtaccagcccggatgccattgaccgtgcagaagaccgtgaacgtttccagcaagcagtcaaccgtcttggcctgaaacaaccggcaaatgccactgtgacaaccatcgaacaggcgattgaaaaaggtaacaacctcggttatccgctggtggttcgcccttcctatgtactgggtggccgggcaatggaaatcgtatacgatgaaactgacctgcgtcgttacttccaaaccgcagtcagtgtttctaacgatgctccggttctgttggatcgcttccttgatgatgctgttgaagttgatgtggatgctatctgcgacggcgaacgcgtcctgatcggcggtatcatggaacatattgaacaagcgggtgttcactctggtgactcagcctgctccttgcctgcctataccctgagcaaggaaattcaggatgtgatgcgtaatcaggttgagaaactggcctttgaattacgcgtccgtggtttgatgaacgttcagtttgctgtgaaaaacaacgaagtctatctgatcgaagtgaacccacgtgcagcacgtactgtgccattcgtttccaaagcaacaggcatgccgctggcgaaagtcgctgcacgcgtaatggctgggcagtccttacagtcacagggtgtaaccaaggaaatcattccaccttactactccgtgaaagaagtcgtattaccattcaataaattcccgggagttgacccgattctggggccagaaatgcgctctaccggtgaagtcatgggtgttggccgtacctttgctgaagctttctccaaggcaatgctgggcagtaactccatcatgggtaaaaaaggccgcgcactgctgtcagtacgtgaaggcgataaagagcgtgttgttgatttggcggctcagttagttaagcagggctttgaactggatgcaactcatggtactgcggttgtcttgggtgaagcaggaatcaacccacgtctggtaaacaaagtgcatgaaggccgccctcacattcaggacagaatcaaaaacggtgaatatgactacattgtcaatactaccgcgggccgtcaggcgattgaagattctaaactgcttcgtcgcagcgcactgcaatataaagtgcattatgacaccaccctgaatggcggtttcgcaaccaccatggcgctcagtgctgacccgactgagcaggtcatttccgtacaggaaatgcacgcaaaaattaccaagtaatttaagcgaataaaaaacagcgcccccaaagttggctatccaatcagtaagggcgctgtttttttatctggtgatatcttaaatccagaaattgtacttatctttaagccgaatattcgctactgacatgacatcagttaaaacacaattaattattgtagttcgaaaaacatccgtaagtgactattaaagcaaaaaccgttaagaatacggggattatcaatctgttgttttactaaaaaaccatggtgtcgatagaggctgatcgcacgctggttagtagtagcaacgtccagctcaatcattttgtattttcggtcacgagcccggataatttcctgttccaatagttgggaaccaataccttgacgggaaaattccggatcgacagaaaggttgtagagaaaacaggaattaccttccggcttgggcgtagctgatgtggaagcaagtaatctatacaagcacttgatggcttgggggaaaggataaaatgaaaaaacagaactcagtgttccccaatttaaccgattaatttcactacgatcataggctgcgatcaccccaatacatcgatcatcagataacatcaaacgatgttgggagtaactaaaataacctttttcaccacgaaactcttttattagatatcgggaacgtaactcctcagctccataaataaaattcagggtatcagtagatatattgcccaacagattgattacctgagaagcataatctggagtggctgggcagtgttgaagatttgcgctgtgcaatttattcatgtcagatccacaccaagcatacggaatagtttaatggcatttgtctgatgtgatattccttccttgaggcgataactgaagaatattttatctggtgattgatcatcgatagtttcttcaaaataaatgttacgggagataggctgtaaatccgaatcagtcgctaatgtggtactgtgggtggttatcattcccatggcctgttgagcacaaagtttttttaatatggcaatgattgccatattacgctcccgttcatttgttccctttagaagttcatctaatagatagacgggttgtaacccgctttgttcgacccttgttattaattctttaatctgcaaaacctcgctcataaaatatgacaatccttgatgtagagaatcagcggctgagaatatggtaaataattcacaaggatgaaatatcagttcagaacaggctacaggcccgcctgccatggcaagtttcaggttgagaccaagtgtacgcatataagtggttttccccgacatattagaacccgtaataatggtcacttggccgggaataagtaagatatcgttagcaattgcctgctgtgcaggtaatagaggatgaatggcttgctttgcatgaagtttgcgctcgtcgctcattgttggaaagtgccaactttgattttcatggctcagatttgccatagcacttagtgcctcaaataatgagatagcttccagccaacgggggacatgctgtgcatactgcttatgccagccctgaagattcagggtgatatgaaagtcccagagtaacgtgcattgtaggacaagatacggcaaggcattaaagcgtaagtgtgaataatggatgatggttgacaatttacgtaatgccagctctggtcgttcagaagggttttgtagtaattcactaatattgcgtaaagtctgtgcgtaatactcgccagaattaatatttctgactatcttcgacagactattcagggcattagattgaaggtcagcacggttaagtgcttgcttaaattgattcccccgtaacataagaaatatgatattcatagccacaggagggataacaatccagccaggagcaaagcgagttacagcacaagtaatacaaactaatgaaagcagagttagcatttgccccactcgttttagcctgacagtgatataagggaaagttgtgcttgtcgcccagtcatgaaatttctccagataatatcctccccctgtacggtctggctttctcgcgcaagcgtacaatttctggcgtaagtctaattgtggtgccaattctttaatagcttgttgatgctgtgaaagttgcgatataggacacccgcgcgttatccatacggcaagcttggaatcaccgagacttgtcgacagattaaatagcagttgccctaaagaggctgttccatataagttgagagcacgatcctgttcactgaaatgatcagcaacatgtatcgggcaaggtgccagcgctgggaaatttcgatgaatgcgctctaagctttctgtatttagtgtaaccagagtaagatggttctgtaattgttcctgtatgtgatgatgcaagaagactaagccaacaaataacaatataccaccagttaccaatagccatgaataaaataacaactctggttgttgccataaataataaactaatacgatcaggctaataaatatgatgaaccgacttaattccacgtatttcagacgttgctgtaacacgagtactttttgagataaataatcaactcgtgtttgccatgggcatttttcgtgagtatcagaattaatgtttatcgtcatttttgaaaacacgtcgttcctttggctgagtaacatcaaattttttggcaagaatacgaccaaataatgcattaaacagaggattcctaaacttcatataaatatcattacgtattaggcatgcaccaagattttgtttaacgaagtaattggtaatcccaaggtcgataattttagtctgaaaatgactgaatctctggatcagatccatatgcaaaatatcgtaggaatttacttcactttcttcttgataattacggccaaaaacaaaagggttaataatactttcacttataccactaaaaataaatgagcgtacttgatcctgtttatcataaagtacggatactacgacttggcattttttttgtatctgctcaaaaaagctcaaaggtaacgcctcacgcttatattcacttgcccggtggtgagtattgaggtattgctcataaatcccctcaagctccatagtttgttcatgatagtgaacaatacgccatcctgattggcgaaactgtgactttattcggttaagcaccttacggcaattggctttcagattttggctatgttgttcccatgatctgccttggagctggacaaacgccaaaggataattcattgccggattgaagccctgtgctaacaactgtgaatgtaatgcagcataatccgtctctttatgctccacatcacgaatgatcctgacaaaagcacggggaaaacttaaagctaaagaatgattgattatgtcgatacgttgctgaggaataatttcatgaaaaaaccaccaatggcagccactggtttcataactgccaagcatggctgcggtaatgcaaccaaacttcggaaaaaatcgctgtaatctcgatcgtaatgcagagtgaggatcagaaatcagatcaatggattcttgtgtcgcaaagaacagtccctgtaaggaatgcctcaaatcggaagcgaagacttggaaatatcgatattcacgatgaggaagcgtttgttcacagacgctcataaaactatgcgttttaaatggatgcccttgagacaaggtttcattccatatataggcatcaatatcttcgatagaattataaacttcaatatgaaacttatggatacgaaattcatcaatcaacatgttttagtgctcctgaagattttagggcatcaaggtaatcttcattcaatttgaacacttttcgctgttctgggatttttggtgcaggaaatatcagttttctgaaccgatataaaagataattatacaaggcgttagaatgctttatataaaagtacagcttggatgatatagcacctacactaaatttcgcgtcgtagcttgtctggccaagttcaatatatggatattgttgattttgagcttcttcaataactcgatataagcaattgaaatagagtgcactggcatcgcagtagctgtagtcaatacctaagtataacgggtgtaggtttttgcccttgaggaataattcgaaagcgacaatacaatcatcatccagacacaacaatacttgtgcttgatcgccaagttcttcattcacagcatggaaaaattcaggtgttaaacattcaaacttggtatggctacgttgcaatacattacgatataagctactaagtttgtcaacgtaagcactaaagtcatcaaccataatccaacgtagaccagtagcatcaaacttccgcttgcgtcttctcaatacattcctataacgttttagcatattattgatgtattctaagcctccaacttgatcagtataaacataagtcgtgtcagggctacggcagacgacaaatttgctctgtaagacttgctgcaagcgttgatgaacatatccgtcaaactctttgatacactgcaatttaatttgtagttcagatactttcctatcaatctctagttccatagcttgtaacaatcgggggtaatcgggatgatccggtggtagggaaatgcctagcatgtgactgcaagttgcaatcggactaccgacgacaaaaatccttggtttcaaaaagccgggaaatatcttgcgcaaggttgcaacccaatcctgccatttcggagaggcaagatcagttagggaataatacatactgaagcaactaataatagctgtcagtttttcgttacgataaaggctaagatagtaaaaactttcgacaagttcagaacgttctaacgcgagttgcaatgaatatgaagtaatcacattttctggatcatagcagtgttcccagtcctcccgagaaaaatgactgacactttcaacccacttacagcttatttccataactgcaaatcccatataaggttatattaaagccagcttttgaccaatttggatgaaagtacgaatgctataatccaactcttcgttgttcaggtttgcgctcaaattaatccgaatccgtgcccgtgtcttacttacagcaggataagtcacaggattaacgtatatgcctttctcatgaagcatacgggccatagcgaaacagcaatgctcatcccccgtaatcaatggcacaatggccgtttcgctgttcaatatattaaatcctgcatcgcgtaatttctgacggaaatactcagccttggcttgcaactccagagtcaactgaggtgaactctcaagaatgtcgatggcgctgatgattgaagcgagtacagcgggaggtaacgaagcagaataaatgtaaggatttgcagcaatacggataatatttcctgttttcttgttggtagcaataaatccgccaacgccaggcaagcctttgctcaaactaccggtgataacatcaacctgatccgttattccaaaataagcacaacttccccggccgttcggtccaatatgcccagtaccatgagcatcatcaacaatgacgaacgcattatattttcgtgctaagtcgacaatcccgggcaagggtgccaagtcaccatccatactgaacacaccgtcagtgataataaatttacgtgcttgaaatgaagtttggctaagcttattctcaagacttttcagagaagcatgctggtaaatccgggtcgttgcaccacttagtttcagaccatcaacgatagattgatggttaagcatatcactgaaaactatgtcaccttcacgacatagcgtggagagggctgcgagattcgctgaaaatccagagctgaaagtaatgacttcttccacaccaaggaatttagccaaccgttgttccatttcaagatgtaggtcactagtaccattgagaaggcgtacaccactggatgtagttccgtattgatgaattgcattgatactggattcgataatcttttgatgaccattgagtccagaatagttataggaacctaaatgcagaacttcacgtatatgtgtgctatcagcgctgacagggttgtagctaacagaaacatatttacaaggtattctatgaaatactctgccaatcatatccattttgccatctgaaacaaaattatcgtaacgctcagccatgttttgtagataatcgctggatcgcgtgatatcacgatgatggttatctatttggggatcagtaaggcgcaatttattcatgatgttttttccttgcataaggataaaaagtaacaatgaagataagtgttccaatattgagagccagacttacccaaagtaacggctgtaaattggaataatttgttagcaaataaacgatgaatatcccttctaaagcctttatgaacaaagtgactaacgataaatgattgtgctcagtacggctggagtacaggcaattggttaacaagaagatcaacggcactagccatacgtcaatagtattgagttgatttgcattgaaaatgatatagaagctaatgagtgttggagataccagcattaacaatgtagtagacattgctggatttggatttatcgaagcgataatttcatttttaaaattcagatatttaggtgaaccaaataatactctcaaaacagatttcaggttgggctggttcattgcctgccgcaaacatgccaaatacatgaagctattcagatatcccaacgaatgaggctgggctattggtgtggtgatgccataacgtattggctcttctgataactctcgttgataggttccaaatattctgtcccagataactaaaaagcagccgaaatttttgtctatatagagcgaattactggcatgatgtacccgatgctgagaaggtgtgacaaaaatcttttctagaaatcccaattcgcgaataaatgttgtgtgtataaagaactggtagaccaactgtgcagcgatagccagaaggtaatgttccaatttgatgcccagaaaggccatggggagaaaaaacacccataccgtaaaatttccaaaaaagcctaagcgcacagcagtgctaagattaaagtgctgtccactatggtgcacaaggtgattagcccatagcaggttacaacggtggtgagcccagtgattaagatagtagaaaaaatcgtagaatatgaaagtcgccagtatctgtaggaaagtatttggtaatgggggtatcaacgcccaatgctgttgcacataataatagatcgataaatgtaagcccgtgaaaagcaccccggctactaaattagttgcgcctaatgaaagattcaccaaactctctatgatattcaattgagaacgtcgtcggaatagattcaacaccagtgcttctatcaccatactaattaaaaatatgggcaataagatagttagtatattttgtcctgccattttttaccctatttgtagcaatctacctatatccatcatcaattcctagctaaaagatactcctgtcagctaatccaaaaccgaaggtatttgtataaaccacattctcatatctttagatatgatgattacgattgagcgacaatgtcctcatggttactgcttacaacagtcatactaccagatatggctatacactattctctgtgattctatatctagcttgaaagccacacatttaattacaattgaacaacaaaataacgacaaataaaattaattttattttcaaaatacagaagccaattaattttttgtaacgggctgatggaattcatatctacatagcctgaagattcagcctatctatgaatgctctaataaagaaaaagccatccttttttgagatggcttttataaaaaataataactgcctttcttactaactccttttattcaatataa

SEQ ID NO: 478 - DNA, 17816 bp, Xenorhabdus sp.; identical to SEQ ID NO: 97
  CDS (8266)..(9189)

SEQ ID NO: 479 - DNA, 18510 bp, Xenorhabdus sp.
  CDS (12180)..(13100)
tatgcccggttgagagctgccctgtatgaatacacagaatatttcaaaagcacccatgtgctcaatctgattgatgatatgcatctaagaaaagcaatacggactgccaggaaccgtacggagtcgtaccatcaattacaacgcattatccgtaaaatctacaacaacgtgttcaaaggcaggaaaatcaccgataaccgagtcagcgcccatgctgccaggttagtcgccaactgtattgtggcgtacaacgccatgatcctaaatcgagtgtataaaaagatggtatttgaaggtgtgccggaagaaatactggaaaaatttgcgagaatatcgccgattgcctggcagcacttgttctttactggtcgttacagtttcaagaaggcgagcaaaacatccattgatgttgctgcactggctgagctgttggaacaacacttaaaacaggcattctggaagtcatgaccgcagaatcgtcacttttgggggttcttcggcggaacccgacagtgatatttttgacatggttgaatttaggatcatcattaaatgaaactgctgttgcatgaatcggtgttatctggtcttctactgccagcgaaacctccaccccatttacagacacagtgctcttcaatgatgcggtaagtgtaccacctagtccggttgtatccttgccatccttatgtgtgaatgtaatctccgacatattattatttatattccatcggacattagagattacctgaccttcaggagcgggcttgccatcctgatcgacaatataagcggtataagtataggtatcattgacaataagtgggcttggtttatcaatacggattttttcaacatgataccctttagtgcccgcaataaaagaaacagcttttgctgaaacagattgattattttcgatagaaagcgttaccacaacgtcatttaatggaattaaactacttaacgttgcttctaatactcctttatttgtcttaactgttcctgttggaccatcgacaaaaatatccttaacttcgtggccttttgcatttttccctactgcactccatttcacattattaactgtatcaacaggtaaattattatcagtaatgatttttgctgtatatttatatttattcttaccatcagcaatcagtgcctttttgggatcaggtgttacattaagttggttgttttctattttgtaatcactgaattttactgagcctaatttttgtcgtggagcaccatcaagctggatataaatatcaacattatctttcggaattttactaactaaaacatttgtcagtaatttcccactactatcagttaattcacctttttcattagtttgagcagatttgttattccatctaaattttaatttagattcctcgcctaaagcgggttcagttgtccagctcacattatcaattttgccatttttaacaaatgctccatcaagtgagtcttgataagtaataactggagcatcaaatgtatagccattttcttctttccctgtcgcttctggatgtttcggtggcgtaatatttactgttccttttatcaaaaaaggtaaaattcttaccggaacctgcgtatttttagttatgccctgattatcagtaattgcgatgtcgagggtataatcctgtttatgtgtatcctgatagctgggaagcgtaacggtaatattttttcctgatttagcagaaagttttccattatatttttcaaattccttatctactactttccagctaatattatttatatttttaaaagatcgtaaaggcgcactaatcgctatttcctgatgcccatagccaataattggtggtaaagcaatcaattctattgtttctatttttttatgatccaaaacgatattattattcctttccactaaatcataacggctgcctgccagtgttcgcattgacgcaacattatccggtgataactgtgcactcagtggcacacccaatctgaaattaaagtttgtcagaaattgggtctcactctgtcccctctctccttgtttataatccacacccattgttatcaatggaattggtgtatacgtcactcccattgttgccagactgggatttttttgcttggtctttcgattaaataacgtcacattatcgccgaagtattgctcataaaaaaatttgcctcccaaattagggtaggcagataggaagaattcgccgttaatgtcatagccattggcgggtcgttcgtgatgttcttcaaaatcccgcgagatttgccagtcacttaagcgataatagccattggtggaaaattaaatataatctccccaaagctcccccccccaaccttacccgcctgtttttacccgtaacgtcatagtcataaaaagtattcaggccatacatccagtcctgagaaaaataacgtccccccaaaccgagattaactgtattccggctatctttgttgcggtaacctaattgagaaaaaaagaaccagttggcttgatgatcataaataggcaatagcagatctactgaattattttccagccttccttttttgtcaaaaccaaagttaatttttgctgtactcgatggggataaccatttttgagcttcggaagaagatagtgttgttaactttacccaaagcataagatttggcctgttcaatgagttctgaagaaggagtagataaaagactattcaccatgtgaacattattgccaataattgggggtatatcaggttctgagatctcatcattttttgctaattgagcattcaactgattattttgaatattattttctgctacagcattaatgattgctgaaggcatgaacagcgcatagaggaaaataaaaaaacgaattatttttcttgcgtatattagcatatgcaaataccctagaattttttataaaaactgagttaatgatttgctttttgaacaacccccatctatttccaactttaatagtagtaaaaaaatgaactttagcacaccgttggtgtaaatgccgcgaggcagctctgtcgcattaagaacagatcggtgaacatacacatttttgcagagtgagtcgtcaatgtgtttaatccgaaacggtttcaaacgactatactatcctaccgatactatcgcgcgggatgtccgttgatatttcacttataccctgagcttacgaaaccttaaagaggtgatggctgagtgcagcataaccgttgatctttctacgttatttcgctaggttcaccgtttgattccattgctcctccaacgttattggccggtattgaatgaatcaatacattgcgtaaaggtcaatatctgcaaggatcagggggttcctttcacccaccgactttttccatcaattgactgtataaaaaaatcacatcattttctctcgctagcgctctgttaatgtgatagaacctaattaattgaaattcatatctgggtgctatctcttagccccccaatagcacaaaaaacaataatcatttgttttattataaaaagaatacctttactgatcggaacagtagtggaaactcaacacatttttctctggcgtggtagaatctcctccgtttactaacaacgaatacccgatttatgtaggttatatttttaatacactacactattaactctggtattttgaacattaagaacaataaggaactgatatgggtttcatgaccggcaagcgcattctaatcactggcgtcgccagcaaactgtctattgcttatggaattgcgaaagcaatgcacgaacaaggtgcagaactggcttttacctaccagaatgacaaattgaaacctcgtgtcgaagaattcgcagcatctctgaattcaaacatcgttctgccatgcgacgtggctcaagatgaaagtatcgacacattgttcgttgaactgggtaaagtatggccgaaattcgatggttttgttcactctatcggttatgccccagccgaacaacttgatggcgattacgttaatgccgtcagccgtgaaggtttcaaaatagcacatgatatcagcgcatacagcttcgtcgcattggcaaaagcatgtcgtagtatgctgaatcctgactcagcgctgctaactttaagctatttaggtgcagagcgtgcaatccctaactacaacgtgatgggattagcaaaagcttctctggaagcaaacgtgcgttacatggcgaatgctatgggtgctgaaggtgttcgtgttaatgctatttccgcaggcccaatccgtactctggcagcatccggtatcaaagatttccgtaagatgctggcacactgtgaatcagtcacacctatccgccgtaccgtcactacagaagatgtaggtaatgcggctgcattcctgtgttctaacctgtctggtggtattaccggtgaaatcctgcatgttgatggcgggttcagcattgctgccatgaacgaactggaatagaaataatttcaataaccatttgatataatttgatataatcataaccacccgtataacgggtggtttgctcttgccctataagggcttgttaccgactgcgcctaaatgacgctgctttctcttcgttcaagctaagtgtctttgctgctttggcctaccccttgaaggggtctacatgctctttactactcaatttatccgagattaaatccgacttttcttgctctctgatatacttttgaattgtcgcttcatttagccctaccgtactgacatagaacccttccgcccaaaactttctgttgccaaatttatattttaaattggcgtgtctatcaaagatcatcaacgaacttttacccttcaaatatcccataaagcttgaaacgcttagctttggtggaatactcaccaacatatgaacatgagctggcatgagatgaccttcgattatttccacacctttatacttacaaaggtctctgaggatctctcccacacttgaacgaatattattaaaaatcactttccgtctatatttcgacgaaaagacgatatggtatttacacagccactttgtatgcgctgagctttgtgctttaatgcccataaacacctttccttatttgagttacgaatattagcttgtacatctatatcgtaacggaaaggtgtttttcatatcgtaacggaaaggtgtttttcttggtataacctttgaactccacccgcaaagcgggtggttttatgtttaagacgctaacgcgacttaaactggctaaagccataaataaaaaaacaggatgagtaaaacgactcatcctgttcctttttaccagtcagctaattatagctgatatcaggcgtgttttttctcaccaattggcagaatggtacggccatactgttcattcagaacttcagccattgccagatagaaagcacttgcaccacaaatcacaccttcaaaaccagcaaaagtcagaaggctggcgttaccagtgatgttaccaatcgccagcagagcgaacagtacagtcaggctaccgaaaatgaactgtaaagtgcggttagctttcagagtgccaaagaacataaacagcgtgaaaatcccccacagcgcaagataaacgccgaggaactcagggctggttgcttctgccagatccatttttggcaggaacagcacaccaatcagactcagccagaacattccgtaagaagtgaatgcggttgcaccgaatgtatttccttttttgtactcaatgatgcctgccagcacctgagccaaaccaccataaaaaattcccatacttaaaataacagacgttaatgggaaaaaatctgcattatgcagattcaataaaatggttgtcatgccaaaacccatcaaacccaatgggcctggattcgccaactgattagaactcatattttccctataaattcaaataaaacaaagtattaaaaaagattctcatagcacttttctatgccagaaaaccataaaaggcggcggatcataatgtgatggcatcaactacacaatgccctcagaaaaatttttttattaaatctcaattttttttcaatctcccccttgatgctgagatgaatgaccccatctaagtctcaactacagttactactgacacttcagtaacggctgaaaacatacaatgaggaatttctggcagacagtgccattgaaaagaaaacattcatcctcatatagcgtagtaacttgaccgaatatatgaattctttgtggaggcgtttagatgggtaaaatcattggtatcgacttgggaactaccaactcttgtgtagcaattatggacggcacaacagcacgtgtgcttgaaaacagcgaaggtgatcgtacaaccccttcaatcatcgcatatactcaggatggtgaaactctggttggtcaaccagctaaacgtcaggctgttactaacccgcaaaacaccctgtttgccatcaaacgtttgattggccgtcgttttcaggacgaagaagtacagcgtgacgttgctatcatgccatacaaaatcaccaacgcagacaacggtgacgcatggctggaagtaaaaggccagaaaatggcaccacctcagatttctgctgaagtcctgaaaaaaatgaagaaaaccgcagaagactatctgggtgagccagtaacagaagcagttatcactgttcctgcttatttcaacgatgcacagcgtcaggcaactaaagatgcgggccgtatcgcaggtctggaagttaagcgtatcattaacgaaccaactgcggcagctctggcttatggtctggataaagaagttggtaaccgtactatcgcagtttacgacttgggtggcggtactttcgatatctctatcatcgaaatcgacgaagttgacggcgaaaaaacgtatgaagttctggcaaccaacggtgatactcacttgggtggtgaagacttcgacagccgtatgatcaactatctggttgatgagtttaagaaagaacaaggtatcgatctgcgtaacgacccactggctatgcagcgcctgaaagaagcagcagaaaaagcgaaaatcgagctgtcttccgctcagcagactgacgtgaatctgccatacatcactgcagacgcaaccggtcctaagcacatgaacgttaaagtaacccgtgcaaaactggaatctctggttgaagatctggtgaaacgttctatcgagccactgaaagttgcacttaatgacgctggcctgtctgtatctgacattcaggatgtcattctggttggtggtcagactcgtatgccaatggttcagaaagctgttgcagacttcttcggtaaagaaccacgtaaagacgttaaccctgatgaagcagttgcaatgggtgcggcagttcagggcggtgtactggcaggtgacgtgaaagacgttctgctgctggacgtaactccactgtctctgggtatcgaaaccatgggtggcgtgatgacttctctgattacgaagaacaccactatcccaactaagcacagccaagtattctctacagcagaagacaaccagtctgcggtaactatccacgtattgcagggtgagcgtaagcgttccggcgataacaaatctctgggtcagttcaacctggacggcattcagccagcacctcgtggtatgcctcagatcgaagtgactttcgacatcgatgccgatggtatcctgcacgtttctgcgaaagacaaaaactctggtcgtgagcagaacatcaccattaaagcatcttctggtctgaatgaagaagaaatccagcaaatggtacgtgatgcagaagctaacgcagaagctgaccgtaagttcgaagagctggttcagactcgcaatcaggctgaccaactggttcacggcactcgtaagcaagttgaagaagctggcgacaaactgactgctgacgaaaaaaccgctatcgagaaagctgttgctgaactggaaactgcggcgaaaggcgaagataaagctgaaatcgaagcgaaaattcaggctctggttgaagcatctaagaaacttcaggaaatcgcacagcagcaggctcaggcaggcgcagctgatgcagatgcaggcaatgccgcgaagaaagatgatgatgctgtagacgctgaattcgaagaagttaaagacaaaaaataatagcccttagcgggcaaagtaacaggacgcctgttacttgttaactagcacgggcgttgaggtaacactctacgcccgtttgtgcgtgttaggggtaaacaatacgatggcaaaaaaagactactacgaggttttgggtgtctccaagaccgctgatgaaaaagagatcaagaaagcctataagcgactggctatgaaattccatcctgatcgtaatcagggtgataaagaagctgaagccaaatttaaagaaattaaagaagcgtatgagatcctgactgactctcagaagcgcgcagcttatgaccaatatggtcatgccgcctttgaacagggtggtatgggcggaggtgctggcggcttcggtggtggcgctgactttagcgatatctttggtgacgttttcggagatattttcggtggtggccgtcgtcaacagcgtccaagccgtggttctgacctgcgctacagcatggacttaacactggaagaagctgtccgtggtgtgaccaaagagatccgcatcccaactctggaatcctgtgaaagttgtcatggcagtggtgcaaaagcaggcaccagtcctgaaacctgttctacctgtcaaggggctggtcaggtacatatgcgtcagggcttctttactgttcagcagccatgtcctcaatgtcatggccgtggaaaaatcatcaaagaaccatgtaacaaatgtcacggtcacggtcgcgttgaaaaatacaaaacactgtctgttaaaatcccggcaggtgtcgataccggtgaccgcattcgtttaagtggtgagggtgaagctggcgaacacggcgctccggcaggtgatttgtacgttcaggttcaggttaaagcgcaccacatcttcgaacgtgatggcagcaacctttattgtgaagtgccaatcaactttgcaactgcagcactgggtggcgaaattgaagtaccgactcttgatggtcgcgtcagcctgaaaatcccggcggaaactcagaccggcaaattgttccgcatgaaaggcaaaggcgttaaatccgttcgtggcggtgcacagggcgatttactgtgccgtgttgtcgtggaaactccggttaaactgaacgaagagcagaaagagctgatgcgccaactgggcgagtcttttggcggaaaaagcggggaaaccaatagcccacgctccaaaagcttccttgatggcgtgaaaaagttttttgatgatttgactaagtaatttagtttattcgtcagaacgaatttactcagccaaaagctggttttagttccccagtcacatagataagacaactgtgtgactggagcgaatgctcttagccagcaaaaaatagcttagaagacgataaatgtccccgacaagttggaatcatccccctaccctaatttcattccgacaaccccactgacaatcacaacacaagccagcaatcgcattttgctaaacggttcccgtaagatgaaaaccgataatagcattgcaaataatatgctggtttcgcgtaatgcagcgaccagtacaataggaacatggctcattgcccaaatggcaataccataactgaccaactgcataaatccaccaagaagccccggtttccaatattggcgaatactttgtctgacagtatttctgtatttgaaatacatcatcccgcccatcacccagccatagacagcaaacagccacagaatataagtcagggcattatcactggcacgggcacccacaccatcaaccaatgtgtaacaggcagtaaaaacagaagttgtcatcgctgcaatcaatgccctgcgatccagtcggagagatttcttcccataaggaaatgcaataaaaatgacaccaacaataattaaaccaacacccagcatcgctaaaggtggtaacgtctcctgtaaaataacccaactcagcaaagcggtaataagcggcgcacatcctctggctatgggatagatctggtttaaatctcccatttcataagaacggcttaaaaacaggcaataaccaatttgcaggacacaagataatattaaccacggcagggagctgattgtcggtaatccaacccagaataaccccaaggttgagattaacccggaaaaaaacgcgataagtgcaattcctaaaaatcgatcagcactcacttttatcactgcattccagctggcatgtaataaggcagctccaagcacggcaaataatactagtgtttccataatcgcatttacctttgtttttttattgttattgattagtttttattaagttaatgagtcatcctccataaatccccaagttagtcaaacttaatttctctcgagtaatcctcggaaaacacaatgttaaaaacacattaaatcgaatataccgaattatatcgcataaataatctactttttccgaaatcaaagttaatgtagtatttataacttcattagccataatcacgatatttatagccgcattatttataaaaataatatttatacccaatattcaggtaactattgtctctgcaacaattgtatcgacaacctaattcatcttataggttattaatttatgactgcaattattcgtcaattcttaaaattagaagcagcaggagggatcctcctcattattgctgccattattgctctggtgatggcaaatacgccattacagactatctatcatcagtttcttaacttacccgttgcagttcagtttgctgcgctggaaatcaataaaccattattattatggataaatgatggattgatggctgttttcttcctgattgttggtctggaagttaaacgggaactcatggaaggttctttagccagccgtgataaagccatttttcctgccattgcagccgtcggaggtatgcttgccccggcattaatttatttactctttaacggtaatgatgaaatcacccgtcagggttgggcaattcctgccgccaccgatattgcatttgcacttggagtgatggctctcttaggaaatcgcgtacctacagcgctaaaagtatttttgctcgctctggcaattattgatgatttaggcgtcattattattattgccctgttctacaccaaaagtgtttcaatggttgcactggggctggctgcggcaatgatagggctgctggtatggatgaactggcgcggtgttgccaaaacatccgcttatctggtggttggggtcattctgtgggtttgtatccttaaatcaggtgttcatgccacgttagcgggagtgattgtcggctttctaatccctctgcgctgtaaaaacggtcactcaccttccgaagcacttgagcatggtttgcacccgtgggtagcgtatctaatcctgccactctttgcttttgccaatgccgggatttcactacaaggagtctctctggaaggtttaagcgggatgttacctgtcggtgttgctcttggcctgtttatcggaaaaccgttaggtattttcctgattagctggctttcagtgaaactgggtgttgccaaattaccggcaggaattggaatgcagcaaatctttgcagtctctgtcctgtgtggaatcggctttacaatgtctatttttatttccggtctggcatttgaaggtcttagtgaagacttcagtacctactcacgtttagggatattgattggctcaaccaccgctgctgttattggctatggtttgctcaataaactcctgccaaagaaggtcttagcaaagaaaaaaatatagccaaatgccgtcgaatagactaatttaggcgcataatcgagacaattccaaattaattcatcctcttaatattcacggtataacgtctcacctgctgtaccgtgaatattcatattagaagaaaacaggagagcatcataatctggcagcctgaaacgtatgggcacggctgttgtacagatgtgaggtatacacaaggataaatatatgcgggtttcacatttaaactttaaccacctttactatttttggcatgtttgtaaagaaggttctgttgtcggggcggctgaggctctatacctgacgccacagactattaccggccagattaaggcgctggaagaacgcatgggtggaaaactgtttaagcgtcagggaagaggattagttccgtcagagctgggacaactcattttccgctatgctgataagatgtttatgctcagccaggaaatgctggacatcgtcacctacagcagagaatcaaacctgctgtttgatgtcggggtcgcagatgccctgtccaaacgtctggtcagtaaggtattagaaaccgcagtagtggaacatgagaaaatccatctgcgttgctttgaatcaacccatgaaatgctgcttgaacaactcagtcaacataaactggacatgattttatctgattgcccggttgattccactcaacaggaaggcctgttttccgtcaagctgggagagtgcagcatcagtttttactgccgcgaaccgatcccggaaaaacctttccctgaatgtctggaagaacgtcgtttactgatccccggccgtcgttcaatgctgggcagaaaactgctgacatggatacgcaataagaaccttgaggttgaggtattgggagagtttgacgacgcagcgttaatgaaagcgtttggcatgtatcataatgctatttttatcgctccgtctttctatgccaatgatacttttgctgacagcgatattattgagataggcagactggaatcagtacaggaagagtattatgtcatctttgctgaaagaatgatccaacatccggctgttcagcgcgtatgtaacaaagatttctctgatttattcaatgttccgttaaaaaacaaaccagaaagataataccgatatcaactcaatgagtatacccaatggatttcgagttgcatcgcgacggcaagggagagaatccccgggagcatagataactatgtgactggggtgaacgagcgcagccaacaaagaggcagcttgaaagacgaagggtatatacaaaaaaaccggcaaaagccggttttttcagcataattaaaacaacgaattacattgctttaatttgcgctgccagagcagatttatgacgtgctgctttgtttttgtggatcagacctttacaggcgtgacgatcaacaattggttgcatgtcattgaatgcgttctgtgcagcttctttatcgccagcagcgattgccgcgtatactttcttgataaaagtacgcaccatagaacgacggcttgcgttatgctggcggcgtttctcagactgtacggcgcgtttcttagctgatttgatattagccaaggtccaactcccaaatatattctatcgaggacaattcaaaggccgaggaatatgcctgttcagccttcttttgtcaatggatttgtgcaaataagcgtcgttgtacggcgacgctggttacgttgtgatggggcaggattttatcagcttactgaaagggaatacagcctttcacaataaaaaactcaatgaatcactgagaaatgcgataaattaaatatttttcgggcatctaacctgtttttattgtatgaatcaggttattaattaaaaccctttgtgatcgtgggttaaccttgtgcgctgtacaaggtataatccggcaattttcacggtattgagccagctatggagctaattcgcggtatacacaatatccgggcgcgtcaccatggttgcgtgctgacgattggtaattttgatggtgtccatcgcgggcatcaggctttattgaaacatttgaagcaagaagggctgcgtctcgggttaccgacaatggtgatgattttcgaaccgcagccactggaagtatttgtcgctgataaagcaccagcccgcctgacacggctacgggataaaataaaatatttatcccagtatggtgttgattacttgttatgtgtgaaatttgacagaaattttgctgccaattcaccggaagcatttgtttcccggttgctcgtggaaaaactgggtgttaagtttctggcggttggtgatgatttccgtttcggtaaaaaccgtcttggtgattttcactatctacagcaggcaggtaaacaatacggctttgatgttgccagtacagacagcttttgtgacagtgggctgcggatcagcagtaccgccattcggcaatcattgcaacatgatgatctaacattggctgaaacattactggggcatccttacagcataagtggccgggtcgttcacggtaatcgtctgggaaggactattggttttcccacggcaaacttacctctgaaacggctggttgctcccgtgaagggagtttatgctgttgaagtttacggtttaggtgatactcctttgccgggtgttgccaatatcggaaatcgccctaccgtttctggtcagggccagcaacttgaagtacatctgattgatacccaaatggatctgtacgggcgtcatattgatgtggtactgcgcaagaaattgcgtgatgaacagcgatttgcttcgcttgatgcgcttaaacagcaaatcgcaaatgatgtggtctctgcaagagaatactttttgcagcgatcctaatcatctacttgaaccccactagcgggggtatagcggaaaattggaactgagaatctataatgagtgactacaaagacaccctaaatttaccggaaacagggtttcctatgcgcggtgatttagccaagcgcgaaccagatatgttgaaacgttggtacaaagaaggtttgtatcaggccatcagaaaagcaaaatccggcaagaagagcttcattttgcatgatggccctccatatgcaaacggcgatattcatattggtcactcagttaataaaattctcaaagatattgttgttaagtccaaagggttatcaggctacgattcgccttatattccgggttgggactgccacggtttaccgattgagctcaaggttgagcagattattggtaagccgggggaaaaattttccgccgccgaattcagggctgagtgccgcaaatacgcaatgactcaggtcgaaacacaaaaagcgggtttcaaacgtctgggtgttctgggtgactgggataaaccttacctgaccatggacttcaaaactgaagcagacatcattcgtgctctgggtcgtatcatcggcaatggccatttgctgaaaggtgttaaacctgttcactggtgtactgactgtggttcttcccttgctgaagcggaagttgaatactacgataaaacttccccttccattgatgtccgtttcactgctgttgatgcacaggccgtatacaccaaatttggcgtacaaccacagaatctgccagtttctctggtcatctggacaaccacaccgtggacactgccagctaaccgtgcaattgcactgggcgcagaaatcacttatcaattggttaaagttaacgacgaatgcctgattctggcagcagaattagtcgaatttgttatgcagcgtgcaggtatcacttcatgggaagtcatgagcgactgcactggtgctgatttagagctgatgcgcttcaaccacccattcatgggctttgaatctcctgcaattctgggtgatcacgtcacactggatgcaggtacaggtgccgtacatactgccggtggtcacggcccggatgactatactatcagcctgaaatatggccttgaaatcgcaaatccggtcggcccgaatggttgttacatctccggaacttatccatcactggatggtcagtttgtgttcaaagcgaacgatatcatcgttgagatgctgcaagaaaaaggcgcattactgagtctggcaaaaatccagcacagctacccttgctgctggcgtcacaaaaagccaatcatcttccgtgcaacgccacaatggtttatcagcatggatcagaaaggcctgcgtgaacaatcactgaaagaaatcaaaggcgttgagtggatcccgggctggggacaagcacgcatcgaatccatggtcgaaaaccgcccggattggtgtatctcccgtcagcgtacatggggtgtaccaatgtctctgttcctgcataaagaaacacaggaactgcaccctcgtacaccagagctgatcgaagaagttgccaagcgtgttgaagtggatggcattcaggcatggtgggatctggacatgtcagagctgttgggtgatgaagcggcagattacatgaaagctcaggatacactggatgtttggtttgactcaggaagtacctgttcttccgttgtcgatgcccgtccggaattcaatggtcattccgccgatatttatctggaaggctcagatcagcaccgtggctggttcatgtcttcgctaatgatttctaccgctattaaaggcaaagctccttaccgtcaggttctgactcacggcttcaccgtggatgagcacggacgtaagatgtccaaatccatcggtaacaccgtcagtccacaggatgtgatgaacaagctgggtgcagatattctgcgtctgtgggtggcttcaaccgattactccggcgaaatcgcggtttctgatgagatcctgaagcgttctgctgatgcttaccgccgtatccgtaatactgcgcgcttcctgctggcaaacctgaatggtttcgatcctgagcagcatatggtgaaagcagaagacatggtgactctggatcgctgggcagtaggtcgtgcgcaggcggcacaggctgatatcctcaaacactatgatgaatacgattttcatgccgttgttcagcgtctgatgcagttctgctccgtagaaatgggttcattctatctggatatcatcaaagatcgtcaatacaccgcgaaaagcgatagtgttgcacgtcgtagctgccagagcgctctgtatcatatcgcagaagcactggttcgctggatggctcctatcctttccttcactgccgatgaaatctggaatgaactgccgggtaaacgtgcacagtttgttctgaccgaagagtggtacgatggcctgttcggtctggcagatagtgaagatatgaacgatactttctgggctgagctgctcgaaattcgtagtgaagtgaacaaagtactggaacaggctcgtgctgataaacacatccgcagttcactggaagcttcagtaacactgtatgctgatgaagcactggccggaacactcaacaaactgtcagatgagttacgttttgtactgttaacttcacaggcagaagttgctgcgtacgacactgctggtgatgatgcgcaacaaagcgaacttcagggtcttaaaattgccttccgtaaagcagacggtgaaaaatgcccacgttgctggcactatgctaaagacttgggattggtagcggaacacgcagaactttgtggccgctgtgtgactaacgttgccggtaacggtgaagagcgtaaatttgcctgatgaagaaacccatttgttccactggcctccgctggctttggttagttgttgtggtattgatattggatctgggcagcaagcaattagtcttgcaaaattttagcctgtatgaatccataccgctaataccctattttaatctggcttatgcacagaactttggggcagcctttagttttctggctgacaaaggcggctggcagcgttggttctttgcattgattgcaattgccatctgtatcacattgctggttatgatgtatcgttccagtgccaagcagaaactgagcaacattgcttatgctttggtgattggtggggcactgggaaatctgttcgataggctggtacacggctttgttgtcgatttcatcgacttttatgtcggagaatggcactggcctacctttaatattgcagattctgcaatttgcatcggggcagcactcatcatcattgagagttttaccaacccgggtgataaaaaagcctcatcgaaagagcagtcatcgaaaaatagtcactaaaaaacaataagaaaccagccccggtaataaaaccggggctggtcattccatcaatacctaatggatttcaggttgcatcacagtggcaagtcagtgaacgtagtcaacaaagaggcaacttagaaaaacgacaggtataactgcaatcgttttttattaaaaggtttgagcgatatgtcaattcaggtgcaagcgcacagtgctgttttattacatttcaccctaaagctggatgatggctcaacagcagactcgacctttagagcaca

SEQ ID NO: 480 - DNA, 22514 bp, Xenorhabdus sp.; identical to SEQ ID NO: 267
  CDS (11120)..(11539)

SEQ ID NO: 481 - DNA, 24961 bp, Xenorhabdus sp.
  CDS (20774)..(21481)
gtgctctaaagctttagagaacaaaaacacgcggtttttgtagaaaaccaccttagataaggctgtaaatcaaaccagtgatcgcaattttcatcacttatcccatagttctgtggataacatggtgtaagatcctgtttattatcacggtgaataggtgaacaatcataatgagtttatttttaatacgaagaacaagaattaaaatatcttgtatatcatgtcattatctggttaatccgcatactgataaactcataatgaaatcatacaaccattgtgttcattttttagacaaggctaaatatatcttataatcatgcaattcacaccaccagcaccaccagaaaacgaacaacaactcttcaaacgagcccagtctctggcaggcttaacgttaggagaactggctacccaagcctgcattcccataccgcctaatctgaaacgggacaaaggttgggtgggcatgttgcttgaatattatctgggcgcaagtgcgggaagtaagccagaacaagattttgagcatattggtgttgaactaaaaacaatcccggtggacagaaaaggcacgccgctggaaaccacttttgtctgcgttgctcctttaactggcaatagcggcatcacatgggaaaactgccatgtcaggcgcaaactgtctcgtgttttatgggtgcctgttgaaggagaaagagagatcccgcttgctgaacgtcgtgttggttctccgctcctctggagcccaaatccggttgaagaagagttattgagatgtgattgggaagaattgatggatctcatcgtgttaggcaaagttgagagtattacagcccgtcatggtgaaatcttgcaattgcgcccaaaagcagcaaacagccgggcattaacagaagctattggtgaatatggacagccgattatgacgcttccccgtggtttttatttaaagaaaagcctcaccgcgccattattagcccgtcactttttcataggttctgattagtgttgccacttaaacttcactatcttctgatccccgcttattccagtcaccatagtgatagtgactggagcatattaacctatatacttacccttacccgctaacttactctgctgctcaaatattttttcactttttttagtgccatttgtctttttaatggcgataaataatcgatgaaaataataccgtgcagatggtcaatttcatgctgcatcacgatagaaagaaaatcttcactttccacagtgatagcctgaccatttcgatccagcgcttctactttcactttttcaaatcgttccacatcagcataataaccgggaattgataagcagccttcctgattcacgaccttacgttctttttcgacgattttaggattgattaaaaccagaggctgattccgctctggtgaaatatcaataactaatacagattctcttcttcctacctgaggtgcggccagcccaatgccattatccgtgtcatacattgtttccagcatatcatcgaccaacgtttggatatcttcaacatgggcgacatcaacacatttctgtttcagtctttcatcaggaattgtgagtatatctaaaacagccataaccattctcctttgttcacggaacgttaagaataatataactcgctttaccttgcttccaactgttcgaaaaatgtgtgtatctgttcacttgtaggggattcatttgcaaacaggatgcgatacattaacggtgcaacaacacccgaaataatcaaatcaacagaaattggcttttcgcctttttccagtgcccgctgacagattgcctctatttgctggcgtatacatccatcacacttacctgcatattcatggcccggcgtacccagtacatctcttaacattgcccgaccgggttcagatgacatctcttcaaagtattgctcaagccatgtcagaagatctgtgcgaaatgaacctgtttcagcaggagagtgatccggccgtagctcttcaaccgccacatctgccagtaattgtgacaaatcaccccagcggcgataaatagttgatggtgtcacacctgcacgggcagcaatcgcgggcacagtcagttcagtacgggaaagttcttgttgtaattcccgcacagcctgatggacagccgcctgcacgcgggcactacgaccaccgggacgcggtgctgctctgtgagtcatttctttctctgctcctacttctgtcactattcacacaaacccactaaagcaaaaaaattgcgttagtgagataattcttgtagcatcattaaagctaacattttgcttttatggagttgttatgtcaaataacacacctgattcttgcccacaatctcataacaatcggatgtcttatcaggccgcgacggtacttcatgccatcacactaatggcgttcttagcggcatccagtgcacctacgccactttatcgtatttaccagcatgaatgggggttcagctcaacgttactgacggtaatttttgccgcctatgcactagccctgttgctggctttattgatagctgggcgcttatcagatcatatagggcgacgaccggtgatcagtttagccttattgttacaaatcatatcaatgagtacttttttactggcctcggatcccgcatggctggtaggtgcacgcattatacaagggcttgcaaccggcttggcgacggcttctgtaggagctgctctgttggatatgaacagagaacgcggggcgctgattaacagtattgcaccgatgctgggtatggctgccggtgcattaggcagtaccacattgctggtatttgctcccggcccactccacaccatatatgtcttattactgattgtgtttttggtggtattaatttttacccgactggctcctgaaactgtacaacgtcgttcgggagcatgggaaagcctgcgtccccgcattatggtgcccgtacaggcccgcaatgcgttacgggcaatcaccccggccaattttgctgtgtggatgatcggtggattctacttatctctcatgccatcactgattgttgcaacaactcacacaacatcaccatggatgggaggactttcagtcgcagcattaacgctcagtggtgcggttgcaatcatcgccgcacgtaaactaacctcatttatgactctgttatcaggtgaactcgctttagcaacagggttattactgatcctactggctgcaaatcgggaatatgtcatgctattgctgacaggctcagttatcactgggttcggctttggtgcaacctttcttggtgcgataagaactgtattaccactggctgagcctcatgaaagaggcggtctgatgggcgctttttatattgaaagttaccttgccaacagtgttcctacagttgctatcggttatcttgcacatcagtcaggtttgctggttgcggtcaatgtctacggagcagtcattatagctctggttttactggctattctactgacaatattgaataaaaatatctcaataccgttaaggaaataatatgaatataacagtacctgatcctttatctgcggaagaaacacaaatactggcagctagtgtcggcctgatactggatgcagagcgagcacagtatattgcaggagcactacatcatatccgtacgtcaatcgcccgattagatgaactgccgatggatgatgctgatattccggcaccgactttcaatgccggagaggaaagaaaaatatgatcgacctgaaaaacctgactatttctcaagctagtcaagcgattgctgcacagacattatctccggtagaactggttgatgccgcccttgccaatatagaaatagcagagccagaaattaatgcttttgtctctgtctgggcggaagaagcacgggaacaggccaaacaggcagaacgtgaaatcagtcagggaaaatatcgcgggccgttacatgggatccctctggcattaaaagacctgttcgatgtcgccggtaaaccgaccacagccagttctaaagtgcgggcagaacatattgcccagtccaacagtgcggtaactgatgctttacatcgtgcgggagccatcttactggggaaaacccatactcacgaattcgcatttggtgtcattactccacaaacacgtaatcctcttgatactcgtcgtatcgttggcggctccagtggtggctctgctgctgcggtagcctacggcggggtattggcagcaatgggaacagataccggtggttctatcagaataccagcggcactgtgcggaattgtcggctttaaaccgacttatggattagtttcctgttatggtgttacgccactagcatggtcactggatcatgccgggccaatgacccgaacagttgaagttgccggattagtattacaggcattaacgggttttgatggacgtgacccggcaagccgtcaggtaccagatacaaattatgcagatttctctaaacaggaaattaaaggattacggattggcattccgcaaaactattattttgatcaggttgctgaatcagtgatagcggcagtaaaacagaccgcagaacgccttaaacagcaaggagccgaagtcacgacagtcaacatccctctgacagattatcttatgccaacccagtggggcatcacagtggctgaagcggcttcaatacattctcgtactttacgtaagtctgcatcactgtatggggatgatgtgaggactttctttgaaacaggacagttattacctgccggagattatctgaaagcacaacgagccagacggatgatatgccagcagtggaatgcgttatttaatgatatcgatatcttactcacgcccacagtccctgagacagctgcgctcgtcgggcaggaatcgtttatctggtctgacaattctgaggaaaacgtcacaaatgcctatcttcgtctatgcattccggccaatatcacggggctaccggccttaacactgcctgtagcaaaagataaacaaggcctgcctatcggtgtacaagtgattggccgggcaatggatgatgcaacagtactacgagtaggccatgctatagaaatagctggcaaaactgagtctgtatagaaataaaaatacacacaaaaatgccaacccgaaaaccgggctggcattttatacataatgaatttcaaggtgcgtcgcggcggcaagagagagaacccccaggagcatagataactatgtgactggggtgaacgagcgtagccaacaaagaggtaacttgaaagacgaagtgtatatttcagattgacagatttgctgcgctaagcgcctgcgttaaatcggcaatcaaatcatcgacattctcaatacccactgaaagacggattaattgtggtgtaatgcctgccactaaacgtttttccaatggaatagatgcatgagtcatagtaaatggctgccccaccagactttctacgccacccagactttctgccagtgtgaatagtttcagtgcttttatcatccgatgagtagcatcatcattccctttcagcacaatagaaatcatgccaccagcacctttcatctgacgcttcgccagctcatgctgaggatgggaatcaagaccgggataaaagactttttctatttgtggctgctgttccagccagtgggcaattttttctgcattgctgatatgtcgctccatacgcagtgatagtgtccgaataccgcgtaagacaagaaaactactgaaagggtcaaggatcccgccaattgagttttgcaggaaagcaagctgctcagccagttcagcattgtttcccactaccgcaaggccggcaacaacatcggaatggccattcaggtatttagttgcagagtgaacaacaatatcaaaccctaaatccagtgggcgctggatataaggagaagcaaacgtattatccgcaacactgataatcttatggtgttgtgctatctgagcaatggtggccaaatctgccagtttaagcaatggattggttggcgtttccacccaaatcatttttgtatcaggctggatagccgcttccagtgccgcagtatctcccgcttcgacataggtgacacgcaatccggcagtccggcgacgcactttttccagtaatcggtaagtaccgccatacagatcatccacagcaacgatgtggctgtctttatccagtaattccagaatcgtcgaactggctgctaaacccgagccaaatgcataacctcggctgccattttccagttcagcaatcgcccgctccagagcatcacgcgtggggttgccactacgggaatattcgtatcccgtatgctgacccggtgcaggttgcgcataagtggatgtggcatagattgcaggcattacagcccctgtatggtcagggacatagccggcgtgaacgcttttagtatcaaatttagtcattaagttattcctgaaataggttaattgagttgttgacgccatgcgttcagcacatcagtacgggtaacaaggccaataaagtgtttattatcatcaacaatcagcgccacatgacccgcatcaaaagttgcaaccagttgctccagtggtgcatttttatggagagtcttaacctgactggtcatggcctgactgactgacaaagagaaattatgagaatcagcctgaatggcattcatcaagtcccactcatcaataatgccgacaatctggtcattatcgagtacagggagttgcgaaatgtcatacaaccgcattcgcccatgtgcaatctgtagggtatcctgtggagaaacaaaaactgtcgcaccatcccggtagcgatatgtcacataatcacttaaatcattttctttttgttgtgaacgcagcccttgttccagtaaccagtagtcattgaacattttggataaatatttattgccgctatcacaagccagtgtcaccacacgctttggtgttttctgtgcccggcaatagcgtaaagccgcagccagtaacgtgcctgaagatgaaccaacaagaacaccttcctgtaaaagtagctcccttgcacaggaaaaggcttcggcatcggtgatccggtaagcatgactaatgttagaaaaatcccccagcggtgggataaaatcctcgccgatcccttcaacgaaccagcttcctgcttcatcgtaatgaccgtattcaacataatcagcaagaatagagcctttaggatcagcaagaataaatcgggtatcgggagaaacttcccggaaatactggcttaaaccgccaagcgttccgcctgaacccacaccaacaacaacagcatctacatcgtgttccatctgctgccatatttcagggccggtcgttgtcatgtgagccagtgaattagatgaattattaaactgatcaatataatacgcgccactgatttccttcgacagacgcaacgcataatcctgataatattccggatggcccttacccacatcagaacgggtcagacggacatccgttcccaatgctctcaggtgatatattttttccctgctcatcttatccggtacaaccagtatcagcttataacctttcatggcagcaaccagtgctaacccaataccggtattaccagccgttgcttcaatgatagtgccaccgggtttcagtagcccctgtttttctgcctgttcaatcattgagagtgcaactctgtctttaatagaaccgcccggattctggttctccagcttaatgaagagttggcatgggccagtatccagatgggtcagttccagcaacggtgtattcccgatcaactccagaaccgaacgtggtgcagacatattagcctcttaatattcagtaatatttgaaagtaagacttatagatccgtgaagaataacgccgttagataacagattaaaaagaacaaatcaaaactacatataactaaaagtaattacttaattcgatattgaacaatagcaagtactttctaataccgactgtcaactgaactgctatatcaatgactcaaattctcagaaattctcagaaattctcagaaattctcagaaattctgacaggatgatatacgcttaaattatactttctttattttttatgctgataaaatttgatattgcagtacaacaagaatgacagatacacacagtcaataataatatacccgctggatttccagttgcgcctcggcggaagaaaagggacgacacagcgaaaaggccacctgaaagacaagcggtatcaagaggagttaataataatgtataacaatatgttaaccaaagaagctcaacaggcatcattgatactgtatgcaacagagatgaacagtcagtattacaataatccgactccccccgcagacccgcgcttaacagaagatggctgggatctggtagcctatattagtggtaatgatctctctttttccgtaaaccccaaaaataatcagcaatttttaattatgctgcctaaccatgtttgttatggatatattgctaagaataaaaaaacgccggcagagtatgtcattgttatcaggggtaccgacagttccaatctgtttgaagcattacatgatattgttcctgttttcacctcaccgtgggctgatactcctcaacaaaaagtcagtatggggttttatagtgtttataattcactgaaactgactattgttgagcctgaatctaaagataattacagccacctcagatttcccaatgctgttgctcaattcatcggtatcaatactgcatatactatattgggtcatagccttggcgcagtcattgcgacctatcttatgagagatattcccctgcttggcgataaacacaaagcaagcctgtttgccagcccaagagccggtaaccatgaatttgttagctatatcgataaccattttgcaaactatgaaacattcagatatgaaaatgatctggtgcctcatctgcctcctgacattccattcatactggagtatgaatccctgtcaaaatcaacgatccttaaaacatcggatggcctcaatatcactgacagtctgagatgcaaccattatttaatcagctatatcgccctgctggatcctgaacaattcaaaaaactgctcaatgaacctcaggatgcagactctgaagatgtaaaaaaaacagcaaagtgtatatctctgacaccaccatccaatcagtaatataggcaattcactgagccagaatacaatcatttagaaaaggaggagagacaatgaaatggggtaattattcacgcagaatattattgatattaatgataagtagctttttcagcccggtactgcgggcacaaggagaagcacatctgttattccacatgggattgggagcaaaaggacaattcttcgtcggaggaacaatgcaaaatcagggagatgaacctgtggctggtggatatctggctattttaccccttaatacaacctgcgacccgcaatcactcattgtgtattcatttgattcactggctccgggagaaaaaaaggaattccgtattcctgtggatgctccattcagtagttaccatcttgctggtttcggggcctatgatgatatggggttttcacttcctactgtagatgaaacggagaaagtgattaaagatcgtgagtcaaatgaacgtaagacatgccagtcagcaagggaagccaaagtaattaatggaccaaatacagaggaaaaaatccataaaatccggagttgaagaagtgccagcgaccaatggatttcaggttgcctctttaatacagcctgaaagacgacagatataattctcggtagatctctggctgaaatacgcctgacggtgccaccagcagggatctaccaaagggaatataacaagggttttaccctgccagcattaattcacgtcatcatttatccgtaacaatgcaaatccatcccagcctttttcccccaccgtctgcaaagcagttacggtgatttccggacgattaagtatcttatccaatgtctgatgaataccttcagcgaactcatcacgctgatcatggataactgcaccgccacgaacgacattatccatgatgataatactgcccggacgacccagtttaattgcccaatcgagataaatctggctactccgtttatcggcatcaataaaaatcagatcgaaaggtgctctttcactcaacgttggtaaagtctcattggcatctccctcgataacttcaatcttattagtgagttgagccaattcgatattacgccgtgcgatctgtaccattttgggatttttttccagcgtgatgagtaaaccatcatcgggtaacgctttggccatatattgggcactatagccacctaacgtgccgatttcgagaatgcgttttgctccgctgatctgaaccatcatcatcaaaaactgcccttgcagggcggaaacatcaatggcaggtaatccctgactggcgttatattcaagggtttgttcgagatgagatgcaggatgtaacaggctcttctttagataactatcaactgatgaccattgttgttgtaattcttcgtattgcagattgctattcaagacaacactcctctttataaaaaaataagataaatgtttactcatgcccagattcaacctgaatataagttaaccaaaaataaaagccagccatttatgcctgatttatcaactggcttgctcccctgcttgcctgacaaatgtaaatagacgcttgcagcccagtttttatctggtattcacttttgatggcctgtctcacatcgcttaccaaatcagagggaagcaatacaatgatacaaccgccaaaaccacctcccgtcatgcgggctcctccccgctctccaataacatttttcacactctccaccagcacatctatttcatggacggtaatttcaaaatcgtcacgcatagagaggtgagattcagccataagctggctgaggcgggataaatctcctgaccttaaagcagcaacagcagcctgagtccgggcattttcagtgacaacatggcgggcacgtttggcaagcagagtatccaattgtttctgcttcgcactgaaatcataaagtgagacatcgcgcaatgcccggacaccgaggattcgggcagcttcttcgcactgccgacgccgtatattgtattcgctgtctacaagaccgcgctgcctattggaattaataatcatcacagtgatattttccggcatcggaacagcctgtatttcaagggtgcggcaatcaatcagcaaagcgtgaccttcttcgccgcaggctgaaataagttgatccatgacaccggatttacagccgacaaattgattttcggcctgctgaccattaatggcaatcaatttccgactaatgtcgagctgataaagcacgttgatggtcaggccgataaccacttccagcgatgccgaagagctgagaccggctccctgtggaatattcccgcttattgcgatatccattccaccaaataagtagccatgttggatcaacattaccaccacaccacggatataattcgcccacattttatcctgatgaaaaaggatcggctgagagagatcgaactcatcacgatcatgaccgtaatcaacagcaatcacccggatcagcgtatcatcgcgtttggcagcagcagctaccgtctggtaatcaatcgcacagggtaagacaaatccctcgttatagtcggtatgttcgccaattaaattcacccgtccgggagcctgaaaaaaatgagtcggtgaagagtgaaaaactgtattaaaagattcagtgactttttgaattaatgcctccatcaccgcgctcctcgtaaaatgctgtatcaaggatttcaactcctgaaatgaacatcactgacatcccgtagccgttgggcggcctgttccggtgtcagatcgcgctgggattcagccagcatctcataacccaccaaaaatttacggacagttgcagaacgcaataatggcggataaaacaaagcatgtaactgccagtgctcaatatcggtctgcttattggtaaagaaaggagcgaaatgccagcccatagaatagggaaaggagcattggaacaagttatcgtatcggcaggtcagttttttcatcgcaacagccagatcatcacgctgctctttcgtcagttcattcatacgccggacagggcttttcggcaataacattgtttcaaacggccacaccgcccaatagggcacaacagccagccagtgtttggtatccacgattgtacgcacaccgtttttctgttcagctctggcataatccagcaataaattagatccatgctgatcataatattgcctcagtaactcatctttgcgagtcagctcattaggcagaaaatcactggcccagatttgtccgtgtggatgaggctgggaacaccccatcatttcccctttattctcaaatacctgaacccagatatagcgttgtccaagttcttctatgtggctgttccagacatcaataatacggcggatattggtcagagataattcaggaaaggttttactgtgatttggtgaaaagcagataacgcggcaggttcctcttgtcggtttgcttataaacagcggatcgtcagcagtggcaatagcgggagtttccggcagtaaggctgaataatcgttctgaaatacgtagatatcctgataatcaggattgatatcccctgaggcacgtgtgttattcgggcatagagcacactgtttatcgtagcccggagatacaggatgctgtaatagtttctctaccccagcccacggtcgtttcagccgatgtggtgagataattatccactgccctgttaaagggttatagcgcctgtgtggataatcagcctgattaaattgcatttttgacataacctaaatgctcattcaggtgccaatccctgtactcatgaacggtacatgaatcgatgggcataaatacctttatgcccgttgtagctactatatctgtgtgatgcgattaaagcgccagatgcgtattatcctgctttataaccattagggttttgggactgccagcgccatgcatcttcggtcatttccacgatagtgcggcttgctttccagcccagttcgcgctcagctttttcaggacttgaccagcattctgcaatatcgcccgggcgacgtggacaaatttcataaggaaccggtttaccacatgcctgaccgaatgcagccaccatatccagtacgctagtacctgttcctgttcccaggttatagatatgcaggccagattttttaccgactgcattcagtgccgcaatatgaccatcagccagatccatcacatggatataatcgcggacgcctgttccatccggagtaggataatcatcgccataaacagacagtttctctcgacggcctaccgctacctgagcaatatatggcattaaattattcggaatgccctgaggatcttctcccatcgtacctgatggatgtgctcctaccggattgaaataacgcaataatacgactgaccagtcactttcagcatgatggaaatcagacaggcaacgctcaaccatatatttacttgtaccgtaagggttggtggtattacctaccgcagactgttcagtaatgggaacaatttcaggatcgccgtataccgttgccgatgagctgaaaataatgctttttacgcctgctttgtgcatgctgcgcactaacactaatgtaccgttgacattattatcataatattcaaggggtttttcgactgattcgccaaccgctttcagaccagcaaagtggataacggactctatagcgtgacgggaaaaaacagaatcaaggaatgcttcatcacggatatctccctgataaaacagtggcctgatacccgttagcgcttcaatgcgggccagaacttcctgactggcattacacaggttatcgacaataatcggcgtcatccctgcttcaatcatctggacgcaggtatggctaccaatatatcccattccacctgtcactaatatttccacatttacctcttttttaaattggactgaatcaaacagttattcaaccaataagatacaccctgttttcagatccctgttcttattggtcgaaacacagtataaaaagagttaacgatttagtgaactaaaactaaatgtggcaaaattggctatacacttcgtctttcaagttgcctctttgttggctgcgctcgctcaccccagtcacatagttatctatgctcccggggattctctctcttgccgccgcgatgcatattgaaatccattgtgtataaagacaatttattaacatttccgatgaacaataatgaaagaaattacttttacccctgtacagacaactgccatcaatgacccctttttcactgcgatacaaaagggcttattatcagagcatccagatatccagattatgctggcttatttcactcaaggcagctatcgggatgatctatttactgagtatggcgttacctatcctgaacgattgcaaaatgccgtcactaaacggcgggcggaatatctggctgcccgttactgtgcctgtaatatattaaataacatgggataccctgaatttcaggtggaatcagcacaggatcgctcccctgtctggcctgaaagaatttgtggttccatttctcactcaaccaattgtgctgttgttttcgctgcttcaagtgataaatatcaatgggtggggattgatatcgaaaaagagataaaacaggaaaccattgatagcgtttcagccagcattatcaatgaaactgagaaagaattactggcaaaatctccgcttacttttattcaggcattcacactcgctttttccattaaagaaagtctttataaggcgctttaccctcatgtgaagcaattttttgatttccatgcagcagaaattgtggaaattgactgcactcatcacactgtgaccataaaattgctgaaaacactcactgacgattatcaggccggttctctgtttcacgggaattttgttctgatgccgcagcaacagttattgacctatatcgttggatgaagaaagcccgaaacaaatatgccagcttataatctgctggcatattttctggatttccagttgcatcacggcggcaaaggagcaacaaagaggcaacttaaaagacgacaggtatattacttgattcgtccggttgcccgagcataagagaacagcccaccggcagcaacaatattagccagttccccgacaggatcggtcgggtatttttcaccgcttttcagtatcgttactgtctgattttcaatatcgatctcaatgctgtcaccggtaactaagctgtcgcacaagcgttcttgtgcggcgacaggcaataattcaccagtagagacacaattgcggaagaatatccgggcataagactgcgccagaatggcttttacacccgaagcgcccagcgccacgacggcatgttcacgggaagaaccgcagccaaaattctgccccgcaacgataatcggatatttcgccttacctttttcttcatcaataaaaggcagcgatccttcaggtaatccacacatcgccagtgacgctaattgagcataaccttcaggtgaagaggggtttactttgatatattccccggccagaatctggtcagtatcaatattatcctccagaatataaacctgaccacgaatgatattttccttttgttcatttaaaacagcatcattcataacgacatcactcataaaaattctcccggattagtgatctggccagtaatcgctgccgcagcaacagagtacggtgaagcaagataaatattagcgcgcttatgccccattcttccgacgaaattacggttagtcgtggatatcactgatatcggatcattaacgcggccaaaagtatccggtgggccaccgcagcaggcagcacaacccgcttcagcagaaagtttcactcccgcatccgttaaaatctgataaacggaaacgccctcaatctgggttgtgatggttttatggaatacttcttttgttgctggtaccgcataagtcggaattttaaccttatggccttttataatacgggcagcggcgatgaaatcttcaatcttgcccccggtacaggaaccgatataggcctgagaaatggcaacattggcaactttttcaatggaaaccacattatccggagaatgcggtttggctatctttggctgcatatccgatacatcaatatttaatacacgggtatattgggcatcttcatccgggtaaacaatctcaaacggcatctcattccgttcagccagataatcaagtgttgcctgattcggtaccataatgccatttttggcaccacactcgacgaccatattacaaatcgtcatacgctcttcgacagataattcatcgatgacattgccaccgaattcaatcgcctgataggtcgcgccatccactgtcagttctgacaataccgtcaggatcatatccttagccaaaacatgcgctggcttcgtgccggtaaaattcacacgaatggtactcggcactttcagcgggatttctcccgtccctatggcataagccgcatcggtaatccccaacccaatcgcgaatgttccgaatgcgccggcggtaacagtatgagaatccgtccccaacaacacttctccggggcgagtatgtcctccctccgccaatccgatatgacagacgcctttataattgggggttccgacatcatagaaatacttaacattctgttctgcggcaaattcacgcattacccgtatattctggttagcctgcggatcagcagagtaaacaaagtggtcagggatcataatgaaacgggtcggatcccatatcctggcatcctgaccaaactcttttttaaatacgctggcaacgccgggggcacagggatcatgagacatcagaatatccacttttgcccaaaccacttcgcccggtgtgacctgtttacgcccactcgcccgagcgagaattttttgtgtcatagtttggttcatctcacattgccctccagaatatttagacatgctgaaaaagaacagcttgttattgttataaaataattactctttatcgcagcaaaatgccaccgttcggctcactgtttctattatggaacagtcgttcgttaaatgaaaaatttccacagagaataaagcccttctgaacagaacctgtgatatgttaggttttttcggagtaaatcatcaggttactttatgaataatattgagaatctcagctcaatggtgatctttgcccgtgtcgtggagacattgagttttaccgaagcggcaaaatcattaaggctttctaagtcttccgtcagtcgtgaaatcgcacagttagaaatcaggctcggtactcagttactcaaccgaaccacacgcaagattcaggtgacagaagtcggaatgagttattaccaatattgtcagcgtattctgaatgaagccaaaaatgccgaacgttttatccgtaatttccatgaagaaccgatgggaagcctgcgcctgattgcaccagtatcctttggcagtcaatgcattgttccggccctgaacaattttgttgccggaaatattcatgtcagtgtcgatctggaactgaccgacagaatcattaacatggaaaaagaccaatgtgatatcgctattgtggtaggccgtgaaacaccagaccatccactcgtgatgcccctgattgatatcacctgggggctttacgcgactccggactatctcagccagtttccggctatagaaaggccggaagatcttccccgttatgattatctgctgtttcgcggccctgctcacaccatctctcttccgtttcagaaagagagaaataagtttgatattgaagtgcgcagccgttttcgtattaataatagtgtagcattaatgagttcggcgctggctggggcgggtattgcttacctaccggactatatcacccatgaatccgtcacagccggaaaactgatcaggcttctgcccgaatgggacatggatatctatcaatcctggatcctgtttaaatcagaagaaacgctatcttcacgtgtacggctttttgccaataccttgcagcataagctgatgaatcagatgcagcgtactgagtaaacgatgacgctgctctgaggttaaacgcaggtaacggcgggttgccggaagccggctgacaatttcagaagcagcaaaatgttcaatttcgcaacgccattttcctttcctgatttgcaggctgcatgaccgaaaatccagctcctctaacgtctgtcgaataacaagatattgctccagttgttcaatccatttaagtccatcctcctgttttgaaaagaattgtatccgctttttccgcaggctacctgccgtttttacctgtatatcggcattcaaaggttgatctatcacaccagaaacagaaaagcgcgtatagacgatgaatgccataaacagttttttcaccctttcgttgacacctattgccaactgctcttctggtctgacaatcagttctcccggccccggcctttcacagtgatagggctgaagatcacgctccagccggttaagtgtcaggcctgcctgatagtcggcaggcaagcgttgtttattgattttttgccagaaagaagatttagcggaggctgcgtaatggctcaagtttaatctccttcaattcagtttcagagaacgttttagacagaacgtcttccacctcgacaggtttaaacgggttgactttctgaacaaatatcgtccacaccagggcataggccgctgttaaaccaagcattatcataaacggaatataaacatccgctttatccatgcccgggggcgtaatgtaaataagagcgatgacaattcccacaccggaaataatctgtggtaaagggaaaaatggtgatttataggcacgatgcaggtcaggacgacgaatacgcagcaagatgacagaaatggtgactaacagataagcggttccccaggaacaaaccgcagccagtaccagcggcataatgcggttcaaatcgccctgaatggcaaaagcatggatacaggggatcaaaacagccactaaaataccaaacacgggtgttttaaattttggatgcaggtaagtgaaaatacggggtaaagtaccgtcaagtgccatcccgtataaaatacggggaacggctgccatcaatgtattaatcgttgccgctcccgccagcaacaggccaaaaccaatccagtatttaccaaaatctcccataacctgcccggcaaaagccggaattgccattggagtttccagtaacctgacattatttgctgggtcaacaatgacgttttccacctgatgtgtcatcgcagcgccgtacataaacatacagaacgcgacaccacacaacccgattgccattgctcgtgggatgacttttgctgaatttttaatttctggtgccattggcgtcaccagctcacagcccataaacataaacatcgccatgccaatcagacttaatatcacggtcggatcagcaatattcatcgactcaccaaaccagccatcaactgaagtgtgaaatggcataagcagaccacacaaactaaagatcactaacgtactccacatggcaaacgtcagtacaatctccactctactgaatgcctctatcccaaacgcattaagtagaccaaaggtgatcactagccctactccaaccatccaggacgcattattgctctccatcacagtattgaggctttcaaaattcaccaatgccataatgccggaaaggatggtttccgcagtaccggcaaaaacatgcacgattaaataggcagaaagtgctccggttattgcccagaaacgtcccataccacaagaaatataatcatatactgagccggaagtaggcaaaatcgcggcagcttcagcaaacgttgtcaactgagcctgcatcacaataaagctgagaaacacagccagagcgaatgtatcaccccctattccgaacccgctggtgacggttaaaataaccggacttgccataatcacaccaacagaactggcaagtgtcgtcggaaaaccaacctaacccttctcaatatgtgatattaactttgaggacatattcatttttcttcccccctttacccataaatacagtcggtttgattgtgaattttttgtaaacgaaaggtgactgtgatttaactatagggataaggggaaaagtgttgccatcattctaaagaacgataccccaaagaggtatctcatgccgttttttgccgaaaagtaccaaagaaaaagataaaaaataccgtaactcaagaaatatcaggcgataatgaaaaaataatcaattaatatgttaataaataaaaggcaatatgtacaaagtcagtctaaaagcagctaaaacatgaaagaataagtttttaataatgcaatcaatctcacattattaacatgtatattttgtattcataatcagaaaagccatgatgaattcacaactggatcagataggtacgatcaatgaatacatcaccgctcagccagcatcaacaaacattggttaattgctgcctgaatacaattgctcacatcattcctgtgtctgccactatctattatctcgtcaatgaaaagtggcagcccgaaaaccatatcctgcatggcatcacatccgacgtgtatcaggcatatgtcgcgtatttttgtcagttagatccgctgcatccagaaaatttcagacacaatgaacagcgtcttgtcagcatgaatgacaatatgaaagagagtggccaacagttttatcatgattttatgcaacccaataacttaacggacagagtcgaaatctttatccgccgtgggaataaaattctcgcgggtctttcagttttcagggactgtccgtttcagcatcaggaagtaatgaggcttcactctattattcctgtggcggaattaatgacttttgatattttgcctgatgcacaagtcacgttcaccgcaaaagaacaggaaattattcagtgggtcagggaaggagcgagtaataaacgcatagcattacagctcagtatttctctctctactgtaaaaactcatctgcgtaatatttttgccaaagccagtgtgaccaaccggacagaattagtttcttctggctttatgcgccgtgatttgagcgggtacggttccgcacccgcagcgattattaataatagttgccgtgacggtaatcccatgtcgtgaaaatatcagacattattaccatgatcttatggacatccagtcccttacggatcaataccgggcacggtataatatcacgctgaccattttgagtcggtactaatttaccgttgtcatcgaccattgaaatcatcacaccctgctcatagcgggtttgctcagtctcattcggctgaatggatttcacataatcattggcggtaataatcagatctgcccgctcctcaatgcgttcaccaatacactcaaccaaaccacgattacctttgcctgatgggttagctgagctggcgaaagagaatttaccgtatttttcccacagctcttttgccagaatttcaccgggcttaccaaatttaatgacaaaacagcttgtaccacggccatccatcatcagctctttggaaccatcatcgggaatacgattaactgcctcttctttccacggcaggatacagcccaataacacatctgcatcccagtgtttctgataaagctcttcaatttccgggttaagctgagccagctctttcaactgttccagagatccacacaatacaactccgggcttattgcgattgcgctgcttagcctcaaatttgcgctccagccctttcgcatcggacgtcatgatgatgtaacccactttagtcgggcagacaatcattccgccatcattagacaggatctcgactgcttcctgttgtaatccctgattccattgaactttctttggagaagaaaaagaattgctgctcatatattgataccctttttttataaactgaagatcttaaaaccggaaaataatgaaacagttaacgctggtaatagcctgtaatagtggcggttgccagactattggcgtagatcataaaacgtgtgaccgcatttgttatttcagcgttaatacccagtttttctaccgacatggcatgtaccgtgaaaatatagcgatgggctttatctccctctggcgggcaggctccaccgaaaccaaactgcccgtaatcatttctgctctgaatgatgccagccggtaatttgctgccatcactccgtccggcatccggggataaagcctgtatttccagcggaatatcaaatgccacccaatgccagaaaccactgcccgttggggcatcaggatcataaaccgtgaccgcaaaactttttgttccggcaggcgcatctgtccaggcaagttcaggtgagcgattaccaccgttaccaccaaactcattgaattcctgctctttactcaggaaatcattattcttaaattcagttgaagtgattatcatgcttgtatcctcataagaatgccttttaaaacatcctaacgcagtttttcgatgctgcaaggttaagcgatggttttgcgggattgtttcaatttgggaacaataggtgcgtttgggaatactttcccctatatacttttttacctctataaacacggtaaaggtgcaataaaaaagaaaaaagcccgtcatcaggacgagctttcaaacaacgtttatgtatagctgaatatatcagacagcttttttagaagcctgcaaatacagcaattccagaccgattgttgctgccgccagcgcggtaatttctgactgatcataggaaggagcaacttccaccacgtccattccaacgatattcagcggttgcaaagcccgcagaattttcagcgcacgatctgaagtcaaaccaccgatcactggcgttcccgtaccaggtgcaaatgctggatcaagacaatcaatatcaaaagtcaggtataccggcagatcaccgacaacagatttgatctgatcgacaacatcttcaacgctgcgatcattcacctgccctgcatctaataccgtgaaatcattatctgtatcgtgttcagtacgaataccgatctggacagaatgcgccggatcgatcagcccctcgtttggcgcatggtaaaacatcgtaccgtgatcaaacttactgccattagggtaagtatcggtatgagcatcgaaatgaaccagagccattttaccgaaatgtttcgcatgagcgcgcaacagaggtaatgtgacaaagtgatcgccaccaaaagtcagcatctttttgcctgatgccagcactttctcagcatgagcctgtagtttatcgctcatatcctgcgcatcaccaaaattaaagaccagatcaccacaatcaaccacattcaggcgcttgcgcaggctgaagttccatggccatcggctgctttcccaagccagatttgtcgagacctgacgaatagcggccggcccgtggcgactaccagcccggccggatgttgccatatcaaagggtacaccggtaataacccactccgcatcaccggaataaggctggaaattcaacgggaagcgcaggaagccaaaggcgtttgaaaccagagagttatcgatttggtttcctaaggaactaatactcataatatatcctctaaagccttgtgtttaattaacatagggcttgattacattacgctaacttcacaagaagtctgactttttaaattatatttaaaaacaatgaattaacttcaaaaaacagataattactcatactcaccaatattcgggcatatagtattagacatcattttttcttgctacacttttgaggtaattagatgaaataaacgcagcaactatctggaaaaaatggaacccctcaatttagtacacaataaccatgcttccgttacacaaattctataagaatcgttgaatagtctccgctgttccggtaattttaattttgattgaatctctagctaaatcatctcagttatcgtcttttttgattctatttttttattcttgatataaagagagtaaccatgctttcaacaaaacgattatttgacgaaattccctatgaaaaacaattcgaagctactgtcatctatgtaggtgatgatcacatagttctggatcagacattattttatcctctttccgggaatcaggatttcgatattggttccattggcgaatatccggtaacctctgtacatgtcgacaataccgatgaagggaaattagattttagtgctccgataagacactatgtcacaactgataatttcagtatcgggcagaaaatcgaggggcaaatcgatagtaccagaagactgaatacaatgaggctgcatactgccagccatattgtcgaattcttcatgcgaaaaatgcccacttttttgtctatcgaaggctcttttgttaataatgaaaaagaccgtgcagactattttctttcacagaatattgatcctcaatccctctctgcactggaacaagaagtcaatcgctttatcagtcaaggacacgagatagtttttaaatatcaggatggaataagattatggtgttgcaacgaaatagaaatgccttgttgcggtacgcatgtgagcaatacaaaagaaataggaacagttaaatt

SEQ ID NO: 482 - DNA, 20157 bp, Xenorhabdus sp.; identical to SEQ ID NO: 109
  CDS (10883)..(11368)

SEQ ID NO: 483 - DNA, 20157 bp, Xenorhabdus sp.; identical to SEQ ID NO: 109
  CDS (11546)..(12265)

SEQ ID NO: 484 - DNA, 32396 bp, Xenorhabdus sp.; identical to SEQ ID NO: 112
  CDS (13644)..(14537)

SEQ ID NO: 485 - DNA, 32396 bp, Xenorhabdus sp.; identical to SEQ ID NO: 273
  CDS (16933)..(17877)

SEQ ID NO: 486 - DNA, 32812 bp, Xenorhabdus sp.
  CDS (16214)..(17236)
tttgctgtaaagcatggaaaagtagtactggacatcctcgctatcactgctatgcctgtcgcaaaaccttccaactgcactatacctatcaagcctgccatcccggtatgaaagagcgaattattgatatggcgatgaataacgccggtgtcagggacacggctcgggttctgaaagtcggtattaacaccgtcattcgcacattaaaaaactcacaccaagacaagtaactacgctgccgctggcgggcagtgagattcatattatctgtgaaatagacgaacaatggtcatttgtcggtaataagaacaatcaacgctggctctggtatgcctgggagccgaataggaaacgggtagtggcacatgtgtttggggatcgcagcaggaaaacgttgaaaaagctgctggctctcttgtctccttttactatccggttttactgtacagatgattatgccgtttacgattgtctgcctaaagaaaaacacctcacgggaaagaaatttacccaacgtattgagagaacaaatcttacgcttcgtatccggataaagaggctgaatagaaagacaataggttattccaaatccgaagagatgcatgacaaagtggtagggacgctcattgagcgtgaatactatatttcataacagatctaactattgggagcatgactgtccatatatggtcaagaagtttcggacacatttctagctttttccctgcgtttcactcataaaacatttccccaaacccagcacatcagacaaaaggtattctgtttcccactgaaaaacagatatcaatcacatttcactcattaaaaatagcggataacacgagttacttgttcatacaattacattgggtcgagaggcaacaagcgaacataaaattgagaggtgcaagaatgataactcaggatgaaaaaaagcaagtatctgactggtttccaacgctaacattacccaggcctgaagatagtcataaaggtactttcgggactctgaatattatcggcggggctgaaactatgagtggcgcctgtgttcttgcgggtacagctgcgttaaagagcgggtgtgggaaggttattatcggttttaatcaggatcctcttgctgtccaactgatagatactgtaccggaattgatattgaataaagccagccagctttttgaaggcgagcttccatctgcgtgggtaattggttgtgggctaggtacttctactgaggcggttagttttatacagaaaatgatcaactatacccatcaaggtgaaaaagtactggttgatgctgatggtttaaatattttggcaaaatttccaagcaaaattgtgctttcggacaaaactgttatcactcctcatgcgaaagaagcatcaagattgttacagacagactctcagtctatccagtctgacaggctgggttcagcacaggccttgagtgcccgatatggttgctgggcggtacttaaaggtcatcgtaccgtaattgctgcaccggatgggcgaacgtggataaatgaaacaggtaatagtggcttggcgaccgctggtagtggggatgtactttccggtattatcggtagtctgctggctcagggtattccatttgaggaagcggtacgagcaggggtttggttacatggtaaagcggctgatatgctggttgcggatgggatcggtccgataggtctgaccgcccatgagattattgattatgtcagaaaaataagaaaccaaataactaatcacgatatatgatggctgaattaaaaactgactattaaggggcgacgacaatgatgaaaaaaatactgttagcttttatgctcttcatattttcacaggtatcattttcagatgatgcaactatttttgagacaaagacttatcacgttgctatttatagtttttgccctgaaggatatgtaagttgcgaggatgtggagtctgttataacaaataagaaagaccatacttcactgacaataaaaggacacactatgaatagagattgtgacacagggagctgttctttctatggatatatttttaagcataaaaatatgacatataccatttaccagcaaggtgttttgtatatttcaaaaaatgggaagctgattttttctgagaatggtgtatttaattattgattcttagtgttattaactatgatagttaatgtatattggaaatatcaccagtttaattagtgacgttacttattgcttctattttatataatggtttattggttttttataattaaaaaaatgcaatgaaattaattgattaagggttgccactaaattatattagcgacaattcgtctcatttacgatttgtttatcaaatttttctatttgaaacctaaaaaattgtcagtaaacttaatatactatttccttgcataaagcaccccctgcatagtgctttttatgctgaaaataataaaaaaagaggttggttactttataaatcctcagtgaaaacatgaaatagcaatgtggcgtagtcgcttactatgagtgatgtggagccatatccacaaataaagttagatcctcataacatcattatgtgtttactaaataaagctgctgattgagagcaggtaggaatgtttttactacttttatcggtaaatgagattaattatggaattgtaatactacgatgagatttatatatagatttaactggttgattatcaaaataggaatttaaaaaccgttttctcatatctgatttggttatgaagggggaatgatgcttttccacgttatcaacaaaaataatattgttgcactttcgttaatattgggtgttgtcgttttctttttttctttatcatataataacagtaaattgggtattatcgattatgccgatagacattgccagaaaaacacggattgtctgattgatatgaataaaatcgtcccttttgattgggataaaatgtatattattgataaagggatggggcataaggatattgaggatattattggcgctgcatttaaagggaaagctagtcttttttataagattatttttgtcagaaacaaacaggtagtttatgaagatgaatatgatccctatataagatcttatgaaaaaaaactattgaaaccagactttcagtatccttatgatggtaaagaaaattatttcaactattatgcgatctccaaagataatgcgatcctctcaatgaagattgagaataaaccactcatagatgacgataaagtttactataagctatctccttctaatgcacagcaagtgaaagagaaaaacttgtaagtatatatccggttattggttggtgctttagtgcaggtctacttcttctttttggcctgcacttttttcatcttcttttttgctttttgttctgaacgggcttgtgaacttttttgaggtaatggctgagcagaagttggattatttttcggtttggaacgttgctcttgtgcaactttcaggcgtttttcccactcgcaggctgaattcaggctttccagtgttctggttaacccggcaattaatctttcatccatatcatttttggcatattggagctgtttctctaatgttttctgtttgtttccgcaccccgctttagttggttttgcataggcaatattcatactgaaaacgactaatacagccaagatcatagttttcgacttcatgaactattcctagtctgatttgaaatgcttattcaaaattttatatgctgatcggtatttgttcctgaaaattagacgtcagttacaattgacgaggggcaaaatggaggcgtttatcttttttcgcgagaatgaggcataatgcttttttgttgtctgatcagccatcaggcaagttatcaatatttctctcccggggtttgaaaatcgaatgctaagttatcgtcacagcttccatgcaggcaaccatgctgatgtgttaaaacacactgtccaaagccttatcattgagtcacttaaggaaaaagagaagcctttcctttatctggatacccacgcaggcgcaggccgttatcagctcagtggcgaacatgctgaacgtactggcgagtatctggaagggattgcccgtatttggcagcgtgatgatattcctcaagaattatcaggctatatgaaagttgtaaaggccctgaaccagcatggtgttttgcgttattaccccggttctccattaattgcccgtcatttattgcgcgaatatgatgaacttaacctgagtgaactgcatccaagtgattttcctttattgcgtagtgagttctcccgtgacagacgcgcccgcgttctgcgtgaagatggctatcaacagctgaaatcaaaattacctcctaaaactcgccgtggattggtgctgatagaccctccttatgagctgaaatcggattatcagaatgtggttaagggaattctggaagggtacaaacgttttgcgacaggtacttatgcgttgtggtatccggttgtgctccgccagcagattaagcgtttagttaaagatttggaaaaaaccgggatccgcaaaattttgcagattgagcttggcgtgcgtccggatagtgatcaacgcggtatgacagcatccggcatgattgtgatcaatccgccgtggaagctggaacagcagatgaaagctgtgctgccttggctacagcaggtactgatccctgaaggcacagggcataactcagtagagtggattgtaccggaataagactattttccagcgtgatattgcagcatggagcatcaatttgatagctctagcctatgacaacgaaagccacaatcatcatgcatagtgataactttttgtcataatatacgttacgattaaattgtagtcagtaggttaattgattagacggaagtgcctaagatgagtaaacattacgattatattgcaattggtggcggcagcggtggtattgcctccattaaccgtgcggccatgtatgggcagaaatgtgccctgattgaagcaaaagcactgggtggaacatgtgttaatgtgggttgcgtaccgaagaaagtgatgtggcatgctgcccagattgcggaatctattcatcaatatggctctgattatggttttgatgccactatcaatcgctttgactggaaaaaactgattgccagccgtacatcctatattgaccgtatccattcttcatatgagcgtgtgctgggtaacaataatgttgatgttattcagggcttcgcacgttttgttgatgcaaagactgttgaagtgaacggcgaaataattaccgcagatcatatattgattgcgaccggtggccgtcctaaaaacccggctattcccggtgcggaatatggtattgactctgatggcttctttgagctggatgaaatgcctaagcgtgttgctgtcgtaggtgctggttatattgcggtggaaattgccggagttttgaatgcattaggtagcgaaacgcacctgtttgtacgtaaacatgcaccattacgttcctttgatccgctgatcgtaaatacattgctggaagttatcaacaatgaagggccgactctgcatacggaagctgtaccaaaggctgtgataaaaaatgctgatggcagcctgactctgaaattacaggatggcagagaacagacggttgatactctgatttgggcgattgggcgcgagcctgcgacagataatctgaatttgtccgctgctggtgtggcattgaatgaatcaggctatattcaggttgataagtatcagaataccaatgtaaaaggtatttatgctgtgggcgataatacaggtgctgtggagctgacacccgttgcggtagcggcaggtcgtcgtttatcagagcgtctgtttaataataagccggatgaacatctggattatactaatgtgccaacagtggttttcagccatccgccaatcggtacaatcggcctgacggagccacaggcaaaagcgcaatacggtgatgatcaggttaaagtttatacttcgtcctttaccgcaatgtataccgcagtgacgcagcaccgtcagccatgccgtatgaaactggtttgtgctggtgaaaatgagaagattgtcggtattcatggaataggctttggtatggatgaaatcctgcaaggctttgccgttgccttgaaaatgggtgcgacgaaaaaagactttgataatacagtggctatccatccgactgcggcggaagagtttgttacgatgagataattgtgtggatgccataatatgtagaatatactgcatatatggtatttggacaaaaagacattccatcttagtctttggctaagatggatgttatccctgagaataattccatcatgactgattttttatctatttattagtggatggaatatcttatttttctttgtttttattatcttcaattgcttgattcataatggcttttgccatccattttgctatttcaataacttgttcattattaatcttccaaatatctttcaatactaaaaaaatctctgatccataaacaatggaaaaagattttattaccttatcaataatttcaggagcaaatgagtttttcatcggaaatgttaccattgataaagtttcttttcggttccctctttccaattgtttttctctgggcttagaagataaagagcgcctttctatccattgttgcaatgacacttgcaatgcagctcgaagtgctacctcatattcaaacattcgaggataagcgaaatccattaattcagctattcgctcttctgttttttcacttttaggttgccaggtaagaattggccctaagctagtattgacagtagcagcaatcagatcactttgtgtcgggaaataacggtatgctgttgctcgggaaacgcctgcttttaaagccagttctgatattgacggcattatcccttgctcaaatagagtcagagcagtgttaatgagtaattgataagtacgcttacgagtacctgtatagttcggaaatgtgtgaataggcagcatcactgagcccttttaaaattaaattattttattttttaattggttattattttttgttatttatttaattatctgttttataatgatgtttttatttaccccgtgatctttcttgcctttattgattagatgaattttaaaatgagactctagtctcattatatatggttgataaatgatactgtagtctcacaaaaaatagtttcttgctttttacatcatgagttgtggcgagtaaaggtcttcttatgaaaaagtatcaaggatttgtctatattgccgcaacattggatactaaaagtacagaagttttttatgtaagtgaactaataaaaaaaatcggccttgttgtccgtgttgttgatttaacaacaaagcctaatcagttagttaatgaggccgatgttcattcagagataattgcagattgtcatcctgatgggaaacaagccgtattttgtagtgatagaggagaagctattgcggcaatggcaattgcttttcgtaattatttacagcaacaaaccgatattgctgcgattctcgggttaggcggctctggcggtacagcgttgattacctttgcaatgcagtctttgcctataggtttaccaaaacttatggtttcaacgatggcatcgggtaacatctcaggttatatcggggtaagtgacatctctatgatgtattcagttactgatgtttctggcctaaactttatttctcgaaagatcttgagaaatgcggctcatcagattgctggatcagtttattttaatgatcaagaagatatatatttacagcagaaaccagcagtagcgttaactatgtttggagtaacaacacattgtgtccagcaaattactgccaaattagagagcgattatgattgtctggtatttcacgccaccgggagtggcggcaaagcaatggaaaagctggtagacagtaatttattacactctgtgctggatattaccatttctgaggtatgcaattatctttttggtggtgttttggcttgtgatgaagatcgttttgatagtattgctcagacaaaaacgccatgtgttatatcttgtggtgcactagacatggttaattttggacactcctcgacaatacctgaaaaatataaaaatcgtcaactttatcatcataacgcacaggtaacattgatgaggacgactcgagaagagaatcatcgattagggatgtggattgctgaaaaacttaaccgttgtgaaggggagattcgttttattattccaacaggtggtttttctgctttagatattgaaggtggagttttctggtctccagatgctaataatgctttcatccagtcattctcaactaattataaaataacggaaaaacgaaagcttatttttagtccacaccacatcaattcaatagaattttgtgaacaagttattcagttacataaggaaatgataaatagcataaaagtttagtagtgttttaatcaattagttaattccattattcaataatattgattcaattaaatggcgcggtaaataacataataaccaactgcgtgaatttataattaaaattaaggtttattttattacccaacaccaggaacgcctgtggaaatatccacaggcgtgtttttatttattatttaatttatcaattaactttattatcagggcggtttattaattaatttgaaatttggtactcctattacaaaaaataaaaatgataggagatggatacacagttgtatgagataatattcccagaaataatataaataatgtcttcaataaaataagacttactttttccgatgagatttgctctgttaaattattttaaggatctgtgatgttttctaaagagtatttagtagacgatcagcacgttgattttcaaggtgttgttgatgggctttattatccgttctatctggaatggacccggcatgcgtttatgaaagaagcgttaggtctggatttagaagaagaattcaaagccgggcggatgcacgtcattattgaatatggtctgcgctttagaaaaagcctccagaaagggcataagatggaggtgacctgcaaagtcgccagaaatgaaaagcgtaaccggattaattttgagcagcaaattttggttgatggcgttgtgtatgctgatgcgacgtttgtcgcgacttgtttagtaaatgggcgcccgactgtacctgaaattgtgatgaatgcggttgaagactaaagatcatcgtgtctattctggcctctgattaataagaggccactcaacaaaaaaatcacaaacccggcgctttccacaacgaagttgtcagcccatcatcgacgaggtgaagttgatcagcatacaccgcctgccaatctttttttgctttttgataaacatcccattggcctgagttcggcagatattcccgctcccagcgcactaatctttctcccgtttccggcatggagtcatacagtgaaaccccaacaccagcggcgatagcacatcccagcgccgtagcttctttaacgacaggaactctgaccggcaacccggtgacatcggagaggatctggctccagagtttgccttttgagccaccaccagcaaaaaccagagaatcaggctgaacaccggagaatgtcgcaacgatatccagattacaggctgagacgatagccgcgttttcttccaatgccctgaatagggtggctttgttgcatttttccggatcaatcgacaggttgagaaaggaaggcgcagcgtgataccaagatttaaagcgcatgacatcagaaaagattggcatcacaccatatgatccggcgggaacccgtgccgccatctcttccagcagagcgtaggcatcaatacccagccgctctgccatcagtttttcttcggcacagaaagcatcgcggaaccagcgcatggtaaggccggtgaagaagctgatagattctgcctgtgccatgccggggatgacgtggggattaatacggatgttcatgttggggtcggtcatcggttccggcaggttaacgacctgctgccagaatgtgccgccaagcactgcggtctgagcaggcctgacaacgccaataccaaggcaaccgagctgaacatctccaccccccataatgaccggcgttccgctgtcgagaccacactctgctgctgctttgtttgttacgtatccgagtaatgtgcctgtttctttaaccggagagagaatatcagaacgcaatccggccatttccagcagactggggcgccagtcgcggctcactaaatccaacatgccggttgtgcctgcgttggaaggatcaacggccagttcaccacttagcatataggccagccagtcactgatcatcgttaacgtactggcttgccgataaatgtcagcacggtggtgggcaagccacaataagcggggcattgctcccagcgctaatgtctgacctgaatagcgataaacatcatattcaaacgtattattgtacagctctttcagttcactgacttcatgactggaacgggcatcaacgttggcacatgcccatatgggatcgccgttccgattgtacaggacgatcccttcccgcattgagcaggcagcaactccctgaattgcactggctggtagttcagccttttgtaaggcctgacggatacattggcaggtaagttgccagttggtttgcagatcaaattccattgagcctgcaacattcggtacaggctggtgaacccattctgactgcccgacagagatttgattaccttccagatcaaatatgactgctcgtatactgcctgttcctgcatcaagcgccatcagataattccctgatgagtgggcgtgagtgcgttggttcatgatgctatcctcgtttgtcgttatctcattagcctgctggttgttgattaaggactacgatatggcacggggaatttatactcttcgtcttttcaagttacctctttgttggctgcattcctttgccgccgtgatattccttgaaatccattgtgtatattagacaatcacatcagcatcgcccttgcggtcttttcttccgtgaccagtgaattaatatagccgccttttagcgccgcaacgatggcatcggctttttcaattccaccagcgacaccaatcacgtttggtatcgttttcagctctggtagtgagagaccgatcagttcctgatgaatatcgatatcactgatcaattcaccttcagcattgaaaaagtaaccgaggatatcgccaacagcacctttgcgcccgaacattagttgttcaccattgctgatataaccggaacgcataatagtcgcctgttgcctctgattgatggcaccaatgccgacaacggcgatatcagctgcacaggcagtcagtatgacatcccgcacactgcgttcttcacggaatgttgtggcaacctgccgggttgatgcccgaagtggtgcaggaatgatgctgacagggcagtctgcatcaagctggccgataccggtcatataagggccaacaccaccggacagcgtcaccagacgcacctgttgggaggaaataaaaccgctcagatgctgtaaagtgcacatgggagcttcaccaaaaccgatcgccagaagctggcggggtccaatcagtgacatcagtagatgggcagctccggtacctaaccgggtattcaggttaatgccttcaagggcgggaagaacacgtactttattcagattaaaacgttttttcagagcatcttccagctccagacaaccctcatagcgcgagtttatctgaacgtggatcacaccggatctccgccctttttccagcaaacgggagactttaagccggctcaggccaagcagttcaccgatgtctccctgtgtcaggccatcgtgatagtaaaaccaggtaacccgggccagtagttcttcttcactcatgttgtttcctgaaacgctgttttctggataactattttctgaatagctatggctggtatagccattacccgaataatgaagatcctcggatgacacgtttttttctgatgctgattttttcttgtttggtttgattgtcataacaacttatttattccctgaaaaagaattaagcatgaaagcctctgtcgtgccagaggtattccacaaaaattgaacatatcttaatgaagatctaattttttcataaaatgtgatcaaaattttgcaaatatttcataatatgaattagagtcatgaacaaaagatttttaatcttataaatgttcatgttgagtatcggagtcagtgtcagaattgggacggaaagccacaaaatcataaacaccctgaggtagcatgatgtcacaaagcaattccgccaatgattcattgcaaactcatttattgcaaaggcatccatcacaacaggattcgtcacaaaaacattcgttacaaaaacaagccgctaatacattacctatgttaccgctattgtctgttcgggggatcgttaaacagttttccggtttagccgtgttgaagcagattgatttcactctgatggcagggcaggttcatgccttactggggggaaatggagcaggtaaatcaacactgatgaagatcattgcgggccttgagcagccggatgcagggacgctgatgatggaagggaacaccattagtcagttgactccggctaaagcacaccaattgggcatttatctggtaccgcaggaacctttgttattccccagcctttctgttcaggaaaatattctgtttcgcctgcctaagcacctagccagtaaaagctggatgcagcaattgctgacacagctgaactgccggttaaacctgagtgcgccagcaggaagtctggatgtggcggatcagcagatggtggaaatcatgcgtggcctgatgcgcaattcccgtattttgatccttgatgaaccgacagcctccctgacacccgccgaaacagaacggttgtttgagcggatacgggagttacagcagcaacaggttgggatcatttttatttcccataaaatccctgaaattcgtcagattgctgattatgtcagtgtgatgcgggatggcatgattgctctcagcggtgcaatggcgggcttttcaacagaaaccattattcaggcaatcacgcccacggcaaaagattctgtattaacaaaaacgcagaagttatggttggatgccggaaatcgtcagtccgcaggtgatcacgctgatccgatgcttgaagtgactgctttgtgtggtgaaggtttccgggatatttccctgacactgaaagccggagagattgtcggtctggcgggtgttgtaggggcagggcgtacggagctggcggaaacgttatatggattgcggcctgtggtgagtggcgaaatccgtttacgtcagcaggtacttaattcgttgaataccgcagcccggttacggcgtggtctggtttatctgccggaagatcggcaggcgtcggggttattccttgatgcttccctgagctggaatgtgtgctcactgactcacaaccagaacgctttctggactcgtcctgcctatgatgccgctgtgcttgagcgttatcgccgggcactcaacattcgttacagccatgccagtcagccggtacgtactttgtctggcgggaatcagcagaagattttgattgcgaaatgtctggaggcgaaacccgctgttttgattattgatgaaccgacacggggtgttgatgttggtgcgcgtactgatatttatcagttgatccgcagtattgccagccagcaggtggcgattctgcttatctcctctgatcttgatgaaattgtgcagctcgctgacagggcgctggtgatgcatcacggagaaatctgtggccaccttgataaatccaatatgagtgtggatgccattatgcatctttcgtttggtgagagggcgctatgttgaaattcattcagacctttattcagaacaatcgtgaagccactgcattgatcgctattttaggtttgtttgccctgttaagaagtctggaacacgatgtttttagtttccagactgtcaccatgattttttcgaatgcgcaaatcctgatgttgctggcaatgggcgctgcgctggtgatgctcacgcgtaatattgatgtctctgtcggttcgaccaccggtttatgtgctgtggtgctgggtatgtcactcaatgccggttttcccctgccgatagcctgccttataacactcttggcgggtatggccgcggggctggtaaatggtgtgctggtggtctggctgaaaattccggccattgttgccacgttaggtacactggggttatatcggggtctgatgctactgctgacaggcgggaaatggatcgagggcctgcctgctgatgtgaaagaactcgccagacctgttttattgggcatctcgttcatcggctggttgttgatcttactggttttggcaatgacgtggatgctgaaagtcacgaattttggtcgcggattttatgctactggtgacaatctgcaaggggcgcgacagatcggtgtgccggtgaatcgcattcgtattgctgcgtttgccgcaaatggtgtgatggcagcactggctggcattgtctttgtggctcagattggatttattccgaatcagacgggaagcgggctggaaatgaaagcaattgctgcttgtgtgttgggtggtattagtttgctgggcggcgtgggaaccgtgataggggcgattttcggagcttacttcctgactcaaatcgacagtgtgttggtattactccggttgccagcatggtggaacgattttattgccggtttggttttactgctggtgttggtgcttgatggccggttgcgcagcgccgttgaaaagaacttacgtcagcaacgttatgccagctttcttaaacctgctgatgaacctgtagcccattcatcggaagcaggcaggagaacatcatgataagtgcgattaaacgtcatggatgggaaaccgccctcgctattttgctggtactggagattctgttatttggcatagccaatccacgtatgctggatatcaatgtgttgttgttcagtaccagtgattttatctgtattggtattgttgctctgccgctgacgatggtgattgtcagtggcggaattgatatttcgtttggcgctattatcggcttatgtgctattgcactggggataatgaatcagtccggaatgccgatgatagccgcacttcctttgaccctgattgtgggaatgatatgtggtctgattaactacgggctgattttctataccggtgtgaatccgctggttattaccctcggaaccatgtacctgtttggcgggagcgcgttattactgtcggggttatccggtgcgacaggttatgagggcattggaggttttccggctgaatttactgattttgccaatctgacactacttaaactacccatcccgttagttgtttttattttttgcgtcatcgggttctggttgtttatgcatcgcactcatcggggacgcaacgtttttctgattgggatgaatcaccgtgtcgcccgttatgcggcggttcctgtcaataaaacactgtgtctgctgtatgtcctgttgggtttgtcttcggctctggctgcgatcattctggtgtcctattttggctcagcccgctcagatctggggagttcgttcctgatgccagccattactgcggcagttttaggtggagctaatatctatggtggctccggttctgttatcggcacagcactggctgttctgctggtgggatatttgcagcagggattgcagatgatggggatcccgagtcagatatccagcgccttatccggcgctttgctcatcgtggtggtggtcgggcgttctgtttctctgcatcgccatcaaatccgggagtggtggcagcgttggcggtcatcagctttttaatgagctactcctgaatgatttcttaaatagaaaacggttcctgaactgaaagagaaaagagcggagacaggcatgaaagcactgataatgaaaaaatcggcaatgaaaaaactggttttagcaggtgtattgagtctggccagtgcttcctgggcacaggctgctgacaggattgcgtttattccgaagctggtcggtgtcgggttctttaccagcggtgggcagggagcagtggcagcgggtaaggcgctggggattgatgtcacttatgatggcccgaccgagccaagtgtggcggggcaggtacagcttatcaataattttgtgaatcagggatataacgcaattatcgtgtcggcagtatcaccggatggtctgtgtccggcattgaaacgggctatgcagcgtggtgtaaaagtactgacgtgggattcagacactgcaccagaatgccgttccatctatatcgatcagggaacaccaaaacagttgggtgggttattagtggaaatggccgccagtcaggtgaaaaaagaaaaagcggagaaacagggaaaaatgaaagtggcgtttttttactccagccccacagtgacagatcaaaaccagtgggtgaaagaagccaaggacaaaattaccgcagaacatcctgactgggaagttgtgaccacgcagtttggttataacgatgcgaccaagtctttgcagactgcggaaggcattttgaaagcatggggtgatttggatgtgattattgcccctgatgctaatgcgttgccagcggcggcacaggctgcggaaaacctgaaacgcaaggatgtggcgattgtcgggttcagcacaccgaatgtcatgcgcccttatgtcgaaaacggcacagtcaaacagtttgccctgtgggatgtcgttaaacagggcaagatagcgattcatgttgccagtgaaattctgaaaaagggcgacctgaatgtgggcgataaattaactattcctgacatcggtacgcttgaggtttcaccgaatagcgttcagggatataactttgaagcgaagggcaatggcattgttgtgatgccggagcgcgtgatttttaccaaagaaaacatcaaccaatacgatttctgattcatgttttgcagagtcggcacacagcctgactctgctattttctggagagaaaaatggcagatttagatgatatcaaagacggtaaagattttggcattgatacaccgcaaaagaatacgctgtttgaactgaaaggttgtggcgcgctggattggggaatgcagtcgcgtttagcgcggattttcaatccggcaaccaataaaacggtgatgctggcgtttgatcacggttattttcaggggccgacaaccggtctggagcgtatcgacatcaatattgctccgctgtttgaacataccgatgtgctgatgtgtacacgtggtattttgcgcagtcaggttccgccggcaaccaataaaccggtggtactgcgcgcatctggtgcaaactctatgctgaccgagctttctaatgaggcggttgctgttgcgatggaagatgcgctccggctgaatgtctgtgctgtggcggcacaggtttatattggttcagagtatgaacatcagtccatcaaaaatattatcaagctggtggatcagggcacacgttatggtatgccgacgatggcggtaacaggtgttggtaaggatatggcgcgtgatcagcgctacttctcactggcaacccgcattgctgcggaaatgggcgcgaatatcatcaaaacttattatgttgataccggttttgaacggattgcggctggttgcccggtgccgattgtgattgccggaggtaagaagttgccagagctggaggcgttaaccatgtgctatcaggccattgatcagggtgcatccggtgtcgatatggggcgcaacattttccagtcagaagcaccgatagccatgcttaaagctgttcaggcggtagtgcatcaaaatgaaaagcctgctcaggcttatgagttgttcctgagtgagaaagcaaagggagaataatatgcacgttactttagttgagattaatgtcaaagccgacaagatcgccgaatttatcgaagtattcagggataatcaccttggcgctgtgagagaaccgggcaatttacggtttgacgtattgcaggatgagaatatcccgacccgtttttatatctatgaagcctatattgatgaggcagccgttgcagctcataaaacaacaccacattatctgcgctgtgttgagaaactggaagctctgatgagtgaaccacggaaaaagacctcgtttattgggttgatgccggaaggcaaataaaccctgaattgggaataacgccttggtgataacatcaaggcgtttatttttcactggcttaattaagccagttgtttgtaatgacattcagcaaaaattctgcgttaaatactcaggacatttttaatgctttctgcaagcattccaggatcaccgataccgttaatttccttgataaatggcaggcccagttgctctgccaattcttccagattgatatcattgccaatagtttgttcgaattccagctgattgataccgctttcaccagattgttcaaattccagttgcatgatctggttccataattttcctgcaaaccatgagcagtttgttacaggcgtatacgcaccattcttcatattttcagaggtcagtttcatcagttttgacaactgattactttcatcgactaattcaggaataaaatgctgttctataaattcaggggtgatagatttgtcattaatcttcacacaatgctgaatatgaaattttctctcggctgaatcatcagtcgtactatgttctgagtttttgacgaatccatatcccggatgaaaagcatatgaagtattatcaccttctttttcactattaaagtaaataacccatgcatggccaaaaccgccactaccaaaggcaactcccagtaactttaatctctcagggtttaattccccgtcgcttgcgacgaacaaataagaattgaacgatgcgaagcgggtgatttcatatctaaataccccgctgcttgcggcggggatgtttatttacgcctttaatgacaacttctttctcattatcattcaaactccaagggaagtttttggcaataaacatagctgcggctatcattggcgttacattcgtacgttcagcggttcgattagttcgaatacaaatttgtgggtagccaacgcttgcgtcgccaactggctgatatttatctgtcttgatcatcattattcctttatctatatataattaaaatggtcattctttaagaatgaaaaataacctgattaaatggttcgaagtatttctacctaaataattagtgttcacgtaactgaaaggtttcgtgttatttaagttgaaatttttatttaatataaaagcaattcgattgattgtttttatactgtttgggttttatttgtccttttgttattttttatttccttttgtttatcgatatttttattttaaaaaatagaattattcgatgatgtaatctgaggtcggtaatattgccgtttttattttccataataaaatgaccaccactgtatggtatgtattacaattggctaaaattatttcaatttgaaattacattaatagaagaaattatatatatgaattaaaatagggaacctctttgatataaatctcagaggttgttgagagaataaatagttattttatgaaactatattcagttagcgggtcagttttcttttattgtgaatgagccagcgggaaagtcgtcggtggggttaataaaagccacttcacaataaattcagctacctgttccggtcggttaatatcgagttgtggtagtggcgtatccagcggaatatcgctggcgacagcgatgacatagggatcaatgagttcttcgaaggtgtgatttaatccatctcgatacagggcgattttcgcaatagcttcatttttgaacccctcaaccagaatcagatccagtgaagtcgcatcaaatcggctggcaagataatgcaaatccagttcggggagttccggtgtttctgtcattaatgtccagcgttgttggctggcaaccagtgtttgcgccgctcccgattttctcagctcatagctgtctttgcccggcttatcgacatccatattatggtgagtatgcttaattaaccccacccggatttgttgcaggcgtaacaggggaataatctgtttgagcaaggtggttttaccggttccactgtaagcggtgatccccagtaatggcaaattcatcggggaattactttgattcatgctgactcccgaagacattcccagtgctggcattgccagttttggcactcttctggtgtattcaggttggtgaaggattctggatgtggaatatagacggtttttgctttaatcatttgcataaagaacatcagctttctgtcacctaatgcaaggtagctttccagtctgggtatcaggctgcggtgcatcagggcaagtgtcggatgggcgcgttcacaatcgtgtacataagccgcccacgcatgttgtttatagcgccaaagcttttccaccagatcatcagggaaatccgggacatcgcaaggcacgaatatcacccactcatgaatagcctttttcagtactgccagcattccggccaatggcccggaaaaatcagtgatgatgtcaggaataatgggataaccactttgttgatacactgcctgattgcggttggcgttaatcagcagttcatgaacctgtggctgcaattttgcagctatgtgttgatataatggtgctccaccgaattgcagtaatcccttatcatttcctcccatgcgggtggatagccctccggccagaatggcaccactgatttttggatacgtcatgttaaatcacctgatatttttaaccgatatattttatctttggttatgtaacccttgtgaatcaatatgtaacagtgcttatatgaacaaatgagtataacctttacgcgcgttgacagcccaattttttctcccaatcatgtccctttgttgtaagacaggttatggtggcgggctgttcactgtaccttcagggtatgattaacgactgattaaagagaactttgttgtggcagaaactatggcttttaattttcaaaatattacgccggatttgataatggatgcgctggcgcagtctggtctgcgtgttgattcgggtttaactgagctgaatagctatgaaaaccgggtctatcagtttatggatgaagaccgtaaacgttatgtcgtgaaattctatcgtcctcagcgctggaaccggcagcaaattcaggaagagcatgaatttacgctggcgttacagcaggcagatttatcggttgctgcgccgctggttcttgatgggcaaacagtactggagcatgacgggttcttctttgccgttttccccagcgtgggtggccgtcagtacgagtctgataattttgatcagctggaagatgtcgggcggttactggggaaagttcatcagataggctaccagaaaacattttctgcccgcccgactatcagcctcaacgaatatttgtaccaaccctatcaatatttgacagaatgcagcctcatacctaatgcgcataaggctgctttctttgcttcgctggacgaactgaataaagttgttgagtcacagtggaatgttgactggcagggattacggctgcatggtgactgtcatgctggtaatatcttgtggcgcgacgaggcatggttcgttgatcttgatgatgcccgtaatggtccggcgattcaggatttatggatgttacttaacggctcacggcaagaacagttgattcagctggatattctgcttgaatcatataaccagtttgcggagttcgatctgaaaacactggctctgatagaacctttgcgcgcgatgcggatggtctattatctggcatgggttgctcgtcgctggcaggatcctgcttttcccaaagcgtttccatggatggctgacagtgacttttggcataagcagataagtctttttgctgaacaaatccggctgttacaggaaccccccttacagctaaccccgatgtattaatttttctggagatcacgatgaaaaaattttggtttgcattggtgggagtgtttatggcatttaatgccagcgcttctgatttttctgaaggcaagcagtatgttgaacttaaaaaagcggtagctgatcaacctcaggttgtggagtttttctctttttattgcccgcactgttaccagtttgagaatatctttcatgttcccggcacgatagcaaaaaaccttccggaaggcgttacacatgaacgttatcacgttgattttctggggcctttagggaaagacctgacagatgcctgggctgttgctattgttttgaaagcacaggataaagtgttacctgtattatttgatggcatccagaaaactcagactatcaatactaaagctgatatccgtaatgcatttattaaagccggtatttctggtgaagattatgacgcagcactgaatagtttcattgtgaaatcggtagcctctaaagaacgtcaggcggctcaggattttcagttgcagggtgttccggccacgtttgtgcttggtaaatacatgattaataatggcggaattgagactaaatcggttcaggactacgctaaaaaattctcggatgttgtgaattatctggtaaccaaaaaataagcaataaaaaactttagttttatatgtactcaatgaatttcaggccgtatcgcagtgcaagggaataacaaatttgtcgtgagcgaattttcccggccaacctgaaagacaaagagtaaaaaataatacaggcattgtgccagctaattacagggctggcacaatgcttgctaaaattaccctttcataacataaactccggttatatccacaagtcggtgatttgtaagcaattgcaatattttcgtaatatttgacgtaattcattgatttttacctccagttatccgtttttgatatggatatacataaatctgttttatgtgccaattttttgtgcacaaagttatccacaactcatttatcagaaaacttattaaagagcgggtatcagaacgagaaaatgatcgcaacattcgtctatgacagcacagtgtggcatcctattatttattcatactccagaacgacgaagacaattttatggtacagatagcagataatcccctgattttggttgatggttcttcatacctttatcgcgcataccatgctttccctcctctgacaaacagtgcgggcgaaccgacaggcgccatgtatggtgtactgaatatgctgcgcagtttaatcatgcagtatcggcccagccatgtcgcagttgtgtttgatgccaaaggcaaaacatttcgtgatgaattattcgctgaatataaatcccatcgcccgccgatgccggatgatttgcgtgatcagattgagcctttgcataacatggtcagggcgatgggcttacccgttctggttgtgccgggcgttgaagcggatgatgttattggtacactggcattacaggcagaaaaagaaggccgctctgtcctgatcagtacgggtgataaagatatggctcaactggttacgccgaatatcaccctgataaacaccatgaccaacacgattttagggccggcagaggtcactgaaaagtatggtattcctccggaacttattatcgatttcctcgcactgatgggagactcttccgataatattccgggtgtaccgggtgtcggcgagaaaacggctctagggttattacaggggcttggcgggctgaatgatatctatgccagactggatgaaattgcaacactcagcttccgtggtgcaaaaacactgggcagcaaaatggagcagcataaagaggtggcttatctctcttacctgctggcaaccattaaaactgatgttgatctggataaaaattgcctggatttggcagtcgctgcccctgataacgaggaattactggcacaattcagccgctacgaattcaaacgctggctgaaagatgtacaagacggcggttggctggaaggtcgttcagcggaaaaaggcgggcaaaagtcagcgacaggcgctgcaccgacatcttcagcgcccgtaaaacccgctgctgtcagtatttctccggaaagctaccagactatccttgatcggaaatcccttgatgaatggattgaaaaactgaaacaggctcctgcattctctttcgatacagagaccgacgggctggatacgttaaccgctaatctggtgggcatgtcttttgccgttgtaagtcaggtaggtgatgtggaaaaaccggcagaaggagaaccggatgttgaggctgcatatctgccgctggggcatgattatctggatgccccacaacaactggatcggaatgaggtgcttgaagcactgaaaccgctgctggaagatgcgagcctgcctaaaattggtcagaacctgaaatttgaccgaggcgtgctcgaacgttatggcgtggcgctgaatggtattgtttttgatacgatgctggaatcctatgtgctgaacagtgttgcagggcggcatgatatggatagccttgcagagcgtcatttaggctataaaaccactacttttgaagaaattgccggaaagggtaaaaaacagcttactttcaaccagatcgctctggaagaggcggctaaatatgctgcggaagatgccgatattaccctgcgtctgcatcaggctatgtacccacaggttgattctgttccgacactgaaaaaagttttccagaatatcgaaatgccgctggttccggtgctttcccgcatggaaagaacgggtgttctgattgatgccaacacgttggcagagcattcaaaagaaattacggctcgtttactcgaactggaaaaatcggcttatgagctggctggagaagaatttaatctggcttcacctaagcaattacaggttattctgtttgaaaaaatgaacctgcctgttgtgaaaaaaacaccgaacggtgcgccatcgaccaatgaagaagtgctggaagagctggcagaacatcatgagctgccgagggttattctggaacatcgcggtctggcaaaactcaaatcgacctatactgacaagctgccacagatggtcagcccagtgacacagcgagttcacacgtcttatcatcaggctgtaactgcgaccgggcgtctctcttcccgtgatcctaacctgcaaaatattcctgtccgtaatgaagaagggcgacgtatccgtcaggcatttattgcaccagaaggttatcgcattctggcagcggactattcgcagattgagttgcggattatggcgcatttatcgcaggataaaggcttgctggaggcttttgcgcagggtaaagacattcaccgtgcaactgccgcagaagtttttggactccctctggagcaggtgacgagtgagcaacgccgcagtgctaaagcgattaactttggcttgatctatggtatgagtgcgtttggtttgtcccgtcagttagggatcccgcgtggagaagctcagcgttatatggatctttattttgagcgttatccgggcgtactggaatatatggaacgtacccgtcagcaggccgctgagcatgggtttgttgaaacgctggaagggcgtcgcctgtatctgccggatatcaaatcacgtaatggcatgcgccgtaaagcctctgaacgcgaagctatcaatgctccaatgcagggaactgcggcggatattatcaaactggccatgattgcagtcgatgactggatcgtccgtgaacagccaaaagtgcgtatgatcatgcaggttcacgatgaattggtatttgaagtgcatgagtcagagctggctgccgcagaacagaaaatcagagagcttatggagaaaagcatgcggctcgatgtccctctgaaagtcgatgtaggaacgggggataactgggatcaggctcactgatttttcttgaataatttttatataaatgacgtctatttaatgagccaaaaatatccccgttatgccgtgaataggcatgatataagaattttggttcatttttagattagatctagatctcacaaatatgtaattaaactacaaaaaaaatggcgtaatctcggggcttgatcacataatttgggctgaatcgaggtattttatgaaaattaattacaaaaaaatcttttgctgataaaaaaaataaggtaaagttgtcggcgtagggtacagaggtaagatgttctatctttcagaccttttacttcacgtaatcggatttagctgaatattagctgccccagccatctcttttggctggggcgtttttttatttccccttcatctttcaaaccgcctctttgttggcttcactcactcaccccagtcacatagttaactatgctcccggggattcgctcatttgccgccgcgatgcaacttgaaatctatttgggaagagggcgtgatttacggttctttccgaggaagggagataaaaggtggaaattactccacctcaatagcaggctggctgaaccaagtatcaagtttttgttcaagtttatcgataccgatttttttcagagcagagaaatactcaatctgaatgttaccttccagaaatgccagctcctgacgtaccttattcaactgacttttacgtgcgcctgaagccagtttatcggctttggtcagcagaaccatgacaggaacctgcatcacaacggcccattcgatcatctgcatatccagatctttcagcggatgacggatatccatcaacacaaccagaccttgcagacactcacgtttctggagatattcacccagtgctttctgccatttgattttcatctcctctggcacttgtgcatagccataacccggcaggtcaacaaggcgtacgccttcctctacctgaaacaggttaatcagctgggtacgtccgggtgttttactggtacgggcgaggcccttttgccgggtcagtgcattcagggcactggatttacctgcatttgaccgaccggcaaacgcgacttcaatgcccgtctccggaggcaggtggcggatgtctggcgcactcgtgacaaagtgggtcatgtgatagttatagtttttgatggtcaaaatggttatctccctgcggaatacacgaaaaacagcgcggtgattatagcgagagcagcggcttgtggacaggttaactttttactgcccttattgctgctaagcagagatcaagattctgccagtgaacggcgcagatattcagcaaaaagtgtgtacagttcaccttgagttacaattttaagagcgagctgaattgccggaacgccggggacagcatgcttagaagataaaacgcataaatcatcagttatggcactgtccggtaataacccgattcccaaaccatgttgtattgaactgctgatattactaaatgaggcactgacatatgccaaaaaataaggcttattcatatcttccagtgccttaatagcgcacgctctgatgacacatccttcagaaaaagtcactaatggtatttcctgtagttcattgaaatataaatcttttgaggcaacccagtgtaatggctcaatttgaagaaatgtttcagtctcagtattgacgggttttccttccacacttttaagaataaccacatccaattgttgcttttcagtcatagccgagagtatcggagagggcgctgccgtaatttctatctttaaccccggatttttttctagacaccatgagatagcctggtgtaggttttttatgttgaaatcatccggcacaccgagagcgatcctgcctcttagctgaaatgactttactgagtgcagcgcttgtgtcatgcgaaataaaatatcttttgctacgggtaagagttgttttccttcattagttaaaccaataatctgcccttgtcgtcgattaattaaacggcagccaatatcttcttcaagtcgtttaatactcaggctaagtgtagattgagttcttcctaattcttctcctgcacgggtaaatccgccgtgtttggcgacgaagacgaatgctcgtaattgttcaaatgtgacttgtcggccatccagacgatcagcacgcatattctgctccatagggcgcctctgcattgccatcattgataaactcaatgataagaaaggaattatttatttaacaaaattaaatcgttatcgcaatattggcaaaaaagaactttgacctgcataggagtgattcaatgtttatgatcgttattcctatatttctcatcatactgattgggtactgttttggtcgcctgcgccctgatagcggtaattccgataaattaattaatgattacgttctctacatcgcgctgccagccttattatttctttctattgcccgttcagagatcaatgagttagaacagtggggatttatcggagccagtttagccgggatctgtattgtctatgctatgggaactgccatcgcaaagtttatgggggttggttttcctcagtcttcaattttaagtatgggagcctgttatggcacaacgggatatatgggtatcccaatattgctctccatttatggggaagccgcagcgcttccggcagcaatcgcgacaattttacacaacatacctgccatcatagcggttatcattagctatgatatgactaccacgcggcacagcgctaatggcagaatttcttttttctacagtatagcgaaagcattaaaaacaaccttgaccaacccactagctgtttcagttattgcaggattaatctttgttgtgtttaggatcccactgccggaatttctacagtcatttacccactttctggcaaatgcagcagggccaacggcattatttgcattagggttagggttgtcccgctttaacttaaaagagcacgttaacagagatgcactaaaattggtggccccgatgttattactgaaattaggcatacaaccgtgggtgacttttatttgtgcttattacttatttggtatgcagcaactcaataatatttggtttattgttgctgttgttatggctgcacaacctatcggtgccagtgtttatattttcgccagaatatataatttcaggcaggaagtcatttcgctctctatcatcatttcacttctggtcgcattgattaccattccgcttatattacaatttctttcggtctaacaacgcttttcagcctaatttgtatgaatacatatcaaggcaggtgttattcggaaaataaacactatccgaaatatgagaagataatatttatctggatgatattattcagtaaaacgcattattgctcgtaaaaatgagtaaatctttgccactttgcttggtggggaattacacttaatgcgttttactgattttatgagttttgttattgacctcgagaataaaggaaccatcaatgtttaaacgtatttttgtgccgcttatcacggcatgtgctattagcgtgatggctgccccagcactggctgccgaaacttatgtaaagctggtgacatcagcgggtgaaatagagcttgagctgaatggcgataaagcaccaatcaccacaaagaacttcattgagtatgtggatgaggggttttataacaacactattttccatcgtgtcatccccggctttatggttcagggcggcggctttacaaaagatatgaagcagaaagcaaccaaagcccctatcaaaaatgaagctgataatgggttgcgtaacctgcgtggcacgatagcaatggcacgtaccgcagataaagatagtgcaaccagccagttttttatcaatgtggcggataatgctttccttgaccatggtcagcgtgattttggttatgctgtttttggtaaagtcgtaaaagggatggatgtggttgacaagatttctcaggtcaaaacagaaaatgttggtccttatcagaatgttccggttaaaccaatagtgatcctctctgctaaggtggtttctcagtaaccctgatgagaaaacagcgttttttacctgtaaattagaacatcggcggtatttgcctgttattacacttttccgaagtgtcagacctttaaaaataccgtctctccctcaattctttttcatcacttctacaatcatggttcactcctctggtccccgaccctattttaaagtagcttatgtggtatgatgagtgtcctgctatcgttgacgttgatttacctgattttaccgtaatacataacgcacagtgcccaatagggcaaagcaatatataaaactataaaaatcagtaggatgtgatcctatgctattaataatagataactacgactcttttacattcaatttatatcaatacttttgtgagttagggacgcgtgttttagttaaacgtaatgatgagctacagcttgaagatatcgaagagctggcaccgacccatttggtgatctctccgggtccctgtacgccggatgacgccgggatctcactggaggttatctctcattttgccgggaaattgccgattctgggcgtgtgtctcgggcatcaggcgattggacaagcctttggtgcgagtgttgttaaagctcgtgaagtgatgcatggtaaaaccagcttaattcaccataatcagcagggtgtattcaaaggactgaaccgaccgctgacagtaacccgctaccactctttagttgatgcggcagaaacattaccggcttcttttgaagtcaccgcatggagccagcatgatggtaatgtggatgaaataatgggaatacgtcaccgtactttacctctagaaggcgtgcagtttcatccggaaagcattctgagtgaacaggggcatgacttactgaataattttctgaaatactaacgaaaactatttaattcctctttcggctatttttcacatcagcttttgtgtaatacccataatcaggttatggcgcttaatttatttttccatataaaaggttaaaaccaccgactttagtcggtcagctttagctgcgatactgtgttgcacgagaggtgcaatatggattacagatatggcagccacacggtatttcagattgagtatcattttgtgtgggtaacaaaatacaggcgcaaagtgctaacaggtgaagttggtttacgggtgagagagttagttcgtcagacctgtgaagcgttcgaaatcaggatagtagaaggggtcgtgagcaaagaccatgtacatatactggtgagttgtcctccgagcttagcgccctcagaaatcatgaggcgaataaagggaaggacagcaagtaagttgtttgaagagtttgctcacttgaaaaagcgttactggggtcagcatttttggggcagaggctatttttgtgcgacggtaggtcagttaacggaagagatgataaaggcctatctggcgcatcattttgaaccgaacccgaatgatcacttcaggctggataattgacgcatcgtttagccgatgcgtatccggactttcagtccgttaatcactaacccaccgactttagtcggtggttgttgagttaaatcatttttattataaagctggcaggctttatctaccatacctggtacgggtatccctgtcatattaaacatttcatcataggtgactggaacaccataatgatttaaaactagcatgccagattttttccatagcggttcagagttaatcagtacaccatccatatcgaaaataactgctttcatcattatctcctttgcttggttatataagattatttttgtttttctatagaaataaaatcatcgtttttgcgttttattaaatttcaaaaaaactgtttagcctatcaggttttaataattataccctcgtgattctacaacttattatttatttttttatcgtgatgttaatcacagttcaaatagtgatgttaattaaacctaacatttggccatggttccaatttattgataatgatatatgttcagataatacccaatgactcgatcatacatttccacggatttcgaaaaagacaacgttttacaaatcaaccttgccaaatgttaacgaggattcaggctaggtctctctatacgttgggtataatacttgcttgaccactgctcatctattttgcaacagataatgaattcagtgccgggagcagtgatgtccgttattttctgccatatttacttttgggaacctctaaaaacttttcacagccacaaaattgagtaaaatgtaggcacagtacctctctgcaaggtagcgccatcatgataccgcctcgttctgctttaaaaaaagacaaacaggcatccgaatatcaccgtcgaaaaatcgatgaattaggtgatccgctgcttgttcttgataaatatgtgatttctcggcactggctgacaccctagaccgtatcgtcccacgtattatttccccc

SEQ ID NO: 487 - DNA, 32812 bp, Xenorhabdus sp.
  CDS (20729)..(21667)
gggggaaataatacgtgggacgatacggtctagggtgtcagccagtgccgagaaatcacatatttatcaagaacaagcagcggatcacctaattcatcgatttttcgacggtgatattcggatgcctgtttgtctttttttaaagcagaacgaggcggtatcatgatggcgctaccttgcagagaggtactgtgcctacattttactcaattttgtggctgtgaaaagtttttagaggttcccaaaagtaaatatggcagaaaataacggacatcactgctcccggcactgaattcattatctgttgcaaaatagatgagcagtggtcaagcaagtattatacccaacgtatagagagacctagcctgaatcctcgttaacatttggcaaggttgatttgtaaaacgttgtctttttcgaaatccgtggaaatgtatgatcgagtcattgggtattatctgaacatatatcattatcaataaattggaaccatggccaaatgttaggtttaattaacatcactatttgaactgtgattaacatcacgataaaaaaataaataataagttgtagaatcacgagggtataattattaaaacctgataggctaaacagtttttttgaaatttaataaaacgcaaaaacgatgattttatttctatagaaaaacaaaaataatcttatataaccaagcaaaggagataatgatgaaagcagttattttcgatatggatggtgtactgattaactctgaaccgctatggaaaaaatctggcatgctagttttaaatcattatggtgttccagtcacctatgatgaaatgtttaatatgacagggatacccgtaccaggtatggtagataaagcctgccagctttataataaaaatgatttaactcaacaaccaccgactaaagtcggtgggttagtgattaacggactgaaagtccggatacgcatcggctaaacgatgcgtcaattatccagcctgaagtgatcattcgggttcggttcaaaatgatgcgccagataggcctttatcatctcttccgttaactgacctaccgtcgcacaaaaatagcctctgccccaaaaatgctgaccccagtaacgctttttcaagtgagcaaactcttcaaacaacttacttgctgtccttccctttattcgcctcatgatttctgagggcgctaagctcggaggacaactcaccagtatatgtacatggtctttgctcacgaccccttctactatcctgatttcgaacgcttcacaggtctgacgaactaactctctcacccgtaaaccaacttcacctgttagcactttgcgcctgtattttgttacccacacaaaatgatactcaatctgaaataccgtgtggctgccatatctgtaatccatattgcacctctcgtgcaacacagtatcgcagctaaagctgaccgactaaagtcggtggttttaaccttttatatggaaaaataaattaagcgccataacctgattatgggtattacacaaaagctgatgtgaaaaatagccgaaagaggaattaaatagttttcgttagtatttcagaaaattattcagtaagtcatgcccctgttcactcagaatgctttccggatgaaactgcacgccttctagaggtaaagtacggtgacgtattcccattatttcatccacattaccatcatgctggctccatgcggtgacttcaaaagaagccggtaatgtttctgccgcatcaactaaagagtggtagcgggttactgtcagcggtcggttcagtcctttgaatacaccctgctgattatggtgaattaagctggttttaccatgcatcacttcacgagctttaacaacactcgcaccaaaggcttgtccaatcgcctgatgcccgagacacacgcccagaatcggcaatttcccggcaaaatgagagataacctccagtgagatcccggcgtcatccggcgtacagggacccggagagatcaccaaatgggtcggtgccagctcttcgatatcttcaagctgtagctcatcattacgtttaactaaaacacgcgtccctaactcacaaaagtattgatataaattgaatgtaaaagagtcgtagttatctattattaatagcataggatcacatcctactgatttttatagttttatatattgctttgccctattgggcactgtgcgttatgtattacggtaaaatcaggtaaatcaacgtcaacgatagcaggacactcatcataccacataagctactttaaaatagggtcggggaccagaggagtgaaccatgattgtagaagtgatgaaaaagaattgagggagagacggtatttttaaaggtctgacacttcggaaaagtgtaataacaggcaaataccgccgatgttctaatttacaggtaaaaaacgctgttttctcatcagggttactgagaaaccaccttagcagagaggatcactattggtttaaccggaacattctgataaggaccaacattttctgttttgacctgagaaatcttgtcaaccacatccatcccttttacgactttaccaaaaacagcataaccaaaatcacgctgaccatggtcaaggaaagcattatccgccacattgataaaaaactggctggttgcactatctttatctgcggtacgtgccattgctatcgtgccacgcaggttacgcaacccattatcagcttcatttttgataggggctttggttgctttctgcttcatatcttttgtaaagccgccgccctgaaccataaagccggggatgacacgatggaaaatagtgttgttataaaacccctcatccacatactcaatgaagttctttgtggtgattggtgctttatcgccattcagctcaagctctatttcacccgctgatgtcaccagctttacataagtttcggcagccagtgctggggcagccatcacgctaatagcacatgccgtgataagcggcacaaaaatacgtttaaacattgatggttcctttattctcgaggtcaataacaaaactcataaaatcagtaaaacgcattaagtgtaattccccaccaagcaaagtggcaaagatttactcatttttacgagcaataatgcgttttactgaataatatcatccagataaatattatcttctcatatttcggatagtgtttattttccgaataacacctgccttgatatgtattcatacaaattaggctgaaaagcgttgttagaccgaaagaaattgtaatataagcggaatggtaatcaatgcgaccagaagtgaaatgatgatagagagcgaaatgacttcctgcctgaaattatatattctggcgaaaatataaacactggcaccgataggttgtgcagccataacaacagcaacaataaaccaaatattattgagttgctgcataccaaataagtaataagcacaaataaaagtcacccacggttgtatgcctaatttcagtaataacatcggggccaccaattttagtgcatctctgttaacgtgctcttttaagttaaagcgggacaaccctaaccctaatgcaaataatgccgttggccctgctgcatttgccagaaagtgggtaaatgactgtagaaattccggcagtgggatcctaaacacaacaaagattaatcctgcaataactgaaacagctagtgggttggtcaaggttgtttttaatgctttcgctatactgtagaaaaaagaaattctgccattagcgctgtgccgcgtggtagtcatatcatagctaatgataaccgctatgatggcaggtatgttgtgtaaaattgtcgcgattgctgccggaagcgctgcggcttccccataaatggagagcaatattgggatacccatatatcccgttgtgccataacaggctcccatacttaaaattgaagactgaggaaaaccaacccccataaactttgcgatggcagttcccatagcatagacaatacagatcccggctaaactggctccgataaatccccactgttctaactcattgatctctgaacgggcaatagaaagaaataataaggctggcagcgcgatgtagagaacgtaatcattaattaatttatcggaattaccgctatcagggcgcaggcgaccaaaacagtacccaatcagtatgatgagaaatataggaataacgatcataaacattgaatcactcctatgcaggtcaaagttcttttttgccaatattgcgataacgatttaattttgttaaataaataattcctttcttatcattgagtttatcaatgatggcaatgcagaggcgccctatggagcagaatatgcgtgctgatcgtctggatggccgacaagtcacatttgaacaattacgagcattcgtcttcgtcgccaaacacggcggatttacccgtgcaggagaagaattaggaagaactcaatctacacttagcctgagtattaaacgacttgaagaagatattggctgccgtttaattaatcgacgacaagggcagattattggtttaactaatgaaggaaaacaactcttacccgtagcaaaagatattttatttcgcatgacacaagcgctgcactcagtaaagtcatttcagctaagaggcaggatcgctctcggtgtgccggatgatttcaacataaaaaacctacaccaggctatctcatggtgtctagaaaaaaatccggggttaaagatagaaattacggcagcgccctctccgatactctcggctatgactgaaaagcaacaattggatgtggttattcttaaaagtgtggaaggaaaacccgtcaatactgagactgaaacatttcttcaaattgagccattacactgggttgcctcaaaagatttatatttcaatgaactacaggaaataccattagtgactttttctgaaggatgtgtcatcagagcgtgcgctattaaggcactggaagatatgaataagccttattttttggcatatgtcagtgcctcatttagtaatatcagcagttcaatacaacatggtttgggaatcgggttattaccggacagtgccataactgatgatttatgcgttttatcttctaagcatgctgtccccggcgttccggcaattcagctcgctcttaaaattgtaactcaaggtgaactgtacacactttttgctgaatatctgcgccgttcactggcagaatcttgatctctgcttagcagcaataagggcagtaaaaagttaacctgtccacaagccgctgctctcgctataatcaccgcgctgtttttcgtgtattccgcagggagataaccattttgaccatcaaaaactataactatcacatgacccactttgtcacgagtgcgccagacatccgccacctgcctccggagacgggcattgaagtcgcgtttgccggtcggtcaaatgcaggtaaatccagtgccctgaatgcactgacccggcaaaagggcctcgcccgtaccagtaaaacacccggacgtacccagctgattaacctgtttcaggtagaggaaggcgtacgccttgttgacctgccgggttatggctatgcacaagtgccagaggagatgaaaatcaaatggcagaaagcactgggtgaatatctccagaaacgtgagtgtctgcaaggtctggttgtgttgatggatatccgtcatccgctgaaagatctggatatgcagatgatcgaatgggccgttgtgatgcaggttcctgtcatggttctgctgaccaaagccgataaactggcttcaggcgcacgtaaaagtcagttgaataaggtacgtcaggagctggcatttctggaaggtaacattcagattgagtatttctctgctctgaaaaaaatcggtatcgataaacttgaacaaaaacttgatacttggttcagccagcctgctattgaggtggagtaatttccaccttttatctcccttcctcggaaagaaccgtaaatcacgccctcttcccaaatagatttcaagttgcatcgcggcggcaaatgagcgaatccccgggagcatagttaactatgtgactggggtgagtgagtgaagccaacaaagaggcggtttgaaagatgaaggggaaataaaaaaacgccccagccaaaagagatggctggggcagctaatattcagctaaatccgattacgtgaagtaaaaggtctgaaagatagaacatcttacctctgtaccctacgccgacaactttaccttattttttttatcagcaaaagatttttttgtaattaattttcataaaatacctcgattcagcccaaattatgtgatcaagccccgagattacgccattttttttgtagtttaattacatatttgtgagatctagatctaatctaaaaatgaaccaaaattcttatatcatgcctattcacggcataacggggatatttttggctcattaaatagacgtcatttatataaaaattattcaagaaaaatcagtgagcctgatcccagttatcccccgttcctacatcgactttcagagggacatcgagccgcatgcttttctccataagctctctgattttctgttctgcggcagccagctctgactcatgcacttcaaataccaattcatcgtgaacctgcatgatcatacgcacttttggctgttcacggacgatccagtcatcgactgcaatcatggccagtttgataatatccgccgcagttccctgcattggagcattgatagcttcgcgttcagaggctttacggcgcatgccattacgtgatttgatatccggcagatacaggcgacgcccttccagcgtttcaacaaacccatgctcagcggcctgctgacgggtacgttccatatattccagtacgcccggataacgctcaaaataaagatccatataacgctgagcttctccacgcgggatccctaactgacgggacaaaccaaacgcactcataccatagatcaagccaaagttaatcgctttagcactgcggcgttgctcactcgtcacctgctccagagggagtccaaaaacttctgcggcagttgcacggtgaatgtctttaccctgcgcaaaagcctccagcaagcctttatcctgcgataaatgcgccataatccgcaactcaatctgcgaatagtccgctgccagaatgcgataaccttctggtgcaataaatgcctgacggatacgtcgcccttcttcattacggacaggaatattttgcaggttaggatcacgggaagagagacgcccggtcgcagttacagcctgatgataagacgtgtgaactcgctgtgtcactgggctgaccatctgtggcagcttgtcagtataggtcgatttgagttttgccagaccgcgatgttccagaataaccctcggcagctcatgatgttctgccagctcttccagcacttcttcattggtcgatggcgcaccgttcggtgtttttttcacaacaggcaggttcattttttcaaacagaataacctgtaattgcttaggtgaagccagattaaattcttctccagccagctcataagccgatttttccagttcgagtaaacgagccgtaatttcttttgaatgctctgccaacgtgttggcatcaatcagaacacccgttctttccatgcgggaaagcaccggaaccagcggcatttcgatattctggaaaacttttttcagtgtcggaacagaatcaacctgtgggtacatagcctgatgcagacgcagggtaatatcggcatcttccgcagcatatttagccgcctcttccagagcgatctggttgaaagtaagctgttttttaccctttccggcaatttcttcaaaagtagtggttttatagcctaaatgacgctctgcaaggctatccatatcatgccgccctgcaacactgttcagcacataggattccagcatcgtatcaaaaacaataccattcagcgccacgccataacgttcgagcacgcctcggtcaaatttcaggttctgaccaattttaggcaggctcgcatcttccagcagcggtttcagtgcttcaagcacctcattccgatccagttgttgtggggcatccagataatcatgccccagcggcagatatgcagcctcaacatccggttctccttctgccggtttttccacatcacctacctgacttacaacggcaaaagacatgcccaccagattagcggttaacgtatccagcccgtcggtctctgtatcgaaagagaatgcaggagcctgtttcagtttttcaatccattcatcaagggatttccgatcaaggatagtctggtagctttccggagaaatactgacagcagcgggttttacgggcgctgaagatgtcggtgcagcgcctgtcgctgacttttgcccgcctttttccgctgaacgaccttccagccaaccgccgtcttgtacatctttcagccagcgtttgaattcgtagcggctgaattgtgccagtaattcctcgttatcaggggcagcgactgccaaatccaggcaatttttatccagatcaacatcagttttaatggttgccagcaggtaagagagataagccacctctttatgctgctccattttgctgcccagtgtttttgcaccacggaagctgagtgttgcaatttcatccagtctggcatagatatcattcagcccgccaagcccctgtaataaccctagagccgttttctcgccgacacccggtacacccggaatattatcggaagagtctcccatcagtgcgaggaaatcgataataagttccggaggaataccatacttttcagtgacctctgccggccctaaaatcgtgttggtcatggtgtttatcagggtgatattcggcgtaaccagttgagccatatctttatcacccgtactgatcaggacagagcggccttctttttctgcctgtaatgccagtgtaccaataacatcatccgcttcaacgcccggcacaaccagaacgggtaagcccatcgccctgaccatgttatgcaaaggctcaatctgatcacgcaaatcatccggcatcggcgggcgatgggatttatattcagcgaataattcatcacgaaatgttttgcctttggcatcaaacacaactgcgacatggctgggccgatactgcatgattaaactgcgcagcatattcagtacaccatacatggcgcctgtcggttcgcccgcactgtttgtcagaggagggaaagcatggtatgcgcgataaaggtatgaagaaccatcaaccaaaatcaggggattatctgctatctgtaccataaaattgtcttcgtcgttctggagtatgaataaataataggatgccacactgtgctgtcatagacgaatgttgcgatcattttctcgttctgatacccgctctttaataagttttctgataaatgagttgtggataactttgtgcacaaaaaattggcacataaaacagatttatgtatatccatatcaaaaacggataactggaggtaaaaatcaatgaattacgtcaaatattacgaaaatattgcaattgcttacaaatcaccgacttgtggatataaccggagtttatgttatgaaagggtaattttagcaagcattgtgccagccctgtaattagctggcacaatgcctgtattattttttactctttgtctttcaggttggccgggaaaattcgctcacgacaaatttgttattcccttgcactgcgatacggcctgaaattcattgagtacatataaaactaaagttttttattgcttattttttggttaccagataattcacaacatccgagaattttttagcgtagtcctgaaccgatttagtctcaattccgccattattaatcatgtatttaccaagcacaaacgtggccggaacaccctgcaactgaaaatcctgagccgcctgacgttctttagaggctaccgatttcacaatgaaactattcagtgctgcgtcataatcttcaccagaaataccggctttaataaatgcattacggatatcagctttagtattgatagtctgagttttctggatgccatcaaataatacaggtaacactttatcctgtgctttcaaaacaatagcaacagcccaggcatctgtcaggtctttccctaaaggccccagaaaatcaacgtgataacgttcatgtgtaacgccttccggaaggttttttgctatcgtgccgggaacatgaaagatattctcaaactggtaacagtgcgggcaataaaaagagaaaaactccacaacctgaggttgatcagctaccgcttttttaagttcaacatactgcttgccttcagaaaaatcagaagcgctggcattaaatgccataaacactcccaccaatgcaaaccaaaattttttcatcgtgatctccagaaaaattaatacatcggggttagctgtaaggggggttcctgtaacagccggatttgttcagcaaaaagacttatctgcttatgccaaaagtcactgtcagccatccatggaaacgctttgggaaaagcaggatcctgccagcgacgagcaacccatgccagataatagaccatccgcatcgcgcgcaaaggttctatcagagccagtgttttcagatcgaactccgcaaactggttatatgattcaagcagaatatccagctgaatcaactgttcttgccgtgagccgttaagtaacatccataaatcctgaatcgccggaccattacgggcatcatcaagatcaacgaaccatgcctcgtcgcgccacaagatattaccagcatgacagtcaccatgcagccgtaatccctgccagtcaacattccactgtgactcaacaactttattcagttcgtccagcgaagcaaagaaagcagccttatgcgcattaggtatgaggctgcattctgtcaaatattgatagggttggtacaaatattcgttgaggctgatagtcgggcgggcagaaaatgttttctggtagcctatctgatgaactttccccagtaaccgcccgacatcttccagctgatcaaaattatcagactcgtactgacggccacccacgctggggaaaacggcaaagaagaacccgtcatgctccagtactgtttgcccatcaagaaccagcggcgcagcaaccgataaatctgcctgctgtaacgccagcgtaaattcatgctcttcctgaatttgctgccggttccagcgctgaggacgatagaatttcacgacataacgtttacggtcttcatccataaactgatagacccggttttcatagctattcagctcagttaaacccgaatcaacacgcagaccagactgcgccagcgcatccattatcaaatccggcgtaatattttgaaaattaaaagccatagtttctgccacaacaaagttctctttaatcagtcgttaatcataccctgaaggtacagtgaacagcccgccaccataacctgtcttacaacaaagggacatgattgggagaaaaaattgggctgtcaacgcgcgtaaaggttatactcatttgttcatataagcactgttacatattgattcacaagggttacataaccaaagataaaatatatcggttaaaaatatcaggtgatttaacatgacgtatccaaaaatcagtggtgccattctggccggagggctatccacccgcatgggaggaaatgataagggattactgcaattcggtggagcaccattatatcaacacatagctgcaaaattgcagccacaggttcatgaactgctgattaacgccaaccgcaatcaggcagtgtatcaacaaagtggttatcccattattcctgacatcatcactgatttttccgggccattggccggaatgctggcagtactgaaaaaggctattcatgagtgggtgatattcgtgccttgcgatgtcccggatttccctgatgatctggtggaaaagctttggcgctataaacaacatgcgtgggcggcttatgtacacgattgtgaacgcgcccatccgacacttgccctgatgcaccgcagcctgatacccagactggaaagctaccttgcattaggtgacagaaagctgatgttctttatgcaaatgattaaagcaaaaaccgtctatattccacatccagaatccttcaccaacctgaatacaccagaagagtgccaaaactggcaatgccagcactgggaatgtcttcgggagtcagcatgaatcaaagtaattccccgatgaatttgccattactggggatcaccgcttacagtggaaccggtaaaaccaccttgctcaaacagattattcccctgttacgcctgcaacaaatccgggtggggttaattaagcatactcaccataatatggatgtcgataagccgggcaaagacagctatgagctgagaaaatcgggagcggcgcaaacactggttgccagccaacaacgctggacattaatgacagaaacaccggaactccccgaactggatttgcattatcttgccagccgatttgatgcgacttcactggatctgattctggttgaggggttcaaaaatgaagctattgcgaaaatcgccctgtatcgagatggattaaatcacaccttcgaagaactcattgatccctatgtcatcgctgtcgccagcgatattccgctggatacgccactaccacaactcgatattaaccgaccggaacaggtagctgaatttattgtgaagtggcttttattaaccccaccgacgactttcccgctggctcattcacaataaaagaaaactgacccgctaactgaatatagtttcataaaataactatttattctctcaacaacctctgagatttatatcaaagaggttccctattttaattcatatatataatttcttctattaatgtaatttcaaattgaaataattttagccaattgtaatacataccatacagtggtggtcattttattatggaaaataaaaacggcaatattaccgacctcagattacatcatcgaataattctattttttaaaataaaaatatcgataaacaaaaggaaataaaaaataacaaaaggacaaataaaacccaaacagtataaaaacaatcaatcgaattgcttttatattaaataaaaatttcaacttaaataacacgaaacctttcagttacgtgaacactaattatttaggtagaaatacttcgaaccatttaatcaggttatttttcattcttaaagaatgaccattttaattatatatagataaaggaataatgatgatcaagacagataaatatcagccagttggcgacgcaagcgttggctacccacaaatttgtattcgaactaatcgaaccgctgaacgtacgaatgtaacgccaatgatagccgcagctatgtttattgccaaaaacttcccttggagtttgaatgataatgagaaagaagttgtcattaaaggcgtaaataaacatccccgccgcaagcagcggggtatttagatatgaaatcacccgcttcgcatcgttcaattcttatttgttcgtcgcaagcgacggggaattaaaccctgagagattaaagttactgggagttgcctttggtagtggcggttttggccatgcatgggttatttactttaatagtgaaaaagaaggtgataatacttcatatgcttttcatccgggatatggattcgtcaaaaactcagaacatagtacgactgatgattcagccgagagaaaatttcatattcagcattgtgtgaagattaatgacaaatctatcacccctgaatttatagaacagcattttattcctgaattagtcgatgaaagtaatcagttgtcaaaactgatgaaactgacctctgaaaatatgaagaatggtgcgtatacgcctgtaacaaactgctcatggtttgcaggaaaattatggaaccagatcatgcaactggaatttgaacaatctggtgaaagcggtatcaatcagctggaattcgaacaaactattggcaatgatatcaatctggaagaattggcagagcaactgggcctgccatttatcaaggaaattaacggtatcggtgatcctggaatgcttgcagaaagcattaaaaatgtcctgagtatttaacgcagaatttttgctgaatgtcattacaaacaactggcttaattaagccagtgaaaaataaacgccttgatgttatcaccaaggcgttattcccaattcagggtttatttgccttccggcatcaacccaataaacgaggtctttttccgtggttcactcatcagagcttccagtttctcaacacagcgcagataatgtggtgttgttttatgagctgcaacggctgcctcatcaatataggcttcatagatataaaaacgggtcgggatattctcatcctgcaatacgtcaaaccgtaaattgcccggttctctcacagcgccaaggtgattatccctgaatacttcgataaattcggcgatcttgtcggctttgacattaatctcaactaaagtaacgtgcatattattctccctttgctttctcactcaggaacaactcataagcctgagcaggcttttcattttgatgcactaccgcctgaacagctttaagcatggctatcggtgcttctgactggaaaatgttgcgccccatatcgacaccggatgcaccctgatcaatggcctgatagcacatggttaacgcctccagctctggcaacttcttacctccggcaatcacaatcggcaccgggcaaccagccgcaatccgttcaaaaccggtatcaacataataagttttgatgatattcgcgcccatttccgcagcaatgcgggttgccagtgagaagtagcgctgatcacgcgccatatccttaccaacacctgttaccgccatcgtcggcataccataacgtgtgccctgatccaccagcttgataatatttttgatggactgatgttcatactctgaaccaatataaacctgtgccgccacagcacagacattcagccggagcgcatcttccatcgcaacagcaaccgcctcattagaaagctcggtcagcatagagtttgcaccagatgcgcgcagtaccaccggtttattggttgccggcggaacctgactgcgcaaaataccacgtgtacacatcagcacatcggtatgttcaaacagcggagcaatattgatgtcgatacgctccagaccggttgtcggcccctgaaaataaccgtgatcaaacgccagcatcaccgttttattggttgccggattgaaaatccgcgctaaacgcgactgcattccccaatccagcgcgccacaacctttcagttcaaacagcgtattcttttgcggtgtatcaatgccaaaatctttaccgtctttgatatcatctaaatctgccatttttctctccagaaaatagcagagtcaggctgtgtgccgactctgcaaaacatgaatcagaaatcgtattggttgatgttttctttggtaaaaatcacgcgctccggcatcacaacaatgccattgcccttcgcttcaaagttatatccctgaacgctattcggtgaaacctcaagcgtaccgatgtcaggaatagttaatttatcgcccacattcaggtcgccctttttcagaatttcactggcaacatgaatcgctatcttgccctgtttaacgacatcccacagggcaaactgtttgactgtgccgttttcgacataagggcgcatgacattcggtgtgctgaacccgacaatcgccacatccttgcgtttcaggttttccgcagcctgtgccgccgctggcaacgcattagcatcaggggcaataatcacatccaaatcaccccatgctttcaaaatgccttccgcagtctgcaaagacttggtcgcatcgttataaccaaactgcgtggtcacaacttcccagtcaggatgttctgcggtaattttgtccttggcttctttcacccactggttttgatctgtcactgtggggctggagtaaaaaaacgccactttcatttttccctgtttctccgctttttcttttttcacctgactggcggccatttccactaataacccacccaactgttttggtgttccctgatcgatatagatggaacggcattctggtgcagtgtctgaatcccacgtcagtacttttacaccacgctgcatagcccgtttcaatgccggacacagaccatccggtgatactgccgacacgataattgcgttatatccctgattcacaaaattattgataagctgtacctgccccgccacacttggctcggtcgggccatcataagtgacatcaatccccagcgccttacccgctgccactgctccctgcccaccgctggtaaagaacccgacaccgaccagcttcggaataaacgcaatcctgtcagcagcctgtgcccaggaagcactggccagactcaatacacctgctaaaaccagttttttcattgccgattttttcattatcagtgctttcatgcctgtctccgctcttttctctttcagttcaggaaccgttttctatttaagaaatcattcaggagtagctcattaaaaagctgatgaccgccaacgctgccaccactcccggatttgatggcgatgcagagaaacagaacgcccgaccaccaccacgatgagcaaagcgccggataaggcgctggatatctgactcgggatccccatcatctgcaatccctgctgcaaatatcccaccagcagaacagccagtgctgtgccgataacagaaccggagccaccatagatattagctccacctaaaactgccgcagtaatggctggcatcaggaacgaactccccagatctgagcgggctgagccaaaataggacaccagaatgatcgcagccagagccgaagacaaacccaacaggacatacagcagacacagtgttttattgacaggaaccgccgcataacgggcgacacggtgattcatcccaatcagaaaaacgttgcgtccccgatgagtgcgatgcataaacaaccagaacccgatgacgcaaaaaataaaaacaactaacgggatgggtagtttaagtagtgtcagattggcaaaatcagtaaattcagccggaaaacctccaatgccctcataacctgtcgcaccggataaccccgacagtaataacgcgctcccgccaaacaggtacatggttccgagggtaataaccagcggattcacaccggtatagaaaatcagcccgtagttaatcagaccacatatcattcccacaatcagggtcaaaggaagtgcggctatcatcggcattccggactgattcattatccccagtgcaatagcacataagccgataatagcgccaaacgaaatatcaattccgccactgacaatcaccatcgtcagcggcagagcaacaataccaatacagataaaatcactggtactgaacaacaacacattgatatccagcatacgtggattggctatgccaaataacagaatctccagtaccagcaaaatagcgagggcggtttcccatccatgacgtttaatcgcacttatcatgatgttctcctgcctgcttccgatgaatgggctacaggttcatcagcaggtttaagaaagctggcataacgttgctgacgtaagttcttttcaacggcgctgcgcaaccggccatcaagcaccaacaccagcagtaaaaccaaaccggcaataaaatcgttccaccatgctggcaaccggagtaataccaacacactgtcgatttgagtcaggaagtaagctccgaaaatcgcccctatcacggttcccacgccgcccagcaaactaataccacccaacacacaagcagcaattgctttcatttccagcccgcttcccgtctgattcggaataaatccaatctgagccacaaagacaatgccagccagtgctgccatcacaccatttgcggcaaacgcagcaatacgaatgcgattcaccggcacaccgatctgtcgcgccccttgcagattgtcaccagtagcataaaatccgcgaccaaaattcgtgactttcagcatccacgtcattgccaaaaccagtaagatcaacaaccagccgatgaacgagatgcccaataaaacaggtctggcgagttctttcacatcagcaggcaggccctcgatccatttcccgcctgtcagcagtagcatcagaccccgatataaccccagtgtacctaacgtggcaacaatggccggaattttcagccagaccaccagcacaccatttaccagccccgcggccatacccgccaagagtgttataaggcaggctatcggcaggggaaaaccggcattgagtgacatacccagcaccacagcacataaaccggtggtcgaaccgacagagacatcaatattacgcgtgagcatcaccagcgcagcgcccattgccagcaacatcaggatttgcgcattcgaaaaaatcatggtgacagtctggaaactaaaaacatcgtgttccagacttcttaacagggcaaacaaacctaaaatagcgatcaatgcagtggcttcacgattgttctgaataaaggtctgaatgaatttcaacatagcgccctctcaccaaacgaaagatgcataatggcatccacactcatattggatttatcaaggtggccacagatttctccgtgatgcatcaccagcgccctgtcagcgagctgcacaatttcatcaagatcagaggagataagcagaatcgccacctgctggctggcaatactgcggatcaactgataaatatcagtacgcgcaccaacatcaacaccccgtgtcggttcatcaataatcaaaacagcgggtttcgcctccagacatttcgcaatcaaaatcttctgctgattcccgccagacaaagtacgtaccggctgactggcatggctgtaacgaatgttgagtgcccggcgataacgctcaagcacagcggcatcataggcaggacgagtccagaaagcgttctggttgtgagtcagtgagcacacattccagctcagggaagcatcaaggaataaccccgacgcctgccgatcttccggcagataaaccagaccacgccgtaaccgggctgcggtattcaacgaattaagtacctgctgacgtaaacggatttcgccactcaccacaggccgcaatccatataacgtttccgccagctccgtacgccctgcccctacaacacccgccagaccgacaatctctccggctttcagtgtcagggaaatatcccggaaaccttcaccacacaaagcagtcacttcaagcatcggatcagcgtgatcacctgcggactgacgatttccggcatccaaccataacttctgcgtttttgttaatacagaatcttttgccgtgggcgtgattgcctgaataatggtttctgttgaaaagcccgccattgcaccgctgagagcaatcatgccatcccgcatcacactgacataatcagcaatctgacgaatttcagggattttatgggaaataaaaatgatcccaacctgttgctgctgtaactcccgtatccgctcaaacaaccgttctgtttcggcgggtgtcagggaggctgtcggttcatcaaggatcaaaatacgggaattgcgcatcaggccacgcatgatttccaccatctgctgatccgccacatccagacttcctgctggcgcactcaggtttaaccggcagttcagctgtgtcagcaattgctgcatccagcttttactggctaggtgcttaggcaggcgaaacagaatattttcctgaacagaaaggctggggaataacaaaggttcctgcggtaccagataaatgcccaattggtgtgctttagccggagtcaactgactaatggtgttcccttccatcatcagcgtccctgcatccggctgctcaaggcccgcaatgatcttcatcagtgttgatttacctgctccatttccccccagtaaggcatgaacctgccctgccatcagagtgaaatcaatctgcttcaacacggctaaaccggaaaactgtttaacgatcccccgaacagacaatagcggtaacataggtaatgtattagcggcttgtttttgtaacgaatgtttttgtgacgaatcctgttgtgatggatgcctttgcaataaatgagtttgcaatgaatcattggcggaattgctttgtgacatcatgctacctcagggtgtttatgattttgtggctttccgtcccaattctgacactgactccgatactcaacatgaacatttataagattaaaaatcttttgttcatgactctaattcatattatgaaatatttgcaaaattttgatcacattttatgaaaaaattagatcttcattaagatatgttcaatttttgtggaatacctctggcacgacagaggctttcatgcttaattctttttcagggaataaataagttgttatgacaatcaaaccaaacaagaaaaaatcagcatcagaaaaaaacgtgtcatccgaggatcttcattattcgggtaatggctataccagccatagctattcagaaaatagttatccagaaaacagcgtttcaggaaacaacatgagtgaagaagaactactggcccgggttacctggttttactatcacgatggcctgacacagggagacatcggtgaactgcttggcctgagccggcttaaagtctcccgtttgctggaaaaagggcggagatccggtgtgatccacgttcagataaactcgcgctatgagggttgtctggagctggaagatgctctgaaaaaacgttttaatctgaataaagtacgtgttcttcccgcccttgaaggcattaacctgaatacccggttaggtaccggagctgcccatctactgatgtcactgattggaccccgccagcttctggcgatcggttttggtgaagctcccatgtgcactttacagcatctgagcggttttatttcctcccaacaggtgcgtctggtgacgctgtccggtggtgttggcccttatatgaccggtatcggccagcttgatgcagactgccctgtcagcatcattcctgcaccacttcgggcatcaacccggcaggttgccacaacattccgtgaagaacgcagtgtgcgggatgtcatactgactgcctgtgcagctgatatcgccgttgtcggcattggtgccatcaatcagaggcaacaggcgactattatgcgttccggttatatcagcaatggtgaacaactaatgttcgggcgcaaaggtgctgttggcgatatcctcggttactttttcaatgctgaaggtgaattgatcagtgatatcgatattcatcaggaactgatcggtctctcactaccagagctgaaaacgataccaaacgtgattggtgtcgctggtggaattgaaaaagccgatgccatcgttgcggcgctaaaaggcggctatattaattcactggtcacggaagaaaagaccgcaagggcgatgctgatgtgattgtctaatatacacaatggatttcaaggaatatcacggcggcaaaggaatgcagccaacaaagaggtaacttgaaaagacgaagagtataaattccccgtgccatatcgtagtccttaatcaacaaccagcaggctaatgagataacgacaaacgaggatagcatcatgaaccaacgcactcacgcccactcatcagggaattatctgatggcgcttgatgcaggaacaggcagtatacgagcagtcatatttgatctggaaggtaatcaaatctctgtcgggcagtcagaatgggttcaccagcctgtaccgaatgttgcaggctcaatggaatttgatctgcaaaccaactggcaacttacctgccaatgtatccgtcaggccttacaaaaggctgaactaccagccagtgcaattcagggagttgctgcctgctcaatgcgggaagggatcgtcctgtacaatcggaacggcgatcccatatgggcatgtgccaacgttgatgcccgttccagtcatgaagtcagtgaactgaaagagctgtacaataatacgtttgaatatgatgtttatcgctattcaggtcagacattagcgctgggagcaatgccccgcttattgtggcttgcccaccaccgtgctgacatttatcggcaagccagtacgttaacgatgatcagtgactggctggcctatatgctaagtggtgaactggccgttgatccttccaacgcaggcacaaccggcatgttggatttagtgagccgcgactggcgccccagtctgctggaaatggccggattgcgttctgatattctctctccggttaaagaaacaggcacattactcggatacgtaacaaacaaagcagcagcagagtgtggtctcgacagcggaacgccggtcattatggggggtggagatgttcagctcggttgccttggtattggcgttgtcaggcctgctcagaccgcagtgcttggcggcacattctggcagcaggtcgttaacctgccggaaccgatgaccgaccccaacatgaacatccgtattaatccccacgtcatccccggcatggcacaggcagaatctatcagcttcttcaccggccttaccatgcgctggttccgcgatgctttctgtgccgaagaaaaactgatggcagagcggctgggtattgatgcctacgctctgctggaagagatggcggcacgggttcccgccggatcatatggtgtgatgccaatcttttctgatgtcatgcgctttaaatcttggtatcacgctgcgccttcctttctcaacctgtcgattgatccggaaaaatgcaacaaagccaccctattcagggcattggaagaaaacgcggctatcgtctcagcctgtaatctggatatcgttgcgacattctccggtgttcagcctgattctctggtttttgctggtggtggctcaaaaggcaaactctggagccagatcctctccgatgtcaccgggttgccggtcagagttcctgtcgttaaagaagctacggcgctgggatgtgctatcgccgctggtgttggggtttcactgtatgactccatgccggaaacgggagaaagattagtgcgctgggagcgggaatatctgccgaactcaggccaatgggatgtttatcaaaaagcaaaaaaagattggcaggcggtgtatgctgatcaacttcacctcgtcgatgatgggctgacaacttcgttgtggaaagcgccgggtttgtgatttttttgttgagtggcctcttattaatcagaggccagaatagacacgatgatctttagtcttcaaccgcattcatcacaatttcaggtacagtcgggcgcccatttactaaacaagtcgcgacaaacgtcgcatcagcatacacaacgccatcaaccaaaatttgctgctcaaaattaatccggttacgcttttcatttctggcgactttgcaggtcacctccatcttatgccctttctggaggctttttctaaagcgcagaccatattcaataatgacgtgcatccgcccggctttgaattcttcttctaaatccagacctaacgcttctttcataaacgcatgccgggtccattccagatagaacggataataaagcccatcaacaacaccttgaaaatcaacgtgctgatcgtctactaaatactctttagaaaacatcacagatccttaaaataatttaacagagcaaatctcatcggaaaaagtaagtcttattttattgaagacattatttatattatttctgggaatattatctcatacaactgtgtatccatctcctatcatttttattttttgtaataggagtaccaaatttcaaattaattaataaaccgccctgataataaagttaattgataaattaaataataaataaaaacacgcctgtggatatttccacaggcgttcctggtgttgggtaataaaataaaccttaattttaattataaattcacgcagttggttattatgttatttaccgcgccatttaattgaatcaatattattgaataatggaattaactaattgattaaaacactactaaacttttatgctatttatcatttccttatgtaactgaataacttgttcacaaaattctattgaattgatgtggtgtggactaaaaataagctttcgtttttccgttattttataattagttgagaatgactggatgaaagcattattagcatctggagaccagaaaactccaccttcaatatctaaagcagaaaaaccacctgttggaataataaaacgaatctccccttcacaacggttaagtttttcagcaatccacatccctaatcgatgattctcttctcgagtcgtcctcatcaatgttacctgtgcgttatgatgataaagttgacgatttttatatttttcaggtattgtcgaggagtgtccaaaattaaccatgtctagtgcaccacaagatataacacatggcgtttttgtctgagcaatactatcaaaacgatcttcatcacaagccaaaacaccaccaaaaagataattgcatacctcagaaatggtaatatccagcacagagtgtaataaattactgtctaccagcttttccattgctttgccgccactcccggtggcgtgaaataccagacaatcataatcgctctctaatttggcagtaatttgctggacacaatgtgttgttactccaaacatagttaacgctactgctggtttctgctgtaaatatatatcttcttgatcattaaaataaactgatccagcaatctgatgagccgcatttctcaagatctttcgagaaataaagtttaggccagaaacatcagtaactgaatacatcatagagatgtcacttaccccgatataacctgagatgttacccgatgccatcgttgaaaccataagttttggtaaacctataggcaaagactgcattgcaaaggtaatcaacgctgtaccgccagagccgcctaacccgagaatcgcagcaatatcggtttgttgctgtaaataattacgaaaagcaattgccattgccgcaatagcttctcctctatcactacaaaatacggcttgtttcccatcaggatgacaatctgcaattatctctgaatgaacatcggcctcattaactaactgattaggctttgttgttaaatcaacaacacggacaacaaggccgattttttttattagttcacttacataaaaaacttctgtacttttagtatccaatgttgcggcaatatagacaaatccttgatactttttcataagaagacctttactcgccacaactcatgatgtaaaaagcaagaaactattttttgtgagactacagtatcatttatcaaccatatataatgagactagagtctcattttaaaattcatctaatcaataaaggcaagaaagatcacggggtaaataaaaacatcattataaaacagataattaaataaataacaaaaaataataaccaattaaaaaataaaataatttaattttaaaagggctcagtgatgctgcctattcacacatttccgaactatacaggtactcgtaagcgtacttatcaattactcattaacactgctctgactctatttgagcaagggataatgccgtcaatatcagaactggctttaaaagcaggcgtttcccgagcaacagcataccgttatttcccgacacaaagtgatctgattgctgctactgtcaatactagcttagggccaattcttacctggcaacctaaaagtgaaaaaacagaagagcgaatagctgaattaatggatttcgcttatcctcgaatgtttgaatatgaggtagcacttcgagctgcattgcaagtgtcattgcaacaatggatagaaaggcgctctttatcttctaagcccagagaaaaacaattggaaagagggaaccgaaaagaaactttatcaatggtaacatttccgatgaaaaactcatttgctcctgaaattattgataaggtaataaaatctttttccattgtttatggatcagagatttttttagtattgaaagatatttggaagattaataatgaacaagttattgaaatagcaaaatggatggcaaaagccattatgaatcaagcaattgaagataataaaaacaaagaaaaataagatattccatccactaataaatagataaaaaatcagtcatgatggaattattctcagggataacatccatcttagccaaagactaagatggaatgtctttttgtccaaataccatatatgcagtatattctacatattatggcatccacacaattatctcatcgtaacaaactcttccgccgcagtcggatggatagccactgtattatcaaagtcttttttcgtcgcacccattttcaaggcaacggcaaagccttgcaggatttcatccataccaaagcctattccatgaataccgacaatcttctcattttcaccagcacaaaccagtttcatacggcatggctgacggtgctgcgtcactgcggtatacattgcggtaaaggacgaagtataaactttaacctgatcatcaccgtattgcgcttttgcctgtggctccgtcaggccgattgtaccgattggcggatggctgaaaaccactgttggcacattagtataatccagatgttcatccggcttattattaaacagacgctctgataaacgacgacctgccgctaccgcaacgggtgtcagctccacagcacctgtattatcgcccacagcataaataccttttacattggtattctgatacttatcaacctgaatatagcctgattcattcaatgccacaccagcagcggacaaattcagattatctgtcgcaggctcgcgcccaatcgcccaaatcagagtatcaaccgtctgttctctgccatcctgtaatttcagagtcaggctgccatcagcattttttatcacagcctttggtacagcttccgtatgcagagtcggcccttcattgttgataacttccagcaatgtatttacgatcagcggatcaaaggaacgtaatggtgcatgtttacgtacaaacaggtgcgtttcgctacctaatgcattcaaaactccggcaatttccaccgcaatataaccagcacctacgacagcaacacgcttaggcatttcatccagctcaaagaagccatcagagtcaataccatattccgcaccgggaatagccgggtttttaggacggccaccggtcgcaatcaatatatgatctgcggtaattatttcgccgttcacttcaacagtctttgcatcaacaaaacgtgcgaagccctgaataacatcaacattattgttacccagcacacgctcatatgaagaatggatacggtcaatataggatgtacggctggcaatcagttttttccagtcaaagcgattgatagtggcatcaaaaccataatcagagccatattgatgaatagattccgcaatctgggcagcatgccacatcactttcttcggtacgcaacccacattaacacatgttccacccagtgcttttgcttcaatcagggcacatttctgcccatacatggccgcacggttaatggaggcaataccaccgctgccgccaccaattgcaatataatcgtaatgtttactcatcttaggcacttccgtctaatcaattaacctactgactacaatttaatcgtaacgtatattatgacaaaaagttatcactatgcatgatgattgtggctttcgttgtcataggctagagctatcaaattgatgctccatgctgcaatatcacgctggaaaatagtcttattccggtacaatccactctactgagttatgccctgtgccttcagggatcagtacctgctgtagccaaggcagcacagctttcatctgctgttccagcttccacggcggattgatcacaatcatgccggatgctgtcataccgcgttgatcactatccggacgcacgccaagctcaatctgcaaaattttgcggatcccggttttttccaaatctttaactaaacgcttaatctgctggcggagcacaaccggataccacaacgcataagtacctgtcgcaaaacgtttgtacccttccagaattcccttaaccacattctgataatccgatttcagctcataaggagggtctatcagcaccaatccacggcgagttttaggaggtaattttgatttcagctgttgatagccatcttcacgcagaacgcgggcgcgtctgtcacgggagaactcactacgcaataaaggaaaatcacttggatgcagttcactcaggttaagttcatcatattcgcgcaataaatgacgggcaattaatggagaaccggggtaataacgcaaaacaccatgctggttcagggcctttacaactttcatatagcctgataattcttgaggaatatcatcacgctgccaaatacgggcaatcccttccagatactcgccagtacgttcagcatgttcgccactgagctgataacggcctgcgcctgcgtgggtatccagataaaggaaaggcttctctttttccttaagtgactcaatgataaggctttggacagtgtgttttaacacatcagcatggttgcctgcatggaagctgtgacgataacttagcattcgattttcaaaccccgggagagaaatattgataacttgcctgatggctgatcagacaacaaaaaagcattatgcctcattctcgcgaaaaaagataaacgcctccattttgcccctcgtcaattgtaactgacgtctaattttcaggaacaaataccgatcagcatataaaattttgaataagcatttcaaatcagactaggaatagttcatgaagtcgaaaactatgatcttggctgtattagtcgttttcagtatgaatattgcctatgcaaaaccaactaaagcggggtgcggaaacaaacagaaaacattagagaaacagctccaatatgccaaaaatgatatggatgaaagattaattgccgggttaaccagaacactggaaagcctgaattcagcctgcgagtgggaaaaacgcctgaaagttgcacaagagcaacgttccaaaccgaaaaataatccaacttctgctcagccattacctcaaaaaagttcacaagcccgttcagaacaaaaagcaaaaaagaagatgaaaaaagtgcaggccaaaaagaagaagtagacctgcactaaagcaccaaccaataaccggatatatacttacaagtttttctctttcacttgctgtgcattagaaggagatagcttatagtaaactttatcgtcatctatgagtggtttattctcaatcttcattgagaggatcgcattatctttggagatcgcataatagttgaaataattttctttaccatcataaggatactgaaagtctggtttcaatagttttttttcataagatcttatatagggatcatattcatcttcataaactacctgtttgtttctgacaaaaataatcttataaaaaagactagctttccctttaaatgcagcgccaataatatcctcaatatccttatgccccatccctttatcaataatatacattttatcccaatcaaaagggacgattttattcatatcaatcagacaatccgtgtttttctggcaatgtctatcggcataatcgataatacccaatttactgttattatatgataaagaaaaaaagaaaacgacaacacccaatattaacgaaagtgcaacaatattatttttgttgataacgtggaaaagcatcattcccccttcataaccaaatcagatatgagaaaacggtttttaaattcctattttgataatcaaccagttaaatctatatataaatctcatcgtagtattacaattccataattaatctcatttaccgataaaagtagtaaaaacattcctacctgctctcaatcagcagctttatttagtaaacacataatgatgttatgaggatctaactttatttgtggatatggctccacatcactcatagtaagcgactacgccacattgctatttcatgttttcactgaggatttataaagtaaccaacctctttttttattattttcagcataaaaagcactatgcagggggtgctttatgcaaggaaatagtatattaagtttactgacaattttttaggtttcaaatagaaaaatttgataaacaaatcgtaaatgagacgaattgtcgctaatataatttagtggcaacccttaatcaattaatttcattgcatttttttaattataaaaaaccaataaaccattatataaaatagaagcaataagtaacgtcactaattaaactggtgatatttccaatatacattaactatcatagttaataacactaagaatcaataattaaatacaccattctcagaaaaaatcagcttcccattttttgaaatatacaaaacaccttgctggtaaatggtatatgtcatatttttatgcttaaaaatatatccatagaaagaacagctccctgtgtcacaatctctattcatagtgtgtccttttattgtcagtgaagtatggtctttcttatttgttataacagactccacatcctcgcaacttacatatccttcagggcaaaaactataaatagcaacgtgataagtctttgtctcaaaaatagttgcatcatctgaaaatgatacctgtgaaaatatgaagagcataaaagctaacagtatttttttcatcattgtcgtcgccccttaatagtcagtttttaattcagccatcatatatcgtgattagttatttggtttcttatttttctgacataatcaataatctcatgggcggtcagacctatcggaccgatcccatccgcaaccagcatatcagccgctttaccatgtaaccaaacccctgctcgtaccgcttcctcaaatggaataccctgagccagcagactaccgataataccggaaagtacatccccactaccagcggtcgccaagccactattacctgtttcatttatccacgttcgcccatccggtgcagcaattacggtacgatgacctttaagtaccgcccagcaaccatatcgggcactcaaggcctgtgctgaacccagcctgtcagactggatagactgagagtctgtctgtaacaatcttgatgcttctttcgcatgaggagtgataacagttttgtccgaaagcacaattttgcttggaaattttgccaaaatatttaaaccatcagcatcaaccagtactttttcaccttgatgggtatagttgatcattttctgtataaaactaaccgcctcagtagaagtacctagcccacaaccaattacccacgcagatggaagctcgccttcaaaaagctggctggctttattcaatatcaattccggtacagtatctatcagttggacagcaagaggatcctgattaaaaccgataataaccttcccacacccgctctttaacgcagctgtacccgcaagaacacaggcgccactcatagtttcagccccgccgataatattcagagtcccgaaagtacctttatgactatcttcaggcctgggtaatgttagcgttggaaaccagtcagatacttgctttttttcatcctgagttatcattcttgcacctctcaattttatgttcgcttgttgcctctcgacccaatgtaattgtatgaacaagtaactcgtgttatccgctatttttaatgagtgaaatgtgattgatatctgtttttcagtgggaaacagaataccttttgtctgatgtgctgggtttggggaaatgttttatgagtgaaacgcagggaaaaagctagaaatgtgtccgaaacttcttgaccatatatggacagtcatgctcccaatagttagatctgttatgaaatatagtattcacgctcaatgagcgtccctaccactttgtcatgcatctcttcggatttggaataacctattgtctttctattcagcctctttatccggatacgaagcgtaagatttgttctctcaatacgttgggtaaatttctttcccgtgaggtgtttttctttaggcagacaatcgtaaacggcataatcatctgtacagtaaaaccggatagtaaaaggagacaagagagccagcagctttttcaacgttttcctgctgcgatccccaaacacatgtgccactacccgtttcctattcggctcccaggcataccagagccagcgttgattgttcttattaccgacaaatgaccattgttcgtctatttcacagataatatgaatctcactgcccgccagcggcagcgtagttacttgtcttggtgtgagttttttaatgtgcgaatgacggtgttaataccgactttcagaacccgagccgtgtccctgacaccggcgttattcatcgccatatcaataattcgctctttcataccgggatggcaggcttgataggtatagtgcagttggaaggttttgcgacaggcatagcagtgatagcgaggatgtccagtactacttttccatgctttacagcaaa

SEQ ID NO: 488 - DNA, 46407 bp, Xenorhabdus sp.; identical to SEQ ID NO: 285
  CDS (16937)..(17626)

SEQ ID NO: 489 - DNA, 24270 bp, Xenorhabdus sp.; identical to SEQ ID NO: 302
  CDS (6209)..(6781)

SEQ ID NO: 490 - DNA, 698 bp, Xenorhabdus sp.
  CDS (233)..(514)
  unsure (1)..(698): unsure at all n locations
nnnnnnnnnnnncattcaccgcaacatcctcgccgtcaccggcccgatcctcaagttccagcccgaaaccgtcgatcaccttgccgaatgctgctcacgcctcgtcaatggcgcggaaacgccgggagccgcctccgccgttgcctatgaggcggcgatgacgctttatgacgatgtcttcggctcgcacccgtctttcggcggtgaatatcgtaccctgcaacaggtgttgagctatatagacagccacctcggcgagcggctttcggtcagcgatcttgcggcggtggccggcctcagccgcgcgcatttttcccgcatcttcacggcgagcgaaggcctgccgccggctgaattcgtgctgcagcggcgattgcggcgggcggcaaaactgctgaccacggccgggaatattcccgtcaaggaagtgtccgtactgtgcggtttcgaggacccgaactatttttccaaggtctttcgcaggctctatggcaccaaccccagcgaatttcgcaccaccggcatgtatgcgagcgtccggcaggacggaagctgaaaaaacaacttccttttgccacgtttcaggcgattaagaatggacggaacaacctctttggagaccggctgaggtgaacagcaaaatccgcacgatcctcgtctttccaatcagggcaatcatttaaaggacgnnnnnnnnn

SEQ ID NO: 491 - DNA, 723 bp, Xenorhabdus sp.
  CDS (70)..(723)
  unsure (1)..(723): unsure at all n locations
nnnnnnnnnnnnnnnnnnnnnnnnnnnnnnnnnncgacgctgcgttctatcagtgagacgatggatgatttgaatgatctttattatttcgtgcaggtggtggaccacggcggttttgccgcggccggccgcgccatcggcctgcagaaatccaagctcagccgccgtatcacgctgctggaggcgcggctgggcgttcgcctgatccagcgttcctcacgccgtttctccgttaccgatatcgggcaggaatattatcgtcgctgcctggctgttctggtcgaggcggaggccgcgaatgcgttgattgcgcagcatcacgacgaaccccggggccttttgcgggtaagctgccccactgcgctgatctcattccagtttggcgccctgttcgccaaatttctcaccgcctatcccaaggttgacctgcatctggagagcaccaatcgccgggtggatgtgatcggtgaacggttcgacgtttccattcgcgtgcgttttccgccgctggaacaggcccatctgatgatgccgaaactggannnnnnnnnnnnnnnnnnnnnnnnnnnnnnnnnnnnnnnnnnnnnnnnnnnnnnnnnnnnnnnnnnnnnnnnnnnnnnnnnnnnnnnnnnnnnnnnnnnnnnnnnnnnnnnnnnnnnnnnnnnnnnnnnnnnnnnnnnnnnnnnnnnnnnnnnnnnnnnnnnnnnnnnnnnnnnnnnnnnn

SEQ ID NO: 492 - DNA, 1008 bp, Xenorhabdus sp.
  CDS (621)..(1007)
  unsure (1)..(1008): unsure at all n locations
nnnnnnnnnnnnnnnnnnnnnnnnnnnnnnnnnnnnnnnnnnnnnnnnnnnnnnnnnnnnnnnnnnnnnnnnnnnnnnnnnnnnnnnnnnnnnnnnnnnnnnnnnnnnnnnnnnnnnnnnnnnnnnnnnnnnnnnnnnnnnnnnnnnnnnnnnnnnnnnnnnnnnnnnnnnnnnnnnnnnnnnnnnnnnnnnnnnnnnnnnnnnnnnnnnnnnnnnnnnnnnnnnnnnnnnnnnnnnnnnnnnnnnnnnnnnnnnnnnnnnnnnnnnnnnnnnnnnnnnnnnnnnnnnnnnnnnnnnnnnnnncatgatcgtcgatggaatagggagcgcctccgacatccgaaagcccgtggccccgcttgtcgtgcaggacataggcataatcatcgccaagcgcttcggtgaccgcatcccagatgcggaaatcgctgccgagcgaattgatgaaggcgatgaccggcttgccgctgtccaatcccttgacgcgataatggatcacggtctcgccgcagcgcagaaaatgcatgatgtgctcctcctgcccgggatattgcaagccggttccggttaagtaaaatgacattatcgatgaaaatcataacctgtggattatacaagcgatggtcgaccagcgtatcaagttccgccacctgcagactttcgtggaggtggcgcggcagaaaagcgtcatccgcgccgccgaaatcctgcatgtcagccagccggcggtgacgaagaccatccgcgagctggaagagattcttggcgtctcgctgttcgaccgggaagggcgcggcatccgcatcagccgttatggcgaggtctttctgcgtcatgccggcgcgacgatgacggcgctgcgacaggcggtcgattcggtttcgcaggaggcggcgcgggccggtccgccggtgcgggtcggcgctctgcccacggtttcggtgcggatcatgccgcaggcgactttagagcacatggctcgagcnnnnnnnnnnnnnnnnnnnnnnn

SEQ ID NO: 493 - DNA, 980 bp, Xenorhabdus sp.
  CDS (419)..(643)
  unsure (1)..(980): unsure at all n locations
nnnnnnnccccccttggttgatgtgctctaaagctttacagccggatcggaaaagaactcgtctacgttgcctgcaccctgaatggcttcaatgttgaccacggtcagaccgtcagtgctcttggcgagattgctccagagaaaccccggctttctctccgccacgtaatggaccacgtcctgaatgatttgaaacgcttcatcctgcttgcccggatgggcatgaatgacgttgacgataaaagtggttggctccggagaggcggcaaatccggcggcgaacttcgtatccatgtgtcttcctctgatgaaaatcggcattggctgccgtgacaggctggatatcggctgcgcgatacgcgataaatggtctggtattccgataagagcggaaaattattccttaatagggatggacatggacaagcttggtacgctgggtattttcgttcaggcggcagaaggcggcagctttgtcgcggcctctcagcgactgggtctctccagttctgcggttggcaaggcaatcgcgcgtcttgagcaagagatgggggggcgtcttttccatcgctcgacgcgcagcatgacgctgacggaggaaggcagcttttttctcgatacctgccgacgtattctgtctgaacnnnnnnnnnnnnnnnnnnnnnnnnnnnnnnnnnnnnnnnnnnnnnnnnnnnnnnnnnnnnnnnnnnnnnnnnnnnnnnnnnnnnnnnnnnnnnnnnnnnnnnnnnnnnnnnnnnnnnnnnnnnnnnnnnnnnnnnnnnnnnnnnnnnnnnnnnnnnnnnnnnnnnnnnnnnnnnnnnnnnnnnnnnnnnnnnnnnnnnnnnnnnnnnnnnnnnnnnnnnnnnnnnnnnnnnnnnnnnnnnnnnnnnnnnnnnnnnnnnnnnnnnnnnnnnnnnnnnnnnnnnnnnnnnnnnnnnnnnnnnnnnnnnnnnnnnnnnnnnnnnnnnnnnnnnnnnnnn

SEQ ID NO: 494 - DNA, 730 bp, Xenorhabdus sp.
  CDS (21)..(470)
  unsure (1)..(730): unsure at all n locations
ngcagctggccaagattgccgatggcaacctggatttcgccttcatccgcccgccagcccctatccccgaaggggtcacgacccatgtggttctgcgagagccgctgatggcggccctgccggaaaatcatcccctggcctacacattgcaggtcgatctcaggaaccttgccggcgaaaccttcatcacgccacgacagccgccggatgtcggctttcattacaatacgatagaagcctgcaacgaagccgggttccagccggcgataagcccggaaggccgcgactacaccaccatcgccagcatggtggcgatcggcctcggcgtcgcgctggtgccacgctcgctcgattgcctgaggctgcccggcttgcgctacgtgccgcttgctgcaagctccacaacctcggatctcgccatcgcccaccggaaaacggaagcctctcccgccgtcagggccttcattctccacacccgcagctgaggcggatggcattcatctcccaccccaccccgctctcggacgtggatacaaaatccgccatatccgacggaataacggtaatggcgatgcggccggtaaagccaaccgcatgagattgcagagggaacgccggtgtttcggaaagccggatgcggaaataaaggccaacctcacatatatcgttcccgcttttccccgcagatcccgctttggagcnnnnnnnnnnnnnnnnnnnnnnnnnnnnn

SEQ ID NO: 495 - DNA, 787 bp, Xenorhabdus sp.; identical to SEQ ID NO: 144
  CDS (3)..(158)

SEQ ID NO: 496 - DNA, 944 bp, Xenorhabdus sp.
  CDS (3)..(944)
aaattggtaaacagcttgatctatatcatatgcaggaagaagcgccgggtatggctttctggcacaatgatggctggacaattttccgtgaactagaaacgtttgttcgtgtcaagttaaaagagtacgaatatcaggaagtgaaaggcccatttatgatggaccgcatcctgtgggaaaaaactggacactgggaaaactataaagaaaatatgttcaccacttcgtcggaaaaccgtgaatactgcgtaaaaccgatgaattgcccggggcacgtccagatctttaaccaggggctaaaatcctatcgtgatttaccgctgcgtatggctgaatttggtagctgtcatcgtaatgagccttcaggtgctctgcatggcttgatgcgagtccgtggctttactcaggatgatgcgcatattttctgtactgaagatcaaattcttcaggaagtcagtagctgcatcaaaatgatttatgatgtatatggtacatttggttttgagaagatagttgttaaactatcgactcgcccggaaaaaagaattggtactgataaacagtgggatgaagcagaagcagatctcgctgaggccttgaaaacaaatggtattgaatttgagtaccagccgggtgaaggtgcattttatggacctaaaattgaatttactttgtatgattgtttggatcgagcgtggcaatgtggtactgtgcagctcgatttttcattgccggcgcgtttgagtgcgtcgtatgtcggtgaaaataacgaacgtaaggttcctgtaatgatccaccgagctgttctgggttcccttgaacgcttcattggtatcctgacagaagaatatgccgggtttttcccgacatggctggcacctcaacaggtggttgtcatgaatattaccgatggtcagtcagattatgtacaggaattctttaaa

SEQ ID NO: 497 - DNA, 1129 bp, Xenorhabdus sp.
  CDS (300)..(1127)
gtcctctaaagtaagaagcataaccgccaacatcggatctacttttattggtatcgcgggcaaatgatttggggattaactgcctcaattatttatcggctggctcaacaagtccaaaattagagctaaaaataaccactaacaaacattatttgaacatttattgtccgaaatcataccaataactattataattaaaaaaaaactgtaaactcctttatcaacaccactaaataacagtaaagtaacgcgctttattataaatatactatatctctttcttctttaaggagtctggcgtgattagcgttttcgacatgtttaaggtgggtatcggcccatccagctctcatactgttggtcctatgaaagcaggaaaacaatttgtcgatgatcttgtaaaccaggggcttatgtcctctatcacgcgtgtagctgttgatgtatacggctcactttcattaaccgggaaaggtcatcatacggatatcgccattatcatggggttggccggtaatatgcctgcaactgttgatattgattcaatccctggttttattcgtgatgttgagcaaactcaacgtttgccgctggcaaatggtttacatatagtcgatttccctcgtgacggaggcatgaatttccggagcgataacctttcattacatgaaaatggcatgcaaatccatgcatttgcaggtgacgaaaatgtttacagcaaaacctactactctatcggtggtggttttattgttgatgaagaacatttcggtaagccatctcaggatacaaagcctgtttcttacccattcagctctgctgctgaattgctgattaattgcagcaaaacaggcctgtccctttccggcctgatgatgaaaaatgagctggatttacatagcaaagaagaaattgctgaatactttgctgatgtatgggataccatgcaggcctgtattgaacgaggcctgaatacagaaggcgttttaccgggccctctgcgagtaccgcgacgtgctgcggctttgcatcgtatgctgacatcatcaaacaaactttcaaatgacccgatgaacgttgttgatttaatcaacatgtttgctttggccgtcaatgaaaaaaatgccgc

SEQ ID NO: 498 - DNA, 737 bp, Xenorhabdus sp.
  CDS (1)..(735)
caactgaatcgcccgggattaagtgccgcggtctttgccggcaccgggataggcattctggtcagtggagtgctggcggtagggattcaatcgtggggtatggatgcggctcaggcatgggttatttatggcattctggcgttattgtgcagtgtttatgccagtcgctatttaccacgccggggagaattgcatcgttcacaaattgcaacacaaaaacttgctttaacgcctgaaattaagcggctggtatggagttacacccttgccggatttggttatattctacccgccacatttctttctcaaatggcttcagaacgtttccccggtagcttgtttgcacagtttgtctggccgatattcggaggagcgtcagtcatcggtattgcgatgggaattctgctgcgtcatgtctcaacagctcaaattcgtctggctatcacactctggcttcaggcactgggtatattggtagcagaagttgtacccgggattagtggccttgttatcggcgcatttctggtgggaggcggttttatgtgtgtggtgcagctggcattgctgtatgggcgtgagctggctcccagtcatactcattatatggccgggctattaaccaccggttatgcgctggggcaattggtcgggccaatgctatcagctatttcgacatggctgaccggtaaattggaaccggcgctctatgttgcatttattggcttggttattgcggg

SEQ ID NO: 499 - DNA, 1665 bp, Xenorhabdus sp.
  CDS (299)..(637)
catccagctgggcgttattaggagcctttcgctttttagataataaatcagagctatgcattgttagtcatcctcatcagcacatgagcaatcggcatctctttttagtagttgggctacttgatctgataattccagcttggtctctaaatctgatataatcagctttttgaatgtattacatgcaacagcaaaataaatacttggtcttatatcgccaacaaggccagctttgatgcctaaatctaattcatcgtcagtgctgtttgttaatgttagtgttatccgactgtttccggtggattccacgctggggattgccgaagggattgagacagccttgtcctgtaagcaaatttacggcgtaaacacatggtcaaccatgaatgccgggtatatggcgaaatttattgccccacagggcgtgaaacacctcatcgtctttgcagataacgactggagcgccacgggtcatgctgccgcaatggagtgcgcccgtaagaatttacaggcgaataacgacgttgaaaaagtcagcgttcgctggccagacgccggggattttaatgacctgctccagaacggagatcaggccagaggaatagagtttacaagaaagacagcggagacagcataatgcgtgatattcagatggtattggaacgctggggagcatgggcggctgataacagtgacggtgtttactggtcatccattgcagcaggttttaaggggttaatcccgaacagagtgaaatcacgcccgcaatgttgtgatgatgatgcactcataatttctagctgcatggcgagactgaacaagaataataacgaggcccatgatttgctatttgattattacgtcttcgggaagacgttcatgcaattggcgcaggatcatgagtgttctgatggacatatcgggaagaaacttcaaaaggccgaaggtgttattgaaggtatgttaatgatgctggatgtcgcactggaaatggacaaatgcgtccagttagcaccgcagagtattagcacccatcaattatgcagtaacttctaaaaatagctttacgtacgtaaaaatgctgctattgtgataagagtgatagtaatgtcacacagcttattaatttcagacctcgcactcgcggggttttttattttccataacggtaaggtgccttttgataacacttgttatccttgcttagcatggagaaggcatcttaacccttgtggagaatgccaaggctgattggctgcttagatactgtgtgcttaactgctacctgaaagactgacctatattcacttatcgtgtgcgggatggtatgacttggtgcctcatgtcggagatcagtgccgacctccacaaccaatagtcaatttagaatttacagcttaaagtgatcgggatctagcagcaccataaccatttttaaatcagtatgttatatgccattttgtttgatataagcagcaccctgatcgctatagataattacgtattcaaggctgcttaatgcggccttttctatttttgccaccgcaatcactcccataacctcagtatctgctattgcggctggcaacctactcactacaactcacaggggcgaccacagactcaccccacggacgcccattgttatgatggggtggaaatatg

SEQ ID NO: 500 - DNA, 1665 bp, Xenorhabdus sp.; identical to SEQ ID NO: 499
  CDS (637)..(1056)

SEQ ID NO: 501 - DNA, 977 bp, Xenorhabdus sp.
  CDS (509)..(976)
taacttcacgcagtgttgtttgtggcgtggcagtaacagcatcggtgacaacaccactttcatgttttttcacgcggttgacttattcagcgtgacgttcaataggcatgtttttgtgaataaacccaattcccccttcctgtgccagcgcgatagccagagaagattctgtcacggtatccattgctgctgagagcataggcacgttcaggcgaatagtagatgttaattgtgtggacaaatctgccgtgttaggcagaactgtagaatgggcaggaaccaacaaaacgtcgtcaaaagttaatgcttcttttttaattcgtaacatgagcaatatctcaccaagctatggggcgtcaataagggataaaatatagccgcggcattatacaggccgtaatcggttgcctccagcattttctgaaaaaatttcttgattagtggtagctagcagttattatcagtcaattaagtccttgttttaaaatttgatctagctcacatgtcactgccaaccaacactggaattttttctgttagtcgtctaaatcagacggttcgtcagctattagaactggaaatgggtaaaatttggctcagtgctgaaatttctaacttttcccagccttcgtccggccattggtatttcacgctgaaagatgagcgggcacaaatacgggctgcaatgtttcgtagttacaatttgcgggcaacattccggccacaaaacggtcagcaggtgttagtaaaagcacagatcactctgtatgaaccacggggtgattatcagttgattgtggaaagtatccagcctgccggtgatgggttgctgcaacaacaatttgaggttttaaaacaaaaactcaccgctgaaggattatttgagcagatttataaaaaaccacttccctctcctgcaaaacgacttggtgtgattacttcagccagtggtgctgcgttacacgatatcctgaata

SEQ ID NO: 502 - DNA, 1283 bp, Xenorhabdus sp.
  CDS (730)..(1173)
ataattagaaattaatatacaggaatttattttcagcagaatgcaagcgagtttttataaaataatattttcatcgcaaaggcaagatttaaattaacctaaaacaaccattatgtttacatattattaattttatttttcattttaaatcaataagataattttaattttctttattttacatttatatacaaataaattttattattttgataataaaaaaaatacttcaagctgatttaattagattgttttttgtttgtctggtttattttttaaatctcattattaatttaatttccttacctgtaatcataatgagattttattttcatgactaaactcactttcattaatacacagaaaaatggctatttaaaaacgtgataatagataattaatctggattctggtttagctcatagttttataaaactaacaagaggttgatgtgtgagcaaataggctgaaaaagagttatctgatttttttttacaatatagcaatagtattgaaataaaatatggcttcacaactatctgtaactttattaaataacataattctataaaaaattttttggatctagggtttacttctgaaaagaatgtcgtgcgcagtagtgggggattttttactctactaaaaaataattccttatcctccaaatttcattaaaccttcatttatcatatctgtactcaaaaaagagaaaacattggaataataatgatcagaaaatttttaagagaagatatggacacggttctgaaaatctggctggaggcgtccattaaagcacaccatttcgtcgcggctgatttctggcaatcccagattgaaaatatgaggaacatctatattccggcatctgaagtgtatgtctatactcaaaaccaaaaggtcatcggtttttatgcgttacataatgatatattagctgcaatttttgtatcacctgatagtcaagggcagggagtgggtaagaaattaatcatggatgctaaaagtcgcagaactgaacttagtctgtccgtctatcaggaaaataaaagcagttataatttttacctgtcacaaggtttttatgtagcggaagagggtaaagatgaggtgacagggcattctgaatatgtgatgcattttcgcaaattaaatacgcctgccatataaaacagagccgattacgggttgatatgaggatagattccaatgcagccgcgccattatgcgttcaggtttatgggatgtgtcaactcagattgatcgtagtgacttaccta

SEQ ID NO: 503 - DNA, 1538 bp, Xenorhabdus sp.
  CDS (1346)..(1525)
gctctaaagcaccccaaaaaggactcagtacccccagagggcttatagcaattacagtcatctggttttttgttggttatttcaatatgttttctcttaacattgccaatgcagcccacttttcaggcttaattatcgggttactgatggggttatgggacaatttacgcaaacaaaagaatcaataatattccaattaaaatcagttaattataataattttaggtaaaattaggggaatgttttgaagcaaactcagcgacatgatgcaataatcgagctggtacgtcttcagggttatgtcagcactgaagaactggtcgaacactttgatgtcagcccacaaacaatccgacgtgatttgaacgaactggccgacaaaaataagatccagcgtcatcacggtggtgcagctttaccttccagctctgtcaacacagcttatcatgaccgcaagattatgtggtcagatgaaaaagcccgcattgccaagcaggttgctacccaaatcccaaatggtgcaaccctgttcattgatatcggtactacaccagaagcagtcgcccatgccttacttaatcatcaggatctgcgtattgttaccaataatctcaacgtcgcaaccctgctgatgggaaaggaagatttccgcctgattctggccggaggggaagtccgttcccgtgatggtggcattattggcgaagccactctggattttatctcccagttccgccttgatttcggcattctcggtatcagtggcattgactctgatggctctctgttagagttcgattaccatgaagttcgaaccaaacgcgcaattattgagaattcccgctgtgtcatgctggttgctgaccattcgaaatttggccgtagcgcgatggttaatctcggtaatatgaacctgattgattttctgtttaccgataaagagcccccttccggactgcaaaaaatcattgaacagcatagtgttaagctggaattgtgttaggtcagaataatattaagccagaatcgtgttagaactggcttcagattgaagacattctatttaggatccgcctgttttcaggcggatccttctctctccggtcaattgctcccagtcatcatctcagtcctctcccttcatgaccctgcaataacgagtgaactcaaatttgcctctcacaatttccttattaatcttatatatatgataacgatttgttatctgcatcacgcaaatatgtttttttctggtaaatggttggcgattgatgaaattttgattacaatccctgagcgaaaacgaacattaaagaactgtttcgaacatttcagagggtatgcaatggaaaccaaagacttgattgtaattggcggcggaattaacggcgctggtattgcggctgatgctgctggccgtggactgtcagtcctgctgttagaaggtcaggacttagccagtgcgacctcatcagccagttctaagctgatccacggtggcctgcgctatctggaacacctttagagcacatggctcg

SEQ ID NO: 504 - DNA, 1538 bp, Xenorhabdus sp.; identical to SEQ ID NO: 503
  CDS (245)..(1003)

SEQ ID NO: 505 - DNA, 703 bp, Xenorhabdus sp.
  CDS (185)..(298)
gctctaaagcagtgtatgttttttattatcccatcaagataaaaaagttggattcgccagattaataactgatttttcgacattttcttatattgtagatgtatttattattgatgaatatcaaaagaaaggtttagggcgctggttaatggagtgcgttttacagcatccagccgttaccgatgtgggtcatgtcacactggtaacgtcttcagcgagctggctttataagaaactgggatttaaacctgttacagagcaagatttcgtctggacgctagagaaaaggcaaaagtagtcattttattcatccaatttgttaattccagccagtcaatttttccggattgtgcatgacctgtgagcatactcttatagcctgattttgatcaggcttatttagatctcatttttttaatatcagaaaacaaagtcagtaatcctatgaaagccataatgcaacctgcccataatggtgcttttaatccccaacctaaactaatgaataatccacctaacgaagcaccaatgacaacgccaagtgtaatgacagaggtatgaatagtatttacaaatgggcgaccgttagctgttctcattactcgtgtaaccatagctgggttcattgtgacaccaactaagccaattcctattaatgaaaatgtggagagtaatttgttttcagcaaaagtcccaaatagca

SEQ ID NO: 506 - DNA, 654 bp, Xenorhabdus sp.
  CDS (63)..(653)
tgctctaaagcaagacccgcgatgcggctgccatcagtaacgctgtcgaggcggttgcatccggcctgcacaagctggcgagcggcgatctgaccgtgaccatcggccgtcccctcgatggtgagctcgatcagcttcggcaggacttcaatgcctcgatgctgcacctgcaggcgacgatgcgccagatccgcgacaatgtcgaaatgatccagggcaacggcaaccagatggccgaggcggccgaggatcttgccaaacggactgagcagcaggctgcttcgctcgaagaaacggcagccgccgtcgacgagatcaccgtcacggttcgctcgtcggcggaacgtgccaaggatgccgaccagatcgtccgccaggccaagcagagcgccgacgattcagccatcgtcgtcaacaatgcgatcgatgcgatgggccggatcgaagaagcctcccgccagatcgagcagatcatcggcgtgatcgacgagatcgccttccagaccaacctcctggcgctgaatgccggcgtggaagcggcgcgggccggcgaggcgggcaagggctttgccgtcgtggcgcaggaagtgcgcgaactggcgcagcgctcggcaacggcagcgaaggaaatcaagagcctcatctttagagcac

SEQ ID NO: 507 - DNA, 1030 bp, Xenorhabdus sp.
  CDS (1)..(432)
cgcctgtatacatctttgcgtggtcgggataaatccgctcagcctgtgggcggtgaatcttttaaagccggttttgttgaagccatgaatgatgacttcaataccccagaagcttattccgtactgtttgatatcgctcgtgaaattaatcgcttgaaagctgacgatatggctgcggcaaacgggctggcagctgagctgcgtaagctggcgggagttctggggcttctggagcaagagcctgaacagttcctgcaaggtggtgttgatgacgatggtgacgttgcccaaatcgaggcactgattaaacagcgtaatgatgctcgtaaaaacagagattgggctttagccgattctgcgcgtgaccagcttaatgcaatgggtattgaactggaagacggcccacagggcacaacatggcgtcgtaaataatcgattgtagaagccataaaaatatcaaaaccgcctcgctgtaggcggtttattctatgatatctatcagcttaatattttattgatttttattcagatgattcggataaaaagcatttccagagtgataactgatttttcctgaagaagcgtctcgttttttggaaataaaagacgaatggttcagatgttcaggtatttgatgtttatcagtatcggcgttgagattcaaaagagaaatagtcactctacgtttagaattgcttaacttatacggcatgcccaacaaccttcttgcagctctattacttaacataatcaactccttttcagttgtaagtgagcttctcagtatagcaactaataaaaaaaccaaaacatttaaggcgtgattgtttaataagcatcgctgatgtcacaaatctgtgtgaaacatatccatcacgtagagcggtatacaataaaaaaaacggcaccttaaatgcgtaacgcataataaagtgccgtttctttgacggggattagcgcagagctaaattattctttaacgcgaacagaatcgccgttgaaagtaacaacttttcctgcaacaattttg

SEQ ID NO: 508 - DNA, 1081 bp, Xenorhabdus sp.; identical to SEQ ID NO: 13
  CDS (3)..(713)

SEQ ID NO: 509 - DNA, 1274 bp, Xenorhabdus sp.
  CDS (378)..(833)
gtgtgattgaagtggtcagtgaacccagcacaaaggtcagcttgccctccgcgactcacgctggtatgtcagctctctcccgttagatgcagaaaccgcagctaaggcaataagaagacattgggcggtggaaaatgagctgcattgggtattagatgtggcctttcgggaagataacatctcactcaaagaccctgatggggctgcgcaaatggcgctttttaaccgaattgcgttaaatgtgattaaacagaataccagtataaaggatagtcaagcggctaaacgccgaagagccacatggtctggggaattccgcagtcagcttatctttgattaaattaaagacaaagtggaatcccgccctgggagtaaacatgagcctgaatgacatcatattgatagcctcaattttattggcgttcgcttttgctatttatgatgagttttctatccactacttcaaaggcaagacgttgttaactataaaattaaaaagaaagcaccgaatcgatgccttaatatttattattttagttagtattgtgatttataataatgtagttgctcaaggcagcccactaacaacttatttattatcgtttattattttaatctcaatatactttggttatatacgctcacctaaactcatctttaaaaaagaaggattttattatttcaatcgccttttttattatgaaaagattaaagctataaatttatccgaagatggtattctaatgatagaatttgaagcaaagaaaatatacatagccgtaacaaaattagatgatttagaaaaaatctataaatttctactgagcaataaataatattctcctttcgcttaaataaggctgtaatatcacatcagccttattcttcatcacaacaaagataatgataattattatcattagataaattaacatagcacgaaatattttgcctttcactctgagtatgttatcgtccagtccagtcattggggagtagcctgttccagaatattcctggaaaattcgtatcaacatgctcgttttaataaaacgtggtacgaatgccgaatcggttggcaagaccatagacatataaaatcaccgttggttgggggtggtttatatgggaacctctaaaaacttttcacagccacaaaattgagtaaaatgtaggcacagtacctctctgcaaggtagcgccatcatgaaaccgcctcgttctgctttaaaaaaagacaaacaggcatccgaagtatcaccgtcgaaaaatct

SEQ ID NO: 510 - DNA, 1274 bp, Xenorhabdus sp.; identical to SEQ ID NO: 509
  CDS (53)..(340)

SEQ ID NO: 511 - DNA, 779 bp, Xenorhabdus sp.
  CDS (689)..(778)
ttatgtttatcggtattattgccagtggtggtaatccacttgctgcggcagcggcgggtttattggtaaatgcgcgtcatttaccttttggtgtagcggtacgcgaattagtcggaaaaggtacagcaaagtttttcggctgccatattatgaacgatgagagtgtggtattcggcatgtcacagtcgactcccgaacaacgtaaggccgcatactggttttgtggtatcggagtcgctctattctggccattaggtgttcttattggcggtacagttggcaaatttattcctgcaccagaaacgattggtctagatgcggtctttccaaccatattactggcaatggtgatccctgcattcaagaatagaacatctcttattcgtgcttccagcggagctgcactttcactttccgttgtaccttttatacccgtgggcttaccagttctgctgtcgttattgggcttattcgcgaggaaaaaataatggctgattactctctgattattattggtattgcaatactatcgctgggcacttatttaatgcgtttcggtggagcaaagctgggtaataagttagctttatctgagcgttctcaggcactactttctgatgctgcaactacattgttgtttgctgtagcactggctgcaaccgtctacgaaggtgaacattttgcaggtatggcgcgtgtattgggtgttgttattgcggtatttctggcctggagaaaagtgccgttaattgtggtaactttagagcaccattggctcg

SEQ ID NO: 512 - DNA, 779 bp, Xenorhabdus sp.; identical to SEQ ID NO: 511
  CDS (3)..(488)

SEQ ID NO: 513 - DNA, 1331 bp, Xenorhabdus sp.
  CDS (114)..(680)
atggggttaaccaatctgtatcgggtcaatccgctttttttgcctgattctcatgcaatcgcactttccacaggcgccagtgatgtcattggtaatgcaacgattgtggattcctggatgaagcactgtccgggtgtgaattggttttcggaaccagtgcccgttcacgtacactttcctggccaatggttgaaccgagggaatgtggtgaacgctgtgtcagcgctgttcagaactcaccggtagctatcgtgttcggtcgtgaacgtgtagggctgactaacgaagaactccagaagtgtcactaccatctttatattccgaccaaccctgaatatggttcgctgaatctggctatggctgttcagttggttagttatgagatccgaatggcgtaccttgctcttactgctcaggaaaaacaggaaaaagcggatgcgacagagcatgaagtggaatacccgcctgttgaagatatggagcgtttttaccagcaccttgagcaggtattaagtcattccggctttattcgcaaagcacaccctgggcagataatgaacagattaaggcgtctttatacccgtgcccgtccggaaactcaggaattgaatatcctgcgtggcattctgacttctatggaaaaatgggccaataaatcgtctgaatccggtcggaaataggatcagaaatgaggcttgtgagcggtaacaggatgaaagacaactaaataatagttgagtaaattactaggttaaatagttgactaaaacgctcaggaatgccacaatttgacccatatttcaccatggagtttttgttatgagactgacatcaaaaggacgttatgcggtaactgccatgttagatgtggcattgcattcacaagaagggccggtgccactagctgacatatctgaacgtcagggaatttccctttcctatcttgagcagttgttttctcgcctacgtaagaatggtctggtttctagcgtccgtggtccgggtggcggttatctgctgggcagagatgccggtaagattttcgttgccgaagtaatttctgctgttgatgaatccgtagatgcaactcgctgtcagggcaaggaaggctgtcagggcggtgatcgctgtctgacccatacattatggcgtgatcttagcgagcgcattacgagcttcctgaacagcatcagtttagaagaattagtgaacaaccaagaagttttagacgttgctgatcgtcaagacagcgataagcgccgtacagctaatgggccgggtttcaaaaatgattaacggtaacctgcgtgcttaaaataggggaaataaac

SEQ ID NO: 514 - DNA, 1331 bp, Xenorhabdus sp.; identical to SEQ ID NO: 513
  CDS (820)..(1296)

SEQ ID NO: 515 - DNA, 1235 bp, Xenorhabdus sp.
  CDS (3)..(1202)
ctcggaccatgtgctctaagacttcaagcgatgacgagccattctctgcactggcgttcaaaatcgcaactgacccattcgtgggtaacctgacgttcttccgtgtttactccggtgttgttaactctggtgacactgtactgaacccggttaaagacaagaaagaacgttttggccgtatcgttcagatgcacgccaacaaacgtgaagaaatcaaagaagtccgtgcaggcgacatcgctgctgctatcggtctgaaagatgtaactacaggtgacactctgtgtgacatgtcttctccaatcattctggagcgcatggaattcccagaaccagttatctctgttgctatcgagccaaaaactaaagctgaccaagaaaaaatgggtatcgctttaggccgtctggcacaagaagacccatcattccgcgtgagcagtgatgaagagtctggccagactatcatcgcaggtatgggtgaacttcacctcgacgtactggttgaccgtatgcgtcgtgaattcaacgttgaagcgaacgtaggtaaacctcaggttgcttaccgtgaaactatccgtgcttctgttgagcaggaaggtaaacacgctaaacaatccggtggtcgtggtcagtacggtcacgtttggctacgtatcgagcctatggaagctggtggcgctggttacgagttcgcgaacgaaatcgttggtggtgtagttcctaaagaatacatcccaggcgttgacaaaggtgttcaggaacagctgaagagcggtgttcttgcaggttacccaattgttgacgttaaagttgctctgttcgatggttcttaccatgacgttgactcctcggaaatcgcctttaaaattgccgcatccatggcatttaaagaaggcttcatgaaagcgaagccagttctgctggaaccaatcatgaaagtcgaagtggaaacaccagaagactacatgggtgacgtcatcggtgacctgaaccgtcgccgtggtatgattgatggtatggatgatgtggctacgggcaaaattgttcgtgctcaagtaccattatctgaaatgtttggttatgctactgacctgcgttctcagacccaaggtcgtgcttcttactccatggagttcttgaagtacaacgaagcgcctagcaacgtcgctcaggctattatcgaagctcgtaaagctagataagttttcgagtttactatctttctttagagcaca

SEQ ID NO: 516 - DNA, 1138 bp, Xenorhabdus sp.
  CDS (412)..(930)
cacccgattggtggtgttaatgaaaaaattgaaggttttttccgtgtatgtcactgccgtgggctaaccggttcacagggggtgattattccagcagccaatgtgcagcatttatgtttgcatcaggatgttattaatgcagtgaaaaatggagaattccatatttgggctgtagagcacgtatccgaggccgcttcattattgacagacatcccttattatgatgaacagaaagaacatctgttagctatgatatacgagcgtattacgcaagttaatagtcaggaacgcccaaaattaccttggttcttgcgctggctgggttagtgtcaagatatctgatcggagttgttcagcgtacaagtgtacgctattctctagccttacccaataataaggctatctgagaatatgtttaaaaaacaagagtcctacactaaagaagaacttcaagcctctggacaaggtaagttatttggtgaaaatgggccaccattaccttccggcaatatgttaatgatggatcgcatcattaaaatgacagaagatggtggcacttataacaaagggtatatcgaagctgaacttgatattaaccctgatttgtggtttttcggttgccactttttcaaagatcccgttatgccaggttgcctcggtcttgatgcgatgtggcagcttgttggtttcttcatgggctggcttggcggtgaaggtaaaggtcgggcgcttggtgttggggaagtaaagttcaccgggcaagtgttaccaacagcaaaaatggtcacctatcgcattaattttaaacgcgtcataaaccggaaactgattatgggtctggctgatggtgaagtgttggttgacggtaaacttatctatacagcaaccgatctgaaggtagggatcttcaaagataccagtaatttttgattttcttgtcctgatgtttactccccttctcttatacaaatcacctctgcattatggcagaggtgatttgttattaaagtaacgggttattgactaaactcacaacaatcaaacacggtcttccatcgcctgacgccaaccccccagccagtgtgagcgggcatctaacgaatggtaagggcaattttcccgcggtcgccctaaaata

SEQ ID NO: 517 - DNA, 1138 bp, Xenorhabdus sp.; identical to SEQ ID NO: 516
  CDS (4)..(327)

SEQ ID NO: 518 - DNA, 601 bp, Xenorhabdus sp.
  CDS (2)..(601)
caaaattaatgccgggcaattggtcaggttgctgaatattccgatggagcgcgctaaagagttgcacggtctggaaaatggcaaggcccacgctgacgctttaaaacaaggttgtcgggaacaccacggcgcagcaggacgaaaatggattgattatctctcttcacaccagaaggaggccagacaaacctatcttgatgcgcaagcccgatggagtaagttaattcctgaaagctacggtgaacaggtgcaacgggtcagtgatcgatttgctgctctggaagcggccatgatattggggcgcgttgtgaccggatgggatgaacgagagtgtcaggatgctctgcaatatatctttaatgtctgggtggctgagtttggcacgggaaataaagagcttgagcaaattgtggaacaagcggtttcgtttctcaatgcttacggcatgagtcgttatgcccctctgccttatgacgaaagggatttacctatacgggatttagccggttaccgggaaaagaaaggtatccatgatgatgcgcccataaccttttatacgctgcctgccacattcaaacaggaaatttcccgggggtttaat

SEQ ID NO: 519 - DNA, 1326 bp, Xenorhabdus sp.
  CDS (1129)..(1326)
agtcgtgctggtttatcggatccaaatcgtccgattggctctttcatgtttttagggccgacaggcgttggtaaaacggagctgtgtaaagcattagccaatttcctgtttgacagtgacgatgcaatggtacgtatcgacatgtctgaatttatggaaaaacattctgtctccagactggtgggagcacctcccggatatattggctatgaagaaggcggttatctgacagaagcggtacgtcgccgtccttattcagtcatcctgctggatgaagttgaaaaagcgcatccggatgttttcaatatattgctgcaagtattggatgatggtcgtttgaccgatggtcaggggagaacggttgattttcgtaatactgttgtaattatgacatctaacttgggttcagacatgattcaggaacgttttggcgtactggattatgccggaatgaaagatatggtgatggagattgtgggtcatcacttccgacctgaatttattaaccggatcgatgaggtcgtggtattccatccattaggaaaagaacatctgaaagccattacgagtattcagttgcagcgtttatataagcgtctggaagaacggggctatcaagtcactataacatcgtcggcattagagaaactgagtgagacgggttttgaccctgtatatggagcacgtccattaaaacgggctatccaacaagagattgaaaacccattggctcaacaaatactttctggtgcactgattcccggtaagttagtgacattggatctggaaaacgaccacattattgcaaaacaatgatgttttttgctcagtctactcagtggggacttatagatagctatctatataggcacttattgagtgaaaatgtcactagagcaatataaaagacataataaaggtaaaaaagaggtggaaaatccacctctttttctgtttatggctttagccagtttaagtcgcgttagcgtcttaaacataaaaccacccgctttgcgggtggagttcaaaggttataccaagaaaaacacctttccgttacgatatagatgttcaagctaatattcgtaactcaaataaggaaaggtgtttatgggcattaaagcacaaagctcagcgcatacaaagtggctgtgtaaataccatatcgtcttttcgtcgaaatatagacggaaagtgatttttaataatattcgttcaagtgtgggagagatcctcagagacctttgtaagtataaaggtgtggaaataatcgaaggtcatctcatgccagatcatgttcatatgttggtgagtattccaccctta

SEQ ID NO: 520 - DNA, 1326 bp, Xenorhabdus sp.; identical to SEQ ID NO: 519
  CDS (1)..(816)

SEQ ID NO: 521 - DNA, 1707 bp, Xenorhabdus sp.
  CDS (1175)..(1462)
taaattccatctaccagcaaaagtgacgctaaacgttaaaaacaagctggcatcggagagaaaaattattgaaagtagcgttgatttattaaaaccgaataataataaacttcatataccagcaaaagtggaactaagcgttaaagataagctggagtcggagaggggatttattgaaaggagtgttgatttattaaagcggaataatgataaagtccatataccagcagaaacgatactaaacgttaaaaacgagctgatatcggagagagactttgttgaaaatagtttcaattcattaaaatcggataataatgaaatccatacacaaatagaaacgaaattaaacgtcaaaaacaagctggcatcggagaaaaaatttgttgaaaatagtgctcattcgttacagcaagataataaaggaatttatacgcgagcagaaacggtactaaatgttaaaaataaattgatatcaaaaagagagttttttgaaaatggtgctaattcgttagagccagataataaagaaatttatatatccgcagaaacgatgataaacgttaaaaacaatttgacttcggagagagaacaggctaaaaataattttcactcattaaaacaaaataataataaaactcatataataaccgaaagcacatcacaaactaaaactaagaaaacacccgcagtaaatatcattcaggatgagtataatcaattaaagcagactcacaatgaaaccgaaatacaaataggtgcagtgtcgtcaatacctcagcttatacaaacacagtatcaaccagcaaccacacaacagcatgatggtttgataaaagagacgctaaaacaaaacgcttcaattttaaaaaacagggaacaacacagaaaattattgaaaccgacttctttagcgcgaatttcatctacacaatctaataatgggattcaaacttcatcagcacaatctgttttatctatcagcaatgccggttgcatgattttatggccgttattgccaacatttttccgcacttttgatttattggagaaaaatcaatttgtcagtcttgaagcgcaaaggaaagctgtttgtttacttgattggctgatttgggccgaagaggaaatacctgtatggcggttgaccctcaataaaatactttgtgggttacccatgcatgataatgcgctatggctcacaccagagtcagaacagaaaatcgccatcaaccaatggctggaaaaaactgttgtacaacttccggtctggaaaaaaatgggtgtaaatgatgttcggcatttatttttgcaacgttccggagaattaaatgaattaaacggtttaataaatattcatattaaacccgaagtttatgatgtgctgataagcgaatggccgtggccaatcaatatcgcgcactttagctggttgaaatatcccatcaccataacatggttataaccatcaaatacaatacatagtctgagtaagaatttatgaatacagcgcctgtcttccctaatttatttcagcaaaataatgatgcaaatttagcatttttatttagccaactggaacgtattgatctcgttcttcaataccattgccattgtatatcagggcagcaagatgatccccttgatgagtttctgttaagtgaagaggatattatcgccagactggagaacccgatgggtaaacctcat

SEQ ID NO: 522 - DNA, 935 bp, Xenorhabdus sp.; identical to SEQ ID NO: 14
  CDS (820)..(933)

SEQ ID NO: 523 - DNA, 1486 bp, Xenorhabdus sp.
  CDS (2)..(1357)
tgctcgagccatgtgctctaaagttcctgatcttgcagccagctattttgctcctctttccgcctctccctgggccatgttgttacattcaggagccgctcagcattcacataatcgatttgatattattgttgcagaaccaatcatcactcttgtgacacaaggaagctctactggaatcaaaagtcatgatgcagtctctcattctcaagaagatccttttcttttactaaaaaagcatcttaatgactgcaatatcacccctcagtttgatcccgatttgccatttcagggaggagcattgggaatatggggatatgatcttgggcgatggactgaaaagctaccagcgacaactattaatgaattaaatttcccggatatggcgattgggatctacgattggtgccttatcattgaccaccaccagcaaaaagcaactttattaagctatcacgatattgatactcgcctggcatggctggaagctcacgcccagcaccgcgaaacaaattttgccctcaccagcgcatggcaatccaatatgagtgaacagcaatatcatgaaaaaattgcgcatatccatcgttatttgcgtaatggcgactgctatcaggttaatctggcacagcggtttcgcgcaaattatcagggtgatgaatggcaggctttcaggcaactcaacgaatctaatcgcgctcctttttcggctttcattcgtttacctgaaaattgcgtcatcagtgtttcacccgaacgttttttattactggaagataataaaatccagaccagaccgatcaaaggtacattgccacgtgaacaagatccggaaaaagatcgattgcaagctgaaaaattagccaaatcccgtaaagaccgcgcagaaaatctgatgatcgttgatctcctcagaaatgatatcggtcgtgtagcggaggcgggatcagttaaagtccccgaattattcgttgttgagccttttccggcagtccatcaccttgtcagtaccattactgcaacattgccggacgaatatcacgcaacagatttactgcgagcctgttttcccggaggttccatcacgggtgctccaaaaatccgggccatggaaattattgaagaattagaaccgcatcgcagacatggatattgtggagctattggctatattagtttctgcggtacaatggacagcaatattactatacgcaccctattgacagaaaaaggaaaaatgtactgctgggctggtgggggaattgttgctgacagcactgcggaaaaagagtatcaggaaacattcgataaacttggacatatcttaccgaaattaagggaactccatacatcatgacatctctttctgattttattcatcggtttcaactgcaaattcctgtacaaccagattatccggttaacaatcagcggaatgccgctgtattactgccgattatttgtaagcccgagccctttagagcac

SEQ ID NO: 524 - DNA, 1594 bp, Xenorhabdus sp.; identical to SEQ ID NO: 439
  CDS (689)..(1594)

SEQ ID NO: 525 - DNA, 939 bp, Xenorhabdus sp.
  CDS (2)..(931)
gctgaatacgatcccaaaaatccggcataccacctcccaccaggatcccgcagatttacggcaacatctgatcgatgaaatacgacgctttgaagtcgcatgtcaacaggtaaaccaaccctatgaagttattatcggggcgcgttactgtttgtgcaccgccttagacgaagcggccgccctgactccatggggaagtcgtagtgtctggtcaggtagtggattattggtcacgtttcataatgaaacctggggtggtgaaaaattctttcagcttctggctaaactatcacaaaaccccaaagagaatttatttctgctggaattgattaatttttgtctccagctcgggtttgaagggcgctaccgcatcatggataacggtcgttctcagctggaaacactaaaacaacgtctgtaccagttgatccattcaatccggggcaattatccggccgagctgtcacctaatttgcagttgctcaaaaaacccaataaagcctggaaacctttcttacccatgtgggtttgtctgctatttctgtgttttttgggctgtatcctgtatatcagcctgaactggcgactgggtaatatcactaccccggttttatcctctatctaccagaccagtctgcccaatgtgcccgacagaaaaatatcattgccaccacctcctgcaccagtaaaaaaggaaaaaccgaatctaagaagccgattgcaagctgaaatatctgccggactgttaaccgtatccgtgaatgataagaatgtgattacactggagggtgatggtgtattcagatctggttcatctcgcatcaagaaaaactatttatatgttatcaaacgtattgcagaagagatgaatcattacaaaggtgaaattctggtggtcggatataccgacaatgtccccacttatacataatgaaatga

SEQ ID NO: 526 - DNA, 1390 bp, Xenorhabdus sp.
  CDS (8)..(328)
tgtgcctctaaaggacaaaggttatcttagtcaggaactggcaaacgatttagcacaaaacggtgtcactttcatcacgaaaaagcggagtaatattaaagcgagtgtgctggaagattgggataagataatgttatcaaggcgttttattatcgagacggttaatgggcaattgaaaaatatctgtcaaatagaacattctcgtcatcgaagtataaaagggtttctgttgactgttttaacggggttaattgcttattgtcataaaaagaagaaaccatcactgaaagttttctactcagaagaagaagatattccagtgacagcttaaacagaattggggttaattaagttgttattttttatttggttatatactattcgggttgattaatctatattaatgccgtgagggaatagtttatgtgatgtatttttaaattcagttcggtaatgattatcgagtattactactttcctctcttatcatgaatgctattctgagtgataataattttatattatagtcaaatggcatgatttttatattaaaatcatgagggctttttaatttatatcatgtaatttattgttattcttctaattagagatattaaaatgaagcgcattcctgagccttttcgtattaaaatggtagaaaatatccgcatgacaacacgtacagaacgtgaagttgcgctgaaagctgcggggtataatccgtttatgctgccttctgatatggtgtatatcgacctattgactgactctggcactggctccatgagtaatcagcaatgggctggtatgatgatgggagatgaggcttatgccggatcgcgtagttattatcatctggtggataaagttaaagaattaattggatacgagcatacggttcctactcatcagggccgtggtgctgagcagattttatttcctgccttgatcgaaaggaaaaaattaaaaggcggggcgcaaaatccggtatttatttctaattttcattttgatactacgatggcgcatgtggaattaaatcatgcgaaggctatcaatgttgttacagataaggcttttgataccggcagttattatgactggaagggtgattttgatattgatttacttcaacacacaatcaaagaacagggtgaaaataatgtagtcgccattatagtcacgataacttgtaatagtacaggtggtcagccggtttctcttgctaatatgaaagctgtgtatgaaatagcgaaacagtatgatattccggtggtcattgattcagcccgtttttgtgaaaatgcctggtttattaagcagcgggaacaaggttacgcagataagtcaattaaagagatcgtcagggagatgtaccaatatggcgata

SEQ ID NO: 527 - DNA, 1390 bp, Xenorhabdus sp.; identical to SEQ ID NO: 526
  CDS (619)..(1389)

SEQ ID NO: 528 - DNA, 1694 bp, Xenorhabdus sp.
  CDS (3)..(464)
cggatatcgtatggggattaatcgcggcactgcttattgccaatattctattactaattatgaatatcccaatgatagggctatttacccgtatgctgagcattccgctgtggtttttggtaccggtcattgccagtatttcagcagtcggcgtttatgctgtacacagcaccacgttcgacctgatgttaatggttggtctgggcgtttttggttacattctcaggaaaatgaacttcccaatgtcaccacttattctggggtttgtgctcggtgaaatgctggagcaaaacttaaggcgggcactttcaatcagcaatggtagttttgatatcctgtggagcagtgctatcactcagtctctgctggttttagctgcactggttcttattattccacctacgttacggatcattcgcaaaaagcggcagaagagcaggaaaatttatagccaatccacataactgatgaattggcttttattcagaacaacaaaattttcagtttcagaaaatcagtcagaatatttacgcataaccaaagatgcatttgtaccaccgaacccgaagctattggacataactgttgttagctcgcgttcggtcggttctgtaataatattcataccaagcgctttttcatccagctcttcgatattaatgctcggtgcaataatcccgtgctccagcatcaacaggctgtaaattgcttcctgagcacccgccgctcccaaagaatgcccggtcatcgccttagtcgctgaaattgcaggtgtgttatcaccaaatacttctcggatagcttccagctctttcaggtcaccaaccggtgtcgatgtgccatgtgtattgatatagtctacttcaccatcaataccgtccattgccattctcatacagcgaacagccccttcgcctgaaggtgctaccatatccataccatcggaatttgctccgtagccaataacttcagcataaatatgcgcgccacgggctaatgcatgttctaattcctcaacaactacgataccgccaccgcctgcgataacaaagccgtcacggttttggtcataagtacgggaagcacgatccggcgtttcattatacttagtggaaagcgcacccattgcatcaaattcacaggctatttcccagctaagttcttcacctccaccagcaaaaataacatcctgtttgccaagctggattaactcaacagcatgaccgatacagtgcgcagaggtcgaacaagcggaactgatcgaatagttaacgcctttaattttaaatggtgtagccagacaggctgaaatgccggaagccattgttcttgtaaccatataaggcccgacaccccgtaagccacgggcacgcataccgtccgcacagacaacctgattatgaggagaaccgccaccagagccgacaaccagccctgtgcgtaaattagaaacctgatcatctgacaggccggaatctttaattgcctcgtccattgccagataagcataaacagaagcatcactcataaagcgctgtgtttttcggtcaatcaaacccgttgtatccagtttgatatttccccaaacctggctgcgaagccccatttctttgaattcttcggaaaaagttatcccggaaaggccttctttcagagatttaagcacctctttctggttattaccaataccttta

SEQ ID NO: 529 - DNA, 1694 bp, Xenorhabdus sp.
  CDS (2)..(1180)
taaaggtattggtaataaccagaaagaggtgcttaaatctctgaaagaaggcctttccgggataactttttccgaagaattcaaagaaatggggcttcgcagccaggtttggggaaatatcaaactggatacaacgggtttgattgaccgaaaaacacagcgctttatgagtgatgcttctgtttatgcttatctggcaatggacgaggcaattaaagattccggcctgtcagatgatcaggtttctaatttacgcacagggctggttgtcggctctggtggcggttctcctcataatcaggttgtctgtgcggacggtatgcgtgcccgtggcttacggggtgtcgggccttatatggttacaagaacaatggcttccggcatttcagcctgtctggctacaccatttaaaattaaaggcgttaactattcgatcagttccgcttgttcgacctctgcgcactgtatcggtcatgctgttgagttaatccagcttggcaaacaggatgttatttttgctggtggaggtgaagaacttagctgggaaatagcctgtgaatttgatgcaatgggtgcgctttccactaagtataatgaaacgccggatcgtgcttcccgtacttatgaccaaaaccgtgacggctttgttatcgcaggcggtggcggtatcgtagttgttgaggaattagaacatgcattagcccgtggcgcgcatatttatgctgaagttattggctacggagcaaattccgatggtatggatatggtagcaccttcaggcgaaggggctgttcgctgtatgagaatggcaatggacggtattgatggtgaagtagactatatcaatacacatggcacatcgacaccggttggtgacctgaaagagctggaagctatccgagaagtatttggtgataacacacctgcaatttcagcgactaaggcgatgaccgggcattctttgggagcggcgggtgctcaggaagcaatttacagcctgttgatgctggagcacgggattattgcaccgagcattaatatcgaagagctggatgaaaaagcgcttggtatgaatattattacagaaccgaccgaacgcgagctaacaacagttatgtccaatagcttcgggttcggtggtacaaatgcatctttggttatgcgtaaatattctgactgattttctgaaactgaaaattttgttgttctgaataaaagccaattcatcagttatgtggattggctataaattttcctgctcttctgccgctttttgcgaatgatccgtaacgtaggtggaataataagaaccagtgcagctaaaaccagcagagactgagtgatagcactgctccacaggatatcaaaactaccattgctgattgaaagtgcccgccttaagttttgctccagcatttcaccgagcacaaaccccagaataagtggtgacattgggaagttcattttcctgagaatgtaaccaaaaacgcccagaccaaccattaacatcaggtcgaacgtggtgctgtgtacagcataaacgccgactgctgaaatactggcaatgaccggtaccaaaaaccacagcggaatgctcagcatacgggtaaatagccctatcattgggatattcataattagtaatagaatattggcaataagcagtgccgcgattaatccccatacgatatccg

SEQ ID NO: 530 - DNA, 1205 bp, Xenorhabdus sp.
  CDS (624)..(1019)
cacctcagcgctcggttcactatgtgagatgagaacagcatgatatcattttgatgattcccgtcacattgtccagtctttgcctttacagagtattgcaaatgcatgtcaaccgtaccggagtcaggtcaggccccaacaatatgagtagcgttatccacaagcgctgcctttattatattctataaaaggaattggagcccctccctttcatcatgggcgtcagcaagggctcatgacaagaaaacgtatgaatgcgctctcagaagcttatcccaaaaataatggggattacccattaagctatcaaattgtttttggagttatttattgtgacaagtaaatactttcttaccggaactgatacagaagtgggtaaaacggttgtcagttgtgctttattacaggcggctaatgaaaaaggttatcagactgcgggttataaaccggttgcatcaggctgtgaactcacttctgaaggtattcgtaacggggatgctctggcgttattgcataacagctcagtacctcttacctatcaggaggttaaccggttagcgtttattgaacctacatctcctcacattgtcagtgctgaactcaatcagcctattgagttttctgtgatgtcacaaggtctgagcgaattatcagcaaaagcaaactgggtactcattgagggagccggaggctggtatacaccgctatctgagaataacacttttgctgattgggtgattcaggaaaagctgcccgtaatattaacagtaggtgtgaaattaggctgtattaaccatgcagcgttaacagcaaaagcgattcaggattccgggctgaaattagcaggctgggttgcgaatgaaattgagccacccggcaggcgtcaggctgaatatctggcaacattgaagagaatgatgccggttcacttacttggtgtgatcccccatatgagcgggctggaagtagaacgccatgaaataggaaaatatataaacattgatttattggttaactaattgtttaaacgatgttggttaaaattccggtaaggattagtggggaagatgaaatgttagtatagaatccactccatttcggcaatttttgtactatttttgaacaaaaaataacgtaaattaactctgaaatagcatgaaaacactctgttattgagaaaatccataatggggactttagagcac

SEQ ID NO: 531 - DNA, 568 bp, Xenorhabdus sp.
  CDS (3)..(290)
agtccggtgcatttgtaccaggaattcgtccgggagagcaaacggctaagtacatcgataaagtaatgactcgtctaaccttagttggtgcgttatatattacctttatctgcttaatcccggagttcatgcgtgatgcaatgaaagttccattctattttggtggtacttccctactgattgtagtcgtcgtcatcatggactttatggctcaagtgcaaactctgatgatgtcgagtcagtatgagtctgcattgaagaaggcaaacctgaaaggatataaccgctaatcggtttgcttgagaagttacggagagtaaaaatgaaagttcgtgcttccgtcaagaaattatgtcgtaactgcaaaatcgttaaacgtaacggtatcgttcgtgtgatttgcagtgcagagcctaagcataaacagcgccaaggctaattaatcgcatatttttcttgcaaagttgggttgagctggctaaattagccagccaatctttttatctgacagcaacattatttgagtatcctgaaaacgggcttttcagaatggtggtgcactttagag

SEQ ID NO: 532 - DNA, 1664 bp, Xenorhabdus sp.; identical to SEQ ID NO: 16
  CDS (453)..(566)

SEQ ID NO: 533 - DNA, 1287 bp, Xenorhabdus sp.
  CDS (13)..(366)
tgccctaaagctcatgcccgcccgtttgttgaaggggtgggctataactttctcgctcatgcgcctacagcttcattccccagtaaccacggtacagctgtgtttacgttctcactggcatttcttttctggcaccgtatctggtcagggttgtgtctgatggttattgcttgtgctatcgtgtgggcgcgggtttatgttggcgttcactggccaattgacatgattggcgcttttttagtcagcctgatggggtgtgcattttcccaaatattctggcatctatacggttcatttttacaaaataagctaactttcctttatcaatttttctgttcctttttgattaaaagaggctgggtacaaagttagcttatcttttcctcagaaggaaaaatatccaataaatttcaagttgtagttttgccagctacaacttggaaaacgacaggtatagatatgaagccccctcagtcatcataaaacgcttcgttatatataacatcacacaatgaaatatcattactctttctacataaaaaataaccaatgataattccctttcatatgatggctgtttaaaattaagatgtttattaagttataatactaagaaccaaattccgattcataaaacttacatcttaagccaaaccaaaaaacataattattttacttttatttcaaaatgatacaatcaaataaaataaatgaaatttatatttcaaattataagaactaatatcaaccactttaattggaattaaaaatttcaaacttaaaaactttgttaacattttaataaatatattaatcacataatcagaacaggaaattcaaatttaaattatgatacttattatcttcattttttaccgctgcgttttatttaatatttaattaacatcatcataaagattcgtaacatattaactttacgatataaatcttgcaattgcgagagtgatcacggtacattttactaaaaataattatatttcccttagcaaatgtctgtggttaagaattttgatttaaatatcaaaaataggactaaacgggatctcagatcattagtttaaaatgactgtattttaagcaatattattagtatataaataaacatgtataaataaacgtcagctcaacatctgacaacttattattcatataacgaatccaactcgcgcattttattaatgtgcgggtttagtagtttttaaattttactttaccgcgttatttcggagatatttatggacacatctcaagcaggtctttagagca

SEQ ID NO: 534 - DNA, 1553 bp, Xenorhabdus sp.
  CDS (1)..(1551)
cagtgtgctctaaagattcccggcgtacagaaggtcagccgctctggaggcacaagcagagaaatattagttgaacctgatccagtaaaattggccgcattaaaaatcagtgttgcagatattaaccggttattactccaaagtaatgtcaatatccccggcggaaaaatggttatcgccggtcagaatcatgctatccgtattttaggtgctaaaaatcaaatcgattatttacgtcaattaaaattcccattagataataataactgggtaacactgggcgatattgccacaattaaagattcacatgcagaaacaaatactattgcacgcctgaatggtgaacctgttattggttttgccatcttccgtaccaaaggctcaagtgataccgtagttgaaaaaggagtcacacaggcattaaaaaaaattgaaaaagaataccctgatattaatatcaaactcgtttcatctaatgtgaaatacaccgtagccagttataatgccactatgcaaacactgatcgaaggtgcaatattaacggtcattgttgtgttcttcttcctgaaaagctggcgggcaacattaattgctgcaattgccctgccgttatctatcttgcctacttttattattctgcatttatttggctacacattaaacagcatcacactattagcattaacgctggtgatcgggattttagtggatgacgcgatagtcgaaatagagaatatagaaaaatatattgaaagaggtgaaagaccctatattgccgctatcaaagcatctaatgctatcgggtttgccatcatcgcgattacgattacgattgttgccgtttttctgccggtcagttttgtcggtggttttgtcggccagtattttgtgcctttcggcgttactgtttcagccgctgttttatcatctctgttagttgccagactggtcactcccctgatgtctgcttacctgttattaccgaaaaaggcatcggctaaaaaagcattatcggaaaaacatagcgaagcagataaagtcaggacacctgagtggatcaacaaatatgttaccattctcgataaaacactcagatttcgtaaaacagctttagccttatcccttgttttcctttttggctcattaagcctgcttgagctattgccctccggttttttacccaaatcagatatcagtatcgctaaagtagatattgaagtacctcccggaactcaggtagccaaaagtgatgaacttttacaaaaaattattaagcagtttaaagaccggccagaaattgtagatatcttttctatcgcaggtgttgaagggacagccggggatatcagtcagagtaaaagcactattattattaatttagtgccgattaatgatcggaaattgtcacaaaaggagtttgaagaatcattagcacctattttgagtgcaacgccagatattcgatataattttggcagcggtagcggcaatagggatgtttcaattgttttagccagcgactatccggatattctttctcagacaatacagca

SEQ ID NO: 535 - DNA, 990 bp, Xenorhabdus sp.
  CDS (341)..(988)
atgactaacgcactacaggcagtcaataatcccaatttcagatctgtatccataaaccatcctcatcgtgaaaattaagactcagcaacaccataaattttaagtaattatttatctcgaagattaaaaatcacactgtgatatttaatacatatactttatagcatcgattactgctttcacttttgagctagatcagacaaaattcacggtttctcgctaaattattgccagttatcttcctatatacaaatataatactggcaaatgattaacaaagttctatatccagatgaagggtatacaaatttagaccaaaaggtcaggagtcctttttatcatggcaacgattaaagatgtggctaaacgcgctggtgtttcaaccacaaccgtatcccatgttattaataaaacccgtttcgtcgccgaagatacgaaggccgcagtatgggctgccattaaggaactgaattattctcccagtgccgttgcccgaagcttaaaagtcaatcacacaaaatctatcgggttattggcaacctcaagtgaagcaccctattttgctgaaataatcgagtctgtcgaaaatagttgttatagcaaaggctatacattgattttatgtaattcccataacaacctcgacaaacaaaaagcttatctcgcgatgctggcgcaaaaacgcgtagatggtttattagttatgtgttcagaatatcctcaacagttgctggggatgctggaggattatcgcaatattcctatggttgtcatggattggggggaatccagaggggactttacggatgccattattgataatgccttccacggtggttatttagctggccggtatttgattgaacgtgggcatcgtgatattgcctccattcccggcccattagccagaaatacaggtggcgggcgtcatcagggttttctcaaggcactgaaagaagccaatatcactattcgggatgaatgggtcat

SEQ ID NO: 536 - DNA, 1252 bp, Xenorhabdus sp.
  CDS (868)..(1251)
ccctttttcgactgggagcaggtgatccgcaaaaatggcattgtctatatcgggctggatgcactgtctgacagcgatgtggcctcggcggtgggcaacagcatgtttgcggatttggtcagtgtggccgggcaaatctataaatatggcatgaatgcggggttaccggttcgctatgacgggaagctcgcgataaatctgcattgtgacgaattcaatgaactgatgggggatgagtttattccgctgattaataagggcggtggtgccggtatgcaggttaccgcctatacccagacttcctcggatattgaagcccgtatcggcagcccggccaaaaccgcgcaggtgattggtaacttcaataccctgattatgctgcgggtacgggataaccggacggcagagctgctcaccagtcagttgccggaagtggaaatctacagtaagacattggtctcagggcactcggatattgccgatgtcgagcaggggcaggattttacctcatccactcaggacagggtcggcacggttaaaacgccgctggtgacgccggctgagatgattaacctgccgaaaggacaggcattcgccttattggagggcgggcagttgtggaaaattcgcatgcctttgcccaccggtgatgacgatgatgccctgatgccaacgagtttgcagaacatcgccgagcatatgcggcggcactaccgcaccagtgaaaactggtgggaagaaaaggggtaatttcacgtcatggcactgtcagaaaacccatcccgccagccttcccaaccaccccgtaagcatggcctgttgtatcgactgttatgggaatggccgtggcaactcattggctttattgtgatgtcgtggctgttcagtctgttactggaatacctcgggatgacttttttctggccggatgagggtgcggcgcacagccagacgatgatgaaaaccgagctgcaatttttatccacggagtttacccggagtctgttattgtcagaaccgtcacagacggtctctgactggttgatgcaggcgtatcaatggctgtttgtcgacagtggttttctgcattggatacaggggcagcaccaatatcagcttaatagccgcaatgattttatacgtgaattcaatggggtattacaggatatatcgggttatttgcgggaatatgcgctggcgacagtgtttatcacgatggtcacgttaatcaggttggctattctggtgctgt

SEQ ID NO: 537 - DNA, 1252 bp, Xenorhabdus sp.; identical to SEQ ID NO: 536
  CDS (1)..(750)

SEQ ID NO: 538 - DNA, 1061 bp, Xenorhabdus sp.; identical to SEQ ID NO: 17
  CDS (2)..(220)

SEQ ID NO: 539 - DNA, 1361 bp, Xenorhabdus sp.
  CDS (2)..(1360)
ctctaaaggcactttattcagtaacgccgttttgccgtggctcaatattctgggtacgactctggccctgcttggtatttgggttatcggatttacgctatttactggctggtcctggcttactattgcagaaaaaattggcgcttgtattctcgattcaattagctttgtgcttaatcgtagtcgtcctgaatctgaatatgatgaagaacaggatgaactggcactggaaaaagaagcggtatccgcttcctctggaactgaagaagaatccggtcataatgggaataaacctgctaccactgacattatgcagaattcaggtactgtcgatgaagacgatgcgttgttggcaacaccaacggtaacagaattagcgaatattgactcaaagcagccagaaagcgaagaatcagaagaaagcctttctcctgtcagtatttcatctgaaagcattgcatctgagagtgcttcatctgagcctctggtttctattgttccggaaacagctcaggttatatcagagcaggctgagaatattcaggaagcagaacctacccgttatacatttgaactgtcgggtgatgagcgaataaggaatataaccgcagagttcagtaatgcatcgcatactgtgccggaatctgacctatctccagccaatattcattcagctacagtggatacagcgcaggatattctagctgtgtcaccatcacctgataacgatgatgagttgcagcttcctgccacaacttctgctgtgtcagtaagaaatcctcaggtaaaacaaggtattggtcccgagatgccgaggccgaatccagtacggataccgactcgccgtgaattatatggcgttaaagttccttctcatcgtttggctgaacatttgcagcgaaaagaaaaagagagacaggaagagcttaatgctgaggctgaagaacagaaaatggatgcgcaacaacaagatatgctgcgccagcaatttcttgatcagcaacgtgagcgttacggcagtgatgttgaaaaagagcctaaagagaatgcagagctgtctaactatgctcaaaacgagactattcttgatagcacatatgacgatacagcggtagaggctccagttgagcgacctatcagtaatgttgacgagcaggcagagcaggaagacatgttgcgggaagcatttgagcagcagcagagtgagcgctaccaaaaccagactaccgctttccaacagcctgaaaaatcggtgtttgaatatctttcacaaattgatagttcagataaatcagaaccgacagagccactctttatgccttctgagttcataccgggagaagatattgcacaaccagaac

SEQ ID NO: 540 - DNA, 1156 bp, Xenorhabdus sp.
  CDS (3)..(374)
caatgtgctctaaagacgatgcccagttaacgcatttcaagctcattctggaagcatggcgcaatcaactcagggatgaagtagaccgtactgtatctcatatgcaagatgaggcagctaacttccctgatccggttgaccgtgcggcgcaagaagaagaattcagtcttgaattacgtaatcgggatcgtgaacgtaagttgatcaaaaagatcgaaaaaacgctgaaaaaagtcgaagatgatgattttggcttctgtgaatcctgtggggttgaaatcggcatccgtcgtttggaagcgcgtcctacagctgatttatgtattgactgtaaaacattagctgaaattcgcgaaaagcaaatggctggctaatgggtaggtgagtacggcgctgaaaggcgccgtatatacctttcatctgatcctgacatgactcaatctgaatccgaacactcctcattatacgtcgggcgtttcgcaccctccccatctggcgatctccactttggctctctggtgacagctctgggtagctatttacaggcccgtgctcaccacggtaagtggctgatgcgtattgatgatattgatccgccacgggaaattcccggttcagcggacagaatacagcgctccttagaacactatgggcttcactgggacggagaagtgctgtaccagtcccaacgccatgaggcttatcgggcgatacttactcagttgcagcagcagggaaacagttattactgcacctgtacccgccagcgcattcatcagctgggcggattttatgatgctcactgccagcatctacaactgcctgcccataatgccgctattcgcctgaaacaggatcaccctgtgtatgatttttacgacaaattacaaggtaatattaccgtaccggtaaaaatggctgaagaagacttcattattcatcgcaaagatggattattcgcctataatcttgtcgttgttattgatgataactatcaaggcatcactgaaattgtcagaagagcagatttgattgaacctaccgttcgccaaatatccttatatcggtatctgaattttacaacaccggactatgtacatttgcctcttgtattaaataaagagggaaataaactttccaagcaaaatatgcaaac

SEQ ID NO: 541 - DNA, 1156 bp, Xenorhabdus sp.; identical to SEQ ID NO: 540
  CDS (465)..(1154)

SEQ ID NO: 542 - DNA, 1197 bp, Xenorhabdus sp.
  CDS (877)..(1197)
cagtgtgctctaaagcctcaccgccattttaaaagccgcgatttactaggtatatcaattctgaacagttaggcaatcaacagcgcctgaacagaacactgaaaaccgacaatgcatccgtagctcagctggatagagtactcggctacgaaccgagcggtcggaggttcgaatcctcccggatgcaccatattaaatatatctgatttatcgggtattcaattctggaaaatcaggtaagcgacagcacctgaacagaacgtagaaaattgacgatgcatccgtagctcagctggatagagtactcggctacgaaccgagcggtcggaggttcgaatcctcccggatgcaccatattaaatatctcgatttatcgggtattcaattctggaaaatcgggcaagcgacagcacctgaacagaacataaaaaattgacgatgcatccgtagctcagctggatagagtactcggctacgaaccgagcggtcggaggttcgaatcctcccggatgcaccatattaaatatctcgatttatcgggtattcaattctggaaaatcgggcaagcgacagcacctgaacagaacataaaaaattgacgatgcatccgtagctcagctggatagagtactcggctacgaaccgagcggtcggaggttcgaatcctcccggatgcaccatattagatgaacccctgcctattaaggcgggggtttttcgttttgtgttttatacattatatttattttaccatttagtgtttgtgttttgttcaataacatatcttcatcgctatgtagtcagcgacaatttggcttgtttgatataaagtaagtgctcaataatcatcttattaaaactccacgggaggtcaaattgatcccggatgtatcaaaagcattgtcatggttagaggcaaatccggccgtgttagatggcatttgtcgcggtattgaacgtgaaacattgcgtgttactccagacggtcatttagctatgacaaagcatccagaatcgctaggtgcttctttaacacataaatggattacaactgattttgctgaatctttgttggagtttatcacccctgttgatagtgatataaaaagaactatagattttcttaaagacttacaccgatacactgctaagaatctggttaatgaaaaaaactggcctttaagtatgccatgcttc

SEQ ID NO: 543 - DNA, 710 bp, Xenorhabdus sp.
  CDS (2)..(562)
aaaatgcaaaggtgatggctatggtttagcaactacttatgacgttggttacggcatcaacgttggtgcctcatacgctaactctactcgtgcagctatacaatggaaaaccgatgccttaggtaaacgtgctgaagcatggaacatcggtgctaaatacgatgcaaacaacgtatacttggctgcaatgtacggcgaaacccgtaatatgactcctggcaccgcatttactaaacatgacaatctaaaagacggcattgctaataaaactcaaaatattgagttggttgcacaatacctgttcgctgattacggtctgaaaccatctctggcttatgttcagtctaaaggtaaagatctgaagcgtaatcatcataacgctgatgagggtttcaatgcagatctggttaaatatgtttctgtaggtacttactactactttaacaaaaacctgtctacttacgttgattacaaaatcaacctgctggacaaaaacaatagcggcgaagcaaaccctaacgctcgcaacgtattcggtgttggtctgacttatcagttctaatcccgttgataaacagtttagcgaaaagttaaaccatttatctcagaaaagcagcgctccggcgctgctttttgcatttcatctctctgttttttcagactcttttctccactccgtaaactacttcacaagattttattctttttgc

SEQ ID NO: 544 - DNA, 1568 bp, Xenorhabdus sp.
  CDS (1365)..(1568)
cccaatttctatagggggggggtaaaagagtttgattgttttaatgcgaggccaccaaacttgggtaaagtgggagttgaagtagaagaaggtcatgatcacattcgcattgttcccccagcaaaatttacccatgctgaaattgaaacctataatgatcaccgggtggcaatgtgtttttcattagtggccctttcagatacccctgtgacgatccttgatcctggctgtacggccaagacattccccgattattttaagcaacttaaatctatcagtgatactcctagtgaaaattgttgattaatgatgatgtatttattccactcattctccgagtaggtataataagctcatatttctgctgctcacttattgagcagtgttctgcattaggtgagtgacctgttttctgtataggaaaatgttctgtgtagaaaagagccgacaagcgccatgcaaagcaaaaaggaggagaatgaatgacgataatagccccggtaataaccgttgatggtccgagtggtgctggcaaaggaactctatgccaggcactggctgaggcattgaattggcaattacttgactcaggagccatttatcgcgtgctggcactggcagctattcaccatcaggtggatatcaagtctgaagacgcactggttcctctggctgcaaatctggatgttcgctttgtccctgcaaacggcaggctcagggttattctcgaaggtgaagatgtcagcaatgaaatccgcactgaagcggttggtaataccgcttcacagacagcaacattccctcgtgtacgtgaagcattacttcgccgacagcgggcatttcgtcttctcccggggctgattgctgacggacgtgatatgggaacggttgtttttcctgacgcaccagtgaaaatttttcttgacgccagtgcggaagaacgtgcccgcaggcgcatgttacagttgcaggaaaatggttttagtgttaactttgaaagccttttgtccgaaatacaagagcgggatttccgcgatcgcaatcgggcagttgcgccgttagtgcctgcacaggatgccttaatactggattcaaccagtatgtctatcgaagaagttattgataaggcactaaattatgcgagaaatacattagcattaaccgtttaatctgcgtattttcgcgtataatgctattgcaacggcacatcaagacgatgtatatagaattctggtatgtgagtagtgaaatatgctggcatactaaaacaccttgtaacagggaatagttgcgaggtatgtaaaacaaccccattcggccggatgctagatggacgttaatttaaaaccttgaagatcattaaaatgacagaatcttttgctcaactctttgaagaatccctacagactatcgaaactcgtccaggtgcaatcgtacgtggtgttgtagttgctatcgataaagacgttgtattggtcgacgcaggtctgaaatcagaatctgcgattcctgtagagcaattcaaaaacgctcagggcgaactggaaatccaagttggcgatgaaatc

SEQ ID NO: 545 - DNA, 1568 bp, Xenorhabdus sp.; identical to SEQ ID NO: 544
  CDS (483)..(1169)

SEQ ID NO: 546 - DNA, 1568 bp, Xenorhabdus sp.; identical to SEQ ID NO: 544
  CDS (4)..(291)

SEQ ID NO: 547 - DNA, 1146 bp, Xenorhabdus sp.
  CDS (437)..(1144)
agtgagagtgttagcggataaattgaaacgcattttaaatatcaactgatgagtaccatgaagcctttgtgtccctccagcatatattaccgactatggattttcgtgattttggtgaggaaaggggtcgctgaccttgataaccgtgagctaacggaaaccatgcgcaaattatggcgtcgtcactgtcgcttggctcgctcctcctgattgctacaatcagacgttatcacatagtgattagtccactgctgggtccctttcgtcgttggaatcctacctgttcccaatatggcattgatgcattgcgtaggtttggcatgatgaaaggcagttggttaacggtgaaacgcatattaaaatgccaccctttacacgaaggtggtgatgatcctgtcccacctaaaaaaaacgaagataacagagaacattaacgatggattcgcaacgcaatcttcttctcatcgctctgctgtttgtttcgttcctggtctggcaggcgtgggagaatgataagaacccacaaccaacagtacaggtctcgcagcaaaccaatacgctgagtaatgaagcagtcagtgggcaaggtaaactgatcaccgtgaaaacggatgtgctttcgttgcacatcaatactcgtggtggtgatatcgaagaggctgacttgctggcctatccggataccctcggttccaagatgccgttcaagcttctggaaacaaccccagaatttacttatcaggctcaaagtggcttaacaggcactaatggcccggataatcaggctgaacgtcctctttatactgctgctcagaacaactacgttttggctgaaggtcaggatgagttgcgtattcctatgacttatattgcgccggatggtgttgtgtacgtcaaaactttcgtattgaaacgcggtaactatgctgtctctgttgattacagcattgataacgtgactgacaaaccgttgcagatggcatttttcggtcagttgaagcagagtgttgatctgccgaaacatcgcgataccggcagcagcaattttgccctgcatacttatcgtggtgcggcttactcatctgaccaagaaaaatacgaaaaatacaaatttgatgaaattgaaagtaaaccactttccgtaac

SEQ ID NO: 548 - DNA, 1146 bp, Xenorhabdus sp.; identical to SEQ ID NO: 547
  CDS (174)..(431)

SEQ ID NO: 549 - DNA, 1695 bp, Xenorhabdus sp.
  CDS (749)..(1690)
aaactgattaccagagaaatggttgaatcgatgaaaccgggcagtgtcattgtcgatctggctgcacaaaatggcggaaactgtgaattacaagaagccgacaaacttgttgtgacagataatggcgtcaagatcatcggttatactgatttacccagccgtttacctactcagtcatcacaactgtacagtaccaatctcgttaatctgatgaaattgctgtgcaaagagaaaaatggtgagattgctattgatttcgacgatgtcgttatccgtggcgttaccgttattaaagaaggcgagatcacatggccagcgccaccaattcaggtctcagtgcaaccacccaaacctgaacccgtcaggaaagaagataaacctgttgaaaagcccaaatctccgtggatgaaatatggattattggcgctggcaatgattctttttggctggctggcaaatgttgctccaaaagagtttttatctcactttaccgtatttgctctatcttgcgtggttggatactacgttgtctggaatgtcagccattcattacatactccacttatgtcagttaccaatgctatctctgggatcatcgttgtcggagctgtgttgcaaataggtgaaggtggctggatcagtttcttttctttcattgcagtgctgatttccagtatcaatatctttggtggcttcactgttacgcaacgtatgctgaaaatgtttcggaaaggataaggggtaacttatgtcgaacggagtagtcactgcggcatacattgttgctgctatcttatttattttcagtcttgccggactttcacgtcatgaaagttcgagacgaggcaatatctttggcatcatcggaatggcgatcgccctgatagcaactattttggggcctgatacagggaaggtgggctggcttattctggcaatgattattggtgcggttattggtattcgtctcgctaagaaagtagaaatgacggaaatgcccgaactagttgccatcttacatagttttgttggtctggcggctgttctggtaggttttaacagttttattgcccatgatatttttgctgatgccattatggaaaacattcatctgacagaagttttccttgggatctttattggtgcaataaccttcactggttcagttgtggcatttggtaaattacgcgggaaaatttcctcaaagccattaatgctgcctcatcggcataaacttaatctggccgctttaattgtctcttttgtactaatggttatctttattaaaacggagagtgcaggtttacaggtttttgtcatgctagccatgactgcaattgctttagcatttggctggcatctggtggcatccattggtggcgcagatatgccggttgtgatttccatgctgaactcatattcaggctgggccgccgccgccgctggttttatgctgagtaatgatctgttgatagtaacaggtgctttagtcggctcatcaggggcaatcctttcttatattatgtgtaaagcgatgaatcgttcctttatcagcgttatcgctgggggttttggtagtgatggcgtctcaacgggcgatgatcaggaaatgggagaatatcgtgaaacaaccgcacaagaggtcgctgaactattgaggaattctacttcagtcattattacactgtagggcac

SEQ ID NO: 550 - DNA, 1695 bp, Xenorhabdus sp.; identical to SEQ ID NO: 549
  CDS (1)..(738)

SEQ ID NO: 551 - DNA, 1345 bp, Xenorhabdus sp.
  CDS (3)..(995)
ttttgggtacatatctaatgactcagccagtattcatcatcacaattgataccgaaggtgataacttttggcaaaccagcgataaaatttctacccaaaatactcagtacttacctcggtttcagaacctttgtgaacgttttgggtttaaacctgtttggttaactaattatgaaatggcgatggatgatagctatatcgaatttgctaaagatgtgattgttagaaatacgggtgaaataggaatgcatttacatgcctggaatagcccccctattgtgcctttgaccaataatgatatgcactataagccgtacctgattgagtatccgaaagatcagatcaaggcaaaaatcgaattgatgacaaatctgcttgaagaaaaacttcagactaaaatggtgagtcatcgtgcggggcgttgggcatttaacgaatattatgcacaattgttggttgaatatggctatcagatagattgttctgttacacctaaagttaactggaattttactacaggtgatccgaatggtaatggtggaacagattatagccatttcccgtcacatgcttattttatggatttgcaggatatttccaaagaaggggactctgctttgttacaggtaccaatgagtatccagtataagcactctctgtttatgaattttattaagcaaaaatacgactctctcagagggaaacaacgttctccatcggttaactggctgcgcccaaaaggtggtaatctggaacagatgaaggctgttgtccagcaaacattggtatctggtagtgattatgttgaatttatgttgcactcatcggaatttatgtccggcggtagtccgacgtttaagaatgaagaacaaatagaactgctttatcaggatctggaaggattatttgagtttttgaaaccattgattcagggaatgacattgagtgagtattatcaattaaggttatctacaaaaaatattgattttaaataaagtaaattagggtatttaagaatattgtatatgtagtgttaacaatacttatcttatctattgatttcattattaatttattaaagtgtattgaatataatgattatgaaaagagagaacagcttaatttcttcgaagatactatcaattattgtgcctgtccataatttagaggatgtagttcctaattgtatagatagcataaagaattgtttgtctgattgggatcctgacacatatgaagttttattgatagatgatagttcttctgatgcaacaccatctattttaaaagagtttgctaaaaagaatgattcttttatttatataagaaaagagttcagaagctt

SEQ ID NO: 552 - DNA, 1528 bp, Xenorhabdus sp.
  CDS (1024)..(1215)
ttgtttttatccatagtaaaaacataattaattatttttgaatatctgaagacgttgttgtatttttcagaagacgatacccagaaatatcaaaagtcggctgcattggtattatgtgtccgaaaccgtcatttttgatccagaagagaaagagtaaaaagttggcggttatcgcgatcatgactccaatagttagatcaccctattaaagaatacaacctcattgatgacatgcacctgagaaaggctatacggacggcaagaaaccgtacagagtcgtaccataattacaacgcattatccgtaaaatctacaataatgtgttcaaaggcagaaaaatcaccgacaaccgagtcagcgcccatgccgccaggttggtcgccaactgtattgtggcatacaacgccataatccttaaccgagtgtatgagcaaatggtatctgaaagtattccgaagcagatacgggataaatttgtaagaatttcacccattgcgtggcagcacttgttctttaccggtcggtacaacttcaaaaaagcgagtaagaatgccattgacatttctgcactggctgacctgctggaacagcacttaagacaagtattctggaagttataaactcagaatcgtcacttttgggggttcttcggcggaacccgataaagcaacgattgttcaggaatgtgaagcaggtttaattactatcaaacagctcaacggacggttggcatttatggcccctccgctggtaagaccaggcgatgtagctgatgacataatggctactattctgaaaggacttggtattactgctgatgatgttgaattgtgtcagtggatagataatggtcccggctggcttggcatcttactgaaatctatcgataaacttttggaaatacaacctgattatgcaccactgaaaaactatgagattggtttgtgtgcaatttatcctgaaggaaatcaggtaagtctggaagttaggggcttatgtggttcaatttctgaggaggatccggtgactggcagtctgaatgccgcttttgctcagtggttgataccacatgggaaattacccgcaaattataccgccagacaaggacgatgtattgaacgagatggctggatttatatcacttcagatgaagatggcatctgggtttcgggtgatgtagttgactgtatcagtggtatggttgaattcgattaagtaaccacacagccatgttgataaataaggtactaacaattttttcagcagaagtgtttagggcgtgttgacgtttgctcgaagggaattgggtggcatgataatttggtctcttattttcgccaaaaaactcgttacccgaactatcatgccacgacctatgttatcagatcctgtgtgggataagctatttgtcttcatgcaacaaaatcggcttacctatcataaaaaaacgcatcgcctcatcatggaaggtattctttttcgaatgagaaccgggataccctggcgggaactacctgctgaatatgga

SEQ ID NO: 553 - DNA, 1528 bp, Xenorhabdus sp.; identical to SEQ ID NO: 552
  CDS (1370)..(1528)

SEQ ID NO: 554 - DNA, 2082 bp, Xenorhabdus sp.; identical to SEQ ID NO: 137
  CDS (1825)..(2076)

SEQ ID NO: 555 - DNA, 2082 bp, Xenorhabdus sp.; identical to SEQ ID NO: 137
  CDS (1045)..(1635)

SEQ ID NO: 556 - DNA, 1243 bp, Xenorhabdus sp.
  CDS (224)..(658)
atgcgcgcgctagtacagacatgacatgctctttcactctcttaggtaaacgtaagctgaacgtttctgttgctctttctgtgtacagggcatctttcattttcatctcctcaataaaaccaatttagcattagaaccaacttggttctaaaaccaatttagcatcatttatattaatgtcaagttggtgctatgattaattcattataatttgaggtgcgccatgactaagaaatacccaagccaagaaatggatagatttaacgtccgtatgcctgctggcatgagggatgaaataacaaaaatagctgaaaaaaacgggcgttctatgaacactgagatcgtgatgatgcttcaagagggaattgatagaataaatggcattcccagccaatctgaatctgaatctgaatctgaagcggatggtaataaagtttaccacatcaaatcacgcttaaatccagacaaattttatacaattgaaatctcgcaggatgagcttgaagaagcctataaagcggctgtttacagcagtatattaagagatttaattaaacgaaataacgaaactgaatttgatgaattaagagaaatgatttcggaaacattcgaagaaaaactagctaagagaaatgaccgattcaacaaaaaaccataaatattgctttcagcttccactaatgggggaagttaaatttaatcaagttgttacctagctaccgccaaatttagcgttaggtctaagccctatttagggctttgctccagatcccctaaggtggtattctgccttagctcaggattaactatctatatcacggtagtttcaaccagagggttttacgaatatttcgtaaaactccctgcttagctcaggattaactaccgagattacggtaaattagaccagtgtgcatatttgcacagtgcgatatccaactgattttactcaattataacgaatcgttataatcactttcctaactacgaaaattccgtagttaccaacaaaaaagccccgtagggggctttcggtctaaatcctagtactaaattattctgtatcagaacaattaagcataatcaaagagttatatagaatttcagcgagaattaaaaaaacagtttagatacagcaatcgcaatactcgctgtagctatgatgattaacattatagtaggcttatgtcactgaacctaaatataaactctggctctggcataccgccattctggggtattg

SEQ ID NO: 557 - DNA, 1243 bp, Xenorhabdus sp.
  CDS (1144)..(1242)
caataccccagaatggcggtatgccagagccagagtttatatttaggttcagtgacataagcctactataatgttaatcatcatagctacagcgagtattgcgattgctgtatctaaactgtttttttaattctcgctgaaattctatataactctttgattatgcttaattgttctgatacagaataatttagtactaggatttagaccgaaagccccctacggggcttttttgttggtaactacggaattttcgtagttaggaaagtgattataacgattcgttataattgagtaaaatcagttggatatcgcactgtgcaaatatgcacactggtctaatttaccgtaatctcggtagttaatcctgagctaagcagggagttttacgaaatattcgtaaaaccctctggttgaaactaccgtgatatagatagttaatcctgagctaaggcagaataccaccttaggggatctggagcaaagccctaaatagggcttagacctaacgctaaatttggcggtagctaggtaacaacttgattaaatttaacttcccccattagtggaagctgaaagcaatatttatggttttttgttgaatcggtcatttctcttagctagtttttcttcgaatgtttccgaaatcatttctcttaattcatcaaattcagtttcgttatttcgtttaattaaatctcttaatatactgctgtaaacagccgctttataggcttcttcaagctcatcctgcgagatttcaattgtataaaatttgtctggatttaagcgtgatttgatgtggtaaactttattaccatccgcttcagattcagattcagattcagattggctgggaatgccatttattctatcaattccctcttgaagcatcatcacgatctcagtgttcatagaacgcccgtttttttcagctatttttgttatttcatccctcatgccagcaggcatacggacgttaaatctatccatttcttggcttgggtatttcttagtcatggcgcacctcaaattataatgaattaatcatagcaccaacttgacattaatataaatgatgctaaattggttttagaaccaagttggttctaatgctaaattggttttattgaggagatgaaaatgaaagatgccctgtacacagaaagagcaacagaaacgttcagcttacgtttacctaagagagtgaaagagcatgtcatgtctgtactagcgcgcgcat

SEQ ID NO: 558 - DNA, 1333 bp, Xenorhabdus sp.; identical to SEQ ID NO: 18
  CDS (12)..(209)

SEQ ID NO: 559 - DNA, 1333 bp, Xenorhabdus sp.
  CDS (702)..(1052)
agtgtcctctaaagctttagagcaaggcgatatcacaaaagcatggcgaagaaaaaggtaatagccgctatctttatcgcttgtttcctaaagggccggcaaagcaagcaaccaaaattgcagggttaccaaaaccagtgaaatgtatctgagtctgtcatccgccttcaatggcggatgctgaaatcagccatttcctctatctcacaaaactgaggctgaaaatgttcaattttcgcgcccggaggtcctcccttctccagccaatgtattagcgctgctatttgttcttcattaccacaggcaacgattttgacactaccatcattcatattccgaacataccccaataacttatttttctttgcccagtagtatgtctgataacgaaaaccaactccctatactcggccataaacataaatagtgatgctttgaactgtcatttctttttctccctcaaacaaaatcgaaaagcggctcttcagtatcctgatggaaaagtatttattttctgttatgcaatagactgaaaactatcaggtataataactttggcatgctaagaccacttttagtattgtattttatatacacaacagctaacctgaaatatgagatggtgatcacataccatctcaaatgcaagattccggttaccgggtgtgcgcttgaaatttaccttacggcccttatataagagtgattgcaaggtttctctggaggtgactatgatgatcgccagcaaattcggtatcggccaacaagtgagacatagcctgttgggctatctgggtgttgttgtagatattgatgccgaatattctttagaacaaccacaggaaaatgatatcgcatctaatgctactttacgttcagctccgtggtatcacgttgtgatggaaggtgatgatgggcaacctgtccacacctatttagccgaggctcaattgacttacgagatatcagatgatcatccggaacatccttctctggatgagttagctgaatctatccgcagtcaattgctggctccaaggttacgaaattaaacacattcctttaaaaagttaaacgatactgataaggaaaggcgatgaaataaaaataacccatcgccttctttacttttctagtcctaaacgtgggatctcaattttcgggcaacgatccataatcacatctaaccccttattttctgccagtaatttcgcctcatcattaattacccctttttgcagccaaagcacttttgctctaatggcaatcgcttcttccgcaataccataagcagctgttgcattacgaaagacatcaaccacttagaggacac

SEQ ID NO: 560 - DNA, 1333 bp, Xenorhabdus sp.; identical to SEQ ID NO: 559
  CDS (24)..(149)

SEQ ID NO: 561 - DNA, 1412 bp, Xenorhabdus sp.
  CDS (35)..(937)
catgcgcgttctataaagattggtcattcattatgcatggactgtcgatgaaaacggtagtctgaaaacgttaacatggggaatgtcgcgccgtgaaacacgggtttatactcgtgaaggtgatatcttcaaagaaacaaaagagtttcagaaaggtgagtgggtaaacagtgtcataaaaggctctgtgaatggtaactttaccggaagtgctttggccgcagggttaaccagcagcgaagcaagggatgtgactaaagcgcttcaatggcagattgatttccgcaagctgcgaaaaggtgatcagttttctgtattattgtcccgcgaaatgcttggcgggaaaagtgaacagagccagctattgggtgttcgcttacgaagtggtggtaacgactattatgcattccgggctgatgatggtcgtttttacgatagtaatgcatctggtttggagcgtggttttttacgtttcccaacaacaaaacagttccgggtctcttctccttttaatccgcgtcgtttaaatcctgtcacgggaagagtgacagctcatagaggcgttgattttgccatgcctgtaggaacacctgttctggctgttggtgatggcgaagttattgttgccaaatttgatggtgcagcaggtaatttcattgctatccggcatggtcgtcagtacacaacccgatatatgcacttaagaaaattactggtaaaaccgggccaaaaagtgaaacgtggcgaacgtattggtctgtcgggtaacactggccgcacaactggccctcatttgcattttgaattctgggataatcagcagccggtgaatccattgactgcaaaattacctcgttccggtggattaagtggtaaagatcgttcggaatatattgcgatggttaaggagcttaaaccgcaactatcactaaattaaaaatccagattgttaacacataaaagcggatgattggtatcatccgcttttatcttttatgttatgtttgttgacaacagattgaaaacaaatgatttggaagtttatgttggagccagcagagttagctcatgaataaagaaaaagatacagatagcaaactgggttatatcccaacgtttcatttatcctatttgcaccctcgttattggggaatttgggctggtgttggaatattggcaggtttggcttatatccccgctaaatggcgtgaccctttgctggctaaaataggcgtttttgctggccggaaggcaaaaagtgcccggcgaagagcgaagattaatctgctgtattgttttcctgaattatcagaaccacagcccgaaatattaatcgacaaaatgtttccaacagagccccaattattttgttttgccttggccgagctttgtttgaaaggtgtggagcctac

SEQ ID NO: 562 - DNA, 1412 bp, Xenorhabdus sp.; identical to SEQ ID NO: 561
  CDS (1105)..(1407)

SEQ ID NO: 563 - DNA, 1828 bp, Xenorhabdus sp.
  CDS (790)..(1827)
tgccctaaaggtgtgtattaacatccagtcaacaatagagtggcatcaaatatgttaattttttgataattatttaatgcattttatacctatggatttcgtgctgtatcgaggctgcaaatgcataaagccgctaaaaaacgacctgaaagagtaaaggcatatatcattattaatttaacggttgtacaagtcaggattaatccagctaaactagttttagtattctcttggcttaccaacaaaaatttaagttattgaggaaatactatgttccagcaagaagttactattactgcaccaaatggccttcacactcgccctgccgcacaatttgttaaagaagcaaagggtttttcttccgatattactcttacttctggcggcaaatcagccagtgcgaaaagtctgtttaaattgcaaacgctgggactgactcaaggaactgttgttacaatctctgctgaaggtgaagatgaacaacaagctggtgaacatttagtgaaactgatgggtgaactggaataatcactcactcatactcaatggatttcaagtggaatcacgatggcaagggagctaacctttagggtacagagcaccgtattcttataaaaacggtggctatagtaagtacagccaaaaaagaacccacttgaaaggcaacgagtatatcagtccagtctatttcatccagtaccatccccggaatacaaaatctggggatatttagagcctgcctctgaaggcgcaatgaaatataatcacccgcagttaaggtcatatagtatgatttcaggcatcttagtatcaccaggtattgctttcggtaaggcattattgctgaaagaagaccccatcattatcaatcataaaaaaatcactcctgaacaggtcgaacaagagatctcctgctttaaacaaggccgggataaagcttctgctcagttagaagtcatcaaaaatacagccgaaaaaaatctgggtgcagaaaaagccgaaatcttcgaaggacacatcatgttgctggaagatgaggagctggaacaggaaattattacgctaataaagaaaaatctggctacagcagatgccgccgttcactctgttatcgaagatcaggccaaggcactggaagagctggatgatgagtatttaaaagagcgtgcagctgatgttcgtgatattggtaaacgcctgctgaaaaatattctgggtatgccgattattgacttaggatccattgcggaagaagttattctggttgcaaatgacctaacaccttcagaaaccgcacagcttaatctggataaagtgctggggttcattacagatctaggtggccggacatctcatacttcaattatggctcgctctctggaactacctgcaattgtcgggacaactaacgcaacaactcagattaaaaatggcagctacctgattttggatgctgttaataatcatatctatatagacccatctgacactgaaattgaacaactcaaaaaaatcaaaaacgaatatctgtcagaaaaaaccgaattagcaaaactgaaggatttaccagccattacgctggatggtcatcaagtagaagtctgcgccaatatcggcacggtgcgtgatattgcaggcgcagaacgcaatggagcagaaggcgtcggcttgtaccgtaccgagttcctgtttatggatcgcgattctctgccgactgaagaagaacagtttgaagcctataaggctgttgccgaatccgttggtaatcaggctgttattatccgtaccatggatatcggcggtgataaagaactgccttatatgaatc

SEQ ID NO: 564 - DNA, 1828 bp, Xenorhabdus sp.; identical to SEQ ID NO: 563
  CDS (271)..(528)

SEQ ID NO: 565 - DNA, 1549 bp, Xenorhabdus sp.
  CDS (184)..(1185)
cgatgaagaatctttggctacaattcagggtaatccaccaaatttactgcgcttaccaaaaggttgcccatttcagcctcgttgccagtttgcgactgaacattgtgtgagtgaagaacccccgctggaactatttaactccggacgcttgcgtgcctgcttcagacgtcaggaggaattagtatgaatacagttactgaaaaaaaagtccttctggaagtggatgatctgaaagtttactttgatatcaaagatggtaagcagtggttttggcagccttctaaagagctgaaagccgtagatggagttaccctgcgattatacgaaggggaaacactgggcgtagtaggggaatccggttgtggtaaatcaacacttgccagagcaattattggattagtcaaagcctctggtggctcagtgacctggcttggccagaatctatttgatctcaatgacaaacagtggcgggatattcgcaatgatatccagatgatttttcaggatcctttggcctctcttaacccgcgtatgactattggtgacatcatcgccgagccactgaaaacctattatcccaaaatgaaagatgtggagataaaagaaaaagtcaaaaaaatgatgatgaaggtagggttattaccgaacctgattaaccgttatcctcatgaattttcaggtggtcagtgccagcgtatcggaattgcccgcgccctgatattggaacctaaactgattatctgtgacgaacctgtttccgcactggatgtctctattcaggcacaagttgtaaacctgctgcaggatttgcaacgagaaatggggctttccctgatttttatcgctcacgatctttcgatagtaaaacatatttcagatcgcgtattggttatgtatctagggaacgcagtcgaactagggacttacgacgaggtttatcacaatcctctgcacccatatacccgagcattgatgtcagcagtgccgattcctgaccctgataaagagcgctacaaacagattgagttactggaaggggaactgccttcaccaatcaatccgccatccggatgtgtattccgtacccgatgcccaatggctgacgcggaatgtgccaaaacccggccattgctagaaggtagctttaaacatgccgtttcttgcttaaaggttgatccgctttagaatccaagatcacaaaaaatagataaataataccgctcgcattcatacgagcggttctttaattatctgtgtactttctaaatccactgaatcagagatgaatatttttggctggtttgataatgaaggccatcttttaaattaaaaaaatatctgcttatttattgtatttaagtgagtttgatgatgattcctatcgcatgtttctgtacaaaacaataggaaagaatacagggatatacttaatcaaatctactaattacatatgtttaatatatgctttaatcttaactgttttgataatctgatttatctttgcaggtgtggtaactaatacagattattttaaccctatcattatggg

SEQ ID NO: 566 - DNA, 1642 bp, Xenorhabdus sp.
  CDS (905)..(1636)
cagaaaattgcagaagaagcagcagccaaagcgaaagcagagcaggaaagaattctgaaagaacaggaagaggctcgacaaaaggccgaggctcaggccagaaaagaagctgaagaagcggcgaaacgtaaagccgaagcggaagcgaaggcaaaagcagaggctgaggcaaaagctaaagcagaagccgaagcgaaggctaaagcggcggcagaagagaaagctaaagcggaagcagcagctaaagccaaagcagaggccaaagcaaaagcgaaagccaaggcagaagaagccaagcaggctcagacagtcgatgatttgttaggggggctaacttctgacacacctaaaccgggaggtgcatccgcagcaggtaaaggcggaggcaaaaaaagtggcgcttctgaatcagatatcaataattataaaggacaaatccgggcagcaattcaaggtaagtttcttgatccgagcttgttcttagggcgcacctgtgatttgacgataaaacttgcaccggatggtatgttaattagcattcatgctaatggcggcgatcctgctctgtgccaagcggcaattgcagcggctaaccaaactaaaatgccccgaccaccaagtaaagaggtttatgaacatttcaagagcttctcactagactttaagccgtagtaagataaatatttggtaataatggataatttattaggtaaaactgcggataatttatctatgtaaacaaaatcatcagattttatttaggtatctggttttgtttgttggcgtttgttagaatccggcggattattgcgggcatggtgatcgcgataagggagagatgatgaagcaaacttttaaactgacgtttaaggcattattgggctttctgctgctgtgggcaacagttgtccgtgcggaagttcgcattgaaattacagagggtgttgattcagcccgtcctattggtgttgtaccattcaaatggactggggcggataatccacctgaagcaattggttctattgttgcagctgatttgagaaacagtgggaagtttaatcccatcacttcagatcgtatgccacaacaacctaccacagcatctgaagttacgcctgccgcatggtctgcccttgggatagattcagtggttgtcggtcaggttcagcctgttgctgatggtaaatatttagtttcctatcaattggttgatgtcgttggtacgccaggttcggtcttggctcagaatcaatttcaagttgataaaaaatggttgcgctatgctgcgcatacagtcagtaatgaagtttttgaaaaactgacgggtatcaagggagcatttgcgactcgtatagcttatgtcgttaagaaaacagccacagataaatacccgtatgaattgcgtgttgctgactatgacggctataacgaaaatatcgtgcatcgttcaccagcacctttaatgtcaccggcatggtcaccagatagttctcaactggcttatgtgacatttgaaggcgggcactcttctctggtgatccagacactggcaacaggggctgtgcgtcagattgcatcgtttcctcgtcacaacggtgcaccggcattttccccagacggcaccaagctcctttagagcaca

SEQ ID NO: 567 - DNA, 1642 bp, Xenorhabdus sp.; identical to SEQ ID NO: 566
  CDS (1)..(672)

SEQ ID NO: 568 - DNA, 1589 bp, Xenorhabdus sp.
  CDS (1)..(429)
gcgattggaaaaagccggggtggacgctcgactaaaatccatttggccgtagacagttacggcctgcctgttcattttgaattatccgagggacaaactcacgacatggtgcatgcggaaagtttggtggcgcaatcaccgcccgcggattttgtcgttgctgacaagggatacgatagtcaggcattgagaacttatattgaagaacaaggtgcaacagcggttattccctaccgaaaaaatagccgaaattcggataaaaagtgggataaggatttatatcgttatcgtcatttagtcgaaaatgcatttgccagaatcaaacattttcgtgcaatcgccacaagatacgataaattagcgagaaattacgccagcacattagcactggcatttatcattatctggttacccatgtgggtcgagtaagtgatgaaaacaaaacgtcaacacgccctaaaagtgtcaaaaagtgaaacctatatatcttaggattatttccatctaatcgcagtctaaaaggaaagcatgatgacacgagtttctttagtacaaagtttcccaaatatttatcaacaactgaaaatagtgaatgctgaaatcgataaatcagctgtgtctgtcggtatcagagaagggttttgccatctgctaaaattacgtatatcccagattaatgggtgtgcatattgtgtcaggttgcatacccgggatgccttacaacagaacgaatctatcgataaagttgccgtgctgccagcctggaaggaaacagaatattttacagaaaaggaacgggctgccctgttattagtggaagcgataacagaaatacaaaatgatcatattccagatgatgtttatcaaaaagcagcaacggtatggagcgataaacaggttgcggcaattgagtggctggctattatgatgaacgccctgaataggttaggaatagccggaagataccatgttgctccgtagtttttccatggtactttttctatggtactacccgcctgaatcaggcgggtatgcaaacggaaaactacccttttcttttgttaatcgataatgtcagtgattgtgttttttggtccgttatcagcagtaataacagaccgacgagcgcaacaaacccccccgaataactgaccatttcataccctaaccccagtgataaaacagttgcccccaatgcagcaccgatggcattacccagattaaatgcaccaatattgacagaagaagctaatgactgggcttcagatgcaacctgcattacttttagctgtaatggcgggacaacaccaaagctagccgctccccaaaacactaatatgataccgccagtaatcgtgtctttcgcgatttgtggaaatagcatcataatcaggaacagtgatgcaaataatccataaagcgttttggatacagaacgattagccagaataccaccgatataattcccgacggtaaaacccacaccaaccagtaccagcattatactgacctgtgtttctgcgacatgagagagagtcattaacattggcacaatataagtatagaaagtgaacatggcgctggcccca

SEQ ID NO: 569 - DNA, 1589 bp, Xenorhabdus sp.; identical to SEQ ID NO: 568
  CDS (538)..(981)

SEQ ID NO: 570 - DNA, 1589 bp, Xenorhabdus sp.
  CDS (2)..(544)
tggggccagcgccatgttcactttctatacttatattgtgccaatgttaatgactctctctcatgtcgcagaaacacaggtcagtataatgctggtactggttggtgtgggttttaccgtcgggaattatatcggtggtattctggctaatcgttctgtatccaaaacgctttatggattatttgcatcactgttcctgattatgatgctatttccacaaatcgcgaaagacacgattactggcggtatcatattagtgttttggggagcggctagctttggtgttgtcccgccattacagctaaaagtaatgcaggttgcatctgaagcccagtcattagcttcttctgtcaatattggtgcatttaatctgggtaatgccatcggtgctgcattgggggcaactgttttatcactggggttagggtatgaaatggtcagttattcgggggggtttgttgcgctcgtcggtctgttattactgctgataacggaccaaaaaacacaatcactgacattatcgattaacaaaagaaaagggtagttttccgtttgcatacccgcctgattcaggcgggtagtaccatagaaaaagtaccatggaaaaactacggagcaacatggtatcttccggctattcctaacctattcagggcgttcatcataatagccagccactcaattgccgcaacctgtttatcgctccataccgttgctgctttttgataaacatcatctggaatatgatcattttgtatttctgttatcgcttccactaataacagggcagcccgttccttttctgtaaaatattctgtttccttccaggctggcagcacggcaactttatcgatagattcgttctgttgtaaggcatcccgggtatgcaacctgacacaatatgcacacccattaatctgggatatacgtaattttagcagatggcaaaacccttctctgataccgacagacacagctgatttatcgatttcagcattcactattttcagttgttgataaatatttgggaaactttgtactaaagaaactcgtgtcatcatgctttccttttagactgcgattagatggaaataatcctaagatatataggtttcactttttgacacttttagggcgtgttgacgttttgttttcatcacttactcgacccacatgggtaaccagataatgataaatgccagtgctaatgtgctggcgtaatttctcgctaatttatcgtatcttgtggcgattgcacgaaaatgtttgattctggcaaatgcattttcgactaaatgacgataacgatataaatccttatcccactttttatccgaatttcggctattttttcggtagggaataaccgctgttgcaccttgttcttcaatataagttctcaatgcctgactatcgtatcccttgtcagcaacgacaaaatccgcgggcggtgattgcgccaccaaactttccgcatgcaccatgtcgtgagtttgtccctcggataattcaaaatgaacaggcaggccgtaactgtctacggccaaatggattttagtcgagcgtccaccccggctttttccaatcgc

SEQ ID NO: 571 - DNA, 1261 bp, Xenorhabdus sp.
  CDS (451)..(576)
gtgccctctaaatactttcggcaatgtgtttcggtgctctgattggggcggaacgtcagtgacgtcagtatatggcggggttaagaaccaatgcattagtcgcaactggtgctggtgtgattatgaaagagggaatgaacatccgcggattaaatactgcggcaacattatggtgttcggtgggtattggcgtttcgtgtggattgtaacaatacttttatgcgactacttctgtaaaaataattttatctgaaatgttttattcagagagtcaatgctcagccacaatagcagaccttagatttagatcagagttatcaaattcacattatttgtgatattggcgatgaaatcctgatcagtactttgatcctacaggcaattaatggattaaatgtccggctacagtcactaagtagtgctgatgcaattcagcctaatcggcttgaagtgtgtgcagaaatactggcaactccggataagcaaaaagagatcgaatcgattgtttgttgggtgagtttagagaaaagtgtcagttccgttagctggaaaattgcctctgaattacctgcttagattaatttgagaccataaatagagtgttacctgttaaacaatacaagttattaataaataaaaatgtaaataatattgattatcactattatttattaataatagtggactgtattctattcaggtaacactaaaatcttttattccgttgtctttttaggtatttccttattggcaacgctcacttcttctactgtttataaacataccattatttatactccccagaattaatgagagattgaaatccctcaccggaaaacagcctttgactgaacaaattcttttccgatgaatctgttgctctgctgccattgttatgcaatccaaaaaactatgaagtatagtcttctacacagctacagaaaaattgatgagttaccttgtcattacactcttcgaaaattatcaatttttgttcaggatcttcggtaagatcatcaattaatttgcaaaagtgtagtaggggagcagtcattagtttgctgtaatgtgccgctaaaggaacaaattacttctttcactgaagaaaatcacaacaatatcatggagaaggttgattattacaatgaacaaggtttcagggtgttaatcttaacaatcccggagttaaattctgatgaagtgaaacattcactttctgttgctgatgagaatggcacaatgtttaggttaagtagcttag

SEQ ID NO: 572 - DNA, 1308 bp, Xenorhabdus sp.
  CDS (1)..(1308)
ttaaccgataacggttacctgattacaacgcaaattaatgctgacaaattttcaggtgactcgcgggtgaaaggtgcttattcgctggatatcacccccaagagagcacatatagttgcttttgatcagtccggcgtgttttacggtctgcaatcgctgttttccctgatcccggctgatggcgtaccgaaaattgccacactaacagcacaagatgcaccccggtttgagtatcgtggcacgttccttgatgtcgggcgtaatttccatagtaaagaagctgtattgcgcctgctggatcaaatggctgcttataaactgaataaattccatttccatttaagtgatgatgaaggctggcgtctggagattcccggtttaccggagttaacagaaattgggagtaaacgctgtcatgatttaagtgagacaaagtgcctgctaccacagttaggctcagggccggatagcaataatatgggaagcggttacttcagccgtcaggattacattgatattctggaatatgccaaagcccgtcagatagaggtgatcccggaaattgatattccggctcatgcccgtgcagcggtggtgtcaatggaagcccgttataagaaactgatggcagaaggaaaagagcaggcatctaatgaatatcgcttgctcgatccgacagatacctcaaatacaacatctgcacagttttatgatcgccatagttatctgaatccatgtatggactcttccaaacgttttattgacaaagttatcagtgaaattgccgacatgcataaagaagccggttcaccgctgacaacatggcactatgggggggatgaagcgaaaaatattcgtctgggcgcgggatatcaggataaagatggcccgattgagccgggtaaagggatcatcaataagaaaattgaagataagccgtgggcaaaatctcaggcttgccaaaaaatgattgcgaaggggattatcaaagatgttgatgaactgtccagctattttgcggttgaagtcagtaaaatcgttaataaatatggcattgatacgatgcaatcatggcaggacggactgaaacatgcgaaatcagcaaaagactttgctacacgacatgtcgcggtaaacttctgggatacgctttattcgggcggcgcggattctgttaatgactgggccaataaaggctatcaggtcattatttccagtcctgattatgtttatctggatatgccctacgaggtcaatccgaaagagcggggttactactgggcttcccgttttaatgatgaagcgaaa

SEQ ID NO: 573 - DNA, 1217 bp, Xenorhabdus sp.
  CDS (431)..(775)
  unsure (1)..(1217): unsure at all n locations
tgtctctaagnaaaaatattggtcacaattatggttatcttacccttaatcaatcgttatatcctagtacctaaattaaagcaaaaagggcgctatgaattgctaatgatcaacagttggctggaaatcattatgggaacagctgccctgctatgtgttgctatttttgcaacagaacctcctgtgtgatccttatttacatgaggcatattccattttggttggcttagccatttttcaactgtatttcgtattaaacgtataagcgcagagtttctgcgctgccatttccctgcgagtattgtgtagtgcagttaagtgtattggttatggtaatgagtgtagtctttagctatataaacagggaaaagggcgttagaattcgggttgtgtatttatctggggaataacaatgaaacgagtattttgtgttttatcttttttgttttttacttttcaggggatagccgctccaatacaaactgtaagtaaattacagttcggtaagcaatgggctttcacccgtgaagaggttatgcttgattgccgttcaggaggtgcattgttcgtgatcaaccccagtacgcttatgcaatatccacttaatgaacgagcagaagaacttgtgcaagccaatcaggttattgcaacaccgcttagtacaatacttctggatgatcctgaacataataatcaaaaaatgagcattgaaccatttcaaaaggcagctatgtctttatgtgattataaatcaggtgacaaaaaagataagtgatttttattgttaatatgaatgaaatgtcaattaatgtgctaatgaattaatcaaaattggtaaattaccatgtgtcaactactctttaagaggtaagttgttctacgtctcaatggcattttagcgcacggctctctaacagagccattttccgtagacacagtagaggaataagcccggccattttttaataggctccccataagcagtgaataattttactcttttttcacaggatcatacttttcctaatttgtataatatgtacagtccacgttaaacagcgataaacagcctgaatatggcgaaatgttgcaacaccatccgtggtcggtaaagatccattcaaaaatcactatttctttgctggtgctgagctttaacataaatacgccccagtcacatagttatctatgccactggggattttaatgagagaggc

SEQ ID NO: 574 - DNA, 1325 bp, Xenorhabdus sp.
  CDS (824)..(1192)
tgtgctctaaagcaacaagctcaataaatttctgttctctatctggagctcgatttaatattttttggtaactatcatcttttgtgtcaaaaaaaccgaaaaagtaaagcccaccagcaattaatattaaaaggcttattgcatttttcatttttactcttccgccgctttacagttagttattataatattcatgccgttttcaccttgattaatcacataagcaatctgacttgctttgactattagactgtaagttcgattcttacttaatttattatctatgggtgcatacgatgttaatgcagagcttgctttatatagacgcaaggagggcattaaagtcatctccgtctgttcaccgctagtagtaaatatcttcattgcaatctttttgttattgttgtctcccgcaataagtattgcagccgcaccaagcactcccatatctaaaacctgctcctcccctttcaggaatgggtacaccagacatgtatatgctccgttaatggcgtaatatcgcatttgagcatcaaccccaacaccattactcttatcagcaatagcacttacagaagtaagcagaatgactatacaaaagattttctttaacactcatcaccccacataacaattaatttgctccaagtataaccatcatgctcaaataaaacacaggctaaacaaattagtgttatgctgtccacatagatcaactactttgaggtgcaatgtaatgagactaataaaagccgtactccttatgattgccactgtaatagcattaccttctctggcagcagagaataaaaaatatgaatctatgacagatgctggtaataatttctatatggatattcggaatggtgaaatatatggcatctactatgaccctaagccaattgatggcgtgagtgcttggataggatgctctgatccatctacagaccttgttacagttgtctctacttttccagatgaaagaaccattgaaaaattcaaggttaaagatagcaagggtgattatgcaacctatgatatttcaccaatctataaagacatttcaaattttgcacgtggctacataagctccttgattaagcaagatgccaagataaagttgacttatcgtgcttgcggcagcggcggctaccctacctttgaatccgctgaacctattaaacactcttaagctaagcgggaatctccgcttagcccatcgatgtcataatctgagacaaacttagcctagcggcctctcctgcatcggttacagttcctgttaccgtattggaaagtaaaaacccgcacagggcgggctttaa

SEQ ID NO: 575 - DNA, 954 bp, Xenorhabdus sp.
  CDS (3)..(953)
aaagggatgactgcgttgcccattgcgccaatcccgctttcgatgccgccacgtgggaaatctggtcagccctgctgaatggcagttgtctgcatattgtgcctcagacggtagtactcgaacccatcggtttccgtgaggcactaatcaggggaaaagtaaccgcattatggttaactgccggtttatttaatgaataccttgatacattacagcctgtgttcgggcagctccgctacctgctggtcgggggagatgtcctcagcccgcagaagataaaacaagtgctgtcggcagaccatccgcccgctcatttaattaacggctatggcccgacggaatccactacgtttgccacgacctatgcgatcaccgcgccaattgatggcatgcagtctatcccgattgggcgccctatcgccaatacccggatttacctgcttgacgcccatcaacaacccgtaccgatgggtacactgggtgaaatttatatcagtggcgagggtgtggcgcgaggttatctaaaccaaccggaattaaccgccgaacgtttcctcaccgatccgttctctgccgagccgggcactcgcatgtacaaaaccggtgatttaggtcgctacttgccggacggcaatatcgactatctgggacgcaatgattttcagattaaaatccgtggattccgtattgaactgggggaaattgagaatgcgttagcggcacatccgcagatcaaacaggccgtcgtgattgaccgtgagcatcagggtcataaagtcctggcggcgtatctggttgccgaggacgcagtctccgatgaaatgctgctggcgcacttatctgatcgcctgccggactatatgctgcccgccagctttatctttatggaatctatcccattgaccttaaacggtaaagtggatcgcagaaccttgccagaagcaggttttggta

SEQ ID NO: 576 - DNA, 1267 bp, Xenorhabdus sp.
  CDS (911)..(1033)
aacaaaataaggggtaataagccttggttgcctttacgtgcaatggttaattaatattccgataataaaatactgaacaaaactaatgctagatagatccataatgactggtattgttgcaaggcaagcatgtattccgttggtattaaatagtaaactctgaatcagtaaaaagtaagagaaagtactgcgatacttatttttagctaaagagaagaaaaatttttcagatggctcaggggaaaagcagtcagtcaccgacgatataaccatgccagaaaaagtacagtaatggccattatcagacaaaaaataaaggttctgtagtaccaatattgaaactgccagtactaataaaaaagtagattatctacagcatagacaatagcaagtgatatacatacaacaataactgagcttaataacaagatgaaaaaacgcataacctgatggtataataaattcatgcaattgatatccataaagtatatttaatctataattcattagattatgattgcatcttattttaatgtataaatcaaatttcttctcccgaaaactaattaattactgacaccgataaaacgtttcttcaggatattccgatattttttctgataggaaatggtttatgaggaaattgagtttcttgttttgtgtaggattggtactgccgttatcagccagcgcaaaaactgtcgtttatgccgacagccaacacaggcccactcacctttcccctgagacacaggtcgtctggctggatgcggctgagcaacagcaaaagccattctttgctcagctttcctccgatccgcagcaagccttgattcaggcataagcgatgctgcaatcaccccaatggcgtcagcaggaacagcaactcatcaaggcttaccgtgctgtggtgcaggcatggaaatccggtgtgcagaagtatccggccgtggtctttgatgatagggaggtggtgtatggcatcgcggatgtggcaaaagcccgcgcactcagggagcaacatcagccatgagtcttcaacgtgtgacgtttcctgcgctcattaccctgatagcggcatttactccggtgacacaggcttccatcaatacggcccagattgtcgccggcagtctctcgcccgcgtgcattcagtggcgggttagtggactctgttactggctgctctgtggcctgcacggttgtaccgtgaaaacctcggtgaaggtgacccattatctccccacagaggcgttgcctttagagc

SEQ ID NO: 577 - DNA, 975 bp, Xenorhabdus sp.
  CDS (582)..(974)
attttaacaacaggaccaacgtcaccatcgtggcggaactggcgaacggcaagactatcatcggtgaaggcttgtggaccgtaaatacgcaggaagtgaagagcgaagatgcggagtttgaagttcgttgggaaggcatttcagtcactgaaaactaaggaattcacatggaaaagaccaagattgtgcagttaagtaaatccattgagagcaatgacggcaaggagatttatcaggaaattcatctgcgtgaaccgtttctgattgaggttgagcagttctatgatgcgcaagcgaaaaacccgaacagctccctgccggcaatgcgtttgttaattgcgttagtgtcaaatatccccgaatcagtcttaaaaaagatggcaatcacggattttaatatttgccgggagtttcttttggtttttttgtcgggcaatcaggactccagcattggcaacaattagcggccgaggtgacctatttttatcactgggggccacaggatgcgtggcacctaagccgaacacgtctcatgtggtgggctgagcaggcagaacgaattaatcaggtgaggtcaggcaatgagtaatacatttgactttcaaatcaatgcagatgagaacgtaactaaagcaattacggctatggaggcgcagctaaaaagcctgtatccatcattgagaggtgttcgtgaagagttacgttttggcggtagtgaaacgctggataatgtcggctccgtcagtgataaattgcgcgacatgtcgcaatttgccaaagataacgttcagcacatcggggcgattattccaccgttaaaaaatgttggcgaactgaccgctaaatatggcggtctgatgaaaaaatacggtgggctcgtcggtggtgtgggcgctatcgggtatggggcaacaaaactgtatcaaagtatgcgggacgcaggtcaagaagctattgctcgcagtacaagggcaa

SEQ ID NO: 578 - DNA, 975 bp, Xenorhabdus sp.; identical to SEQ ID NO: 577
  CDS (186)..(464)

SEQ ID NO: 579 - DNA, 931 bp, Xenorhabdus sp.
  CDS (437)..(928)
gatgctgtgatgaaacggctttggaagcaggcgctgatgatgttgaaacttatgatgatggtgcgattgatgtctatactacaccagagagttttggtgaagttaaagatgcgttggatgcagcgggtttcaaggctgattctgccgaagtttccatgatcccatcgacgaaagcagaactggatgcagaaacagcacctaaattacttcgtctgattgatatgcttgaagattctgacgatgttcaggaagtgtatcacaatggtgaaatttctgatgaagttgcagccttgctgtaattaacattagggttcacagcgtagagaaagtgcacctcatgtcagggcactttctctaacgtttttatttcatgcattcttattccggatttctttattctatagtttttattctatacaacaggtgaataaacagcatggcggttattcttggtatagaccctggttccagagtgacagggtatggtgttatccgccagcagggacgacagcttatttatcttggcagcggttgtatccggacaaaagttgatgatcttcccggtcgtttacagcgaatatatgcaggtgttgctgaaataatcactcaattccaacctgatgctttcgcaatagagcaagtttttatggcaaaaaatgcagattcagccttaaaacttgggcaggcgcgtggtgttgctattgttgcggcagttaatgaatccattcctgtatttgagtatgcagcacgtcaggtgaaacaaacggttgtgggcaccggcgcagcagataaaagtcaggttcagcatatggttcgttcaatgctgaaattatcagccaatccgcaggccgatgcagcagatgctttagcgattgcgattacacattgtcatatgagccagaatttactccgtatgggcaatctttagagc

SEQ ID NO: 580 - DNA, 931 bp, Xenorhabdus sp.; identical to SEQ ID NO: 579
  CDS (3)..(299)

SEQ ID NO: 581 - DNA, 1242 bp, Xenorhabdus sp.
  CDS (2)..(562)
tccggttgaattattacctgatattgaaacgggagcttccgtttctcataatggctgttgtctgactgtcacaaaaattgatggtgacttaattagctttgatttgatgaaagagactttgcgtctgactaatcttggtgagcttaagattggtgatttagtgaatttggaaagggcagcaaaattcggtgatgaaattggcgggcatttaatgtccgggcatgtgattacaacagctgaaattgcgaaaattttcacctcagaaaataaccatgaaatatggttccgtatttatgacaaacaattgatgaaatatatcctgcataaaggatttgttggcattgatgggattagtctgaccattggagatgtagtaaataatcgtttttgtgttcatctgataccagaaacgttagagcgcacgacattgggtaaaaagcgtattggtcataaggtgaatattgaaattgatccacagactcaggcgattgtagatactgttgaacgttttatggcacagaaagaacaagaaaaagtattatcacagttggaaggtaattaaaatattgcagaaaaaagctacagttttcatttctgtagctttttaatggtattacaaacccactagcaaaatattaacgcggaactcttaatccattttcaattccacgtgggctgaacataacctgccataactggatatctctggcacgaaatgccccggcgcaggcattcagataataactgaacattcgtttgaagcgggggctataattatgagctattttatcccagtttgtaataaaacgttcataccatgccatcagagtacgatcatagtcagctccgaagttatgccagtcttccatcacaaatttcccggtgctggctttggcaatcattgcaattgatggcaaatgcccattagggaaaatatatttaccgatccacgcatcgacattcactttatcccggttggaaccaatggtgtgcagtaagaaaagaccatcaggcttcagattcctacgtactacgttgaaatagttagcataatttttggagccgacatgttcaaacatgccgacagaaacgattctgtcaaactggaggtttagatcccggtaatcttcaaggataattttcacatccagatctttacagcgctcctgagcatatttttgttgctccactgaaatagtgactccagtgacggaaacggaataatgtttggctgcgtaagcg

SEQ ID NO: 582 - DNA, 1242 bp, Xenorhabdus sp.
  CDS (2)..(607)
cgcttacgcagccaaacattattccgtttccgtcactggagtcactatttcagtggagcaacaaaaatatgctcaggagcgctgtaaagatctggatgtgaaaattatccttgaagattaccgggatctaaacctccagtttgacagaatcgtttctgtcggcatgtttgaacatgtcggctccaaaaattatgctaactatttcaacgtagtacgtaggaatctgaagcctgatggtcttttcttactgcacaccattggttccaaccgggataaagtgaatgtcgatgcgtggatcggtaaatatattttccctaatgggcatttgccatcaattgcaatgattgccaaagccagcaccgggaaatttgtgatggaagactggcataacttcggagctgactatgatcgtactctgatggcatggtatgaacgttttattacaaactgggataaaatagctcataattatagcccccgcttcaaacgaatgttcagttattatctgaatgcctgcgccggggcatttcgtgccagagatatccagttatggcaggttatgttcagcccacgtggaattgaaaatggattaagagttccgcgttaatattttgctagtgggtttgtaataccattaaaaagctacagaaatgaaaactgtagcttttttctgcaatattttaattaccttccaactgtgataatactttttcttgttctttctgtgccataaaacgttcaacagtatctacaatcgcctgagtctgtggatcaatttcaatattcaccttatgaccaatacgctttttacccaatgtcgtgcgctctaacgtttctggtatcagatgaacacaaaaacgattatttactacatctccaatggtcagactaatcccatcaatgccaacaaatcctttatgcaggatatatttcatcaattgtttgtcataaatacggaaccatatttcatggttattttctgaggtgaaaattttcgcaatttcagctgttgtaatcacatgcccggacattaaatgcccgccaatttcatcaccgaattttgctgccctttccaaattcactaaatcaccaatcttaagctcaccaagattagtcagacgcaaagtctctttcatcaaatcaaagctaattaagtcaccatcaatttttgtgacagtcagacaacagccattatgagaaacggaagctcccgtttcaatatcaggtaataattcaaccgga

SEQ ID NO: 583 - DNA, 1209 bp, Xenorhabdus sp.
  CDS (421)..(1191)
ctatagtaaattgattacctctggattacgttgagtttcataataaatttctttttggtactgggtaagaggtactacttgtgaagttttcatagcggtttactgcttacatcgtaattcgggtgttttattttatgaaccacgctctactcaacacaaggagtattattttacattgcattacattttttattaagcacataataaaatcagattttatggcaattaattgatatttatcaaagaaaaataatttaattaacagctttccataaagtctgggtgataatatttaacctgttttttcatggggataattattgctcttatgacattatttgataatgcaagatttattaaaagaatatattttaattctaattaattatgtatacgtaggagaaaataatgctatcagaaatgactgtgtcttatcgtaagtctgctgcactgtttgcctttgtagaaagtaaggcgccattatatttaaccacccaagagggtaaaacagcgaaacaccttgctcaattatgtcatgtttctgaggataggtttcataggttgttgaattacatgcaaaccctcaatgttttaacaaaaaaagaagataaattttatctcactgagcaatgctcaactctcagtgatccaaacagccttgagacactacacataaaactcgaattaaacccagctatttggaatgcatggtcacaatacagcacatctctgaatgaaatgagcgacaaatcggcgtttgaaattcaaaatcatcaatcatttttcgcttatgcaggtcatgaaagtaataaaaacttcaaagtgacttttgatgattttatgtcaaaagcaactgagtcaaagagtgatccaattattgaaaatatgcctctagatggcattacttcattcattgatatcggtggaggtcttggcgctttagcaaaagatataaaaacgcactatccccatatccagtgtcacgtcatggatttgtatgattttgataaaaaagaatctgaaggtgtgactttaatcaacggtgatttttttgctgatattccttcaggatacgatgcttattgtataaaaaacgtattgcataactggccagatcaaaaagccgttgacattctcataaattgccataaagcaatgagaaaagattctgtttatatattatcgagatgattaaagaaaaaaataatg

SEQ ID NO: 584 - DNA, 1606 bp, Xenorhabdus sp.
  CDS (2)..(1606)
cggtgaagccttgcctccggcacgggttaatcaattccgtcagattttttccgcttttggtttacatgcaccggctttgattaatctctatggcccgacagaggcaactgtagatgtgtcatattttgagtttcttcccgaaaataacagtgttatcagtcgggttcctattggattcccgatcaacaatattacactgagaatcgtgtcccagcatggtacccggcaaccaataggtattgcgggtgaattgcagattagtggcattggattagcccgtggttatcataataaaactgaattaacagccgagaaattcattctggatggaggtgaacgctggtatcgcacaggagatttagctaaatggttacctgatggcagcattgaatatttggggcgaattgataatcaggtaaaaatcagaggtaaccgtattgagctgggggaaatacaaaatacgcttgagcgtattcaggggatcagccaagcggaggttttaccacaggtaaacagtaatggtgatacttacctgtgtgcatattatgttattaacctgaatgtcattaataaccagcatcttacttctgaaaaactgcgtgaaatgttactggaatgcttacctgatttcatgatcccgcagcaatttatccctgtttcttatattcctcttactccaaacggtaaagttgatcgccaggcacttattacgctggtaaatagctcattggtaaaaacggaggtttcggctagctatgatgatgctcagactgaaactgaacatcaattggctgaaatatggcaacgggtattaaagcttgagaagctcagtgtgcaggataatttttacacattaggcggtgattcaatcctgatgttgaaagtgcgttctgaggctgaaaaagcaggaatgaatgtcacgctttctgagttatcacaatatttgacaatagctgagttgagccagcaaattgaggctggccggaaagttaaaaaacatgttgagctatctccgtttgccttgatcaaagaaaaagagcgtgcagcactttcacactatgaagatgcgtttcctgctactcaactccagcttggtttgatatatcacagccagcagagcaaacattcagccacctataaagatgttttccgctatacgctgaaaggaaagtgggagcctgaaacttttcgccaaagtatatcagcgataatccagcggcatcctgtcctgcgttctcactttaatctggcggatttcagtgagccattgcaaattatcaaccacaatatcaggcttgatgatgttgtagagattcatgatatcagctcactgacacaggatgattccgaaacaacgatcaaagagtgcatggaaaaggggcgttgccataactatcagtttgattgtgcgccattgtatcgaatcagcttattcagaacggcagatactattgatatggtgttcagttttcatcatgccattctggatggtggcagtgtggcaaatttgatacgtgaactcttttctcgttaccagcatgacggcatgtattcttctgagacagatgtattaccatccccagctctgtatattcaggatgaactc

SEQ ID NO: 585 - DNA, 1182 bp, Xenorhabdus sp.
  CDS (3)..(1181)
agcaatctctattggaatggcggcgagcactggatgaaagcagggagtggattggccatctgccgccattttggttatgtggttatcttaatccgttagtcacatcagatgcagtgttatctcaggcagaagcaacatggtttaccttacatgacaccacggcaggggttcaggtaagaagtgcgagccaaacaactcagcctttgtcagtctggtcggtacctaagcagggtgaacatctgacgcattgttctcaaatggtttggttggatcagtttgtacaatggctgaatacacaattcttacctttactggctttacctcaaacggggacaccggttttggcaccttgtgcaatggcgctgaatttttcgccattacagatagtgactgacaatctctggttacaacaactaaaaaatacaacgaccttaacagtgcctacggttgcagatattgcgactcagttaccctttccggatgtacttctgacgcaattaccccgaaatagccgcctgacgaatatggaaatttataccggtattgcaggagcaatgagtggtgttttcttacttctggctttattagcaagttatgggaataaccggaatctattgacgcagatacagggtgatctggtgttatttgaacgtttggtggaagaaccctctgaaccgaagacgcaggtctggaatcaactgaaagaagatgcaactttattatctgactggcatcgcagaggagaaccgctttctcattcgcttggtttgtatcagggacaaaaagtatttctgattgtacaagctgcaattgccagctgggcaccacccacaccgccagagcctgtcgaatcaacaccaccaccggttatgcctaaagctcagaccgtcagtttggatagcttagccttattcggtgtgggtaaatccaccctgaaatcagatgccaccaaagtattggtaaatgcacttgtacaaattaagggcaaacctaatcagaaaattgtgatctcaggttataccgataacaccggtaatcctaaatttaatcaacaactctcccttaaacgtgctgaagctgtacgtgactggatgctacaaaatagtgatattccggctgcatgttttgcggtgcaggggcatggagcagaccagcctgttgcatccaatgaaacagaatctg

SEQ ID NO: 586 - DNA, 1689 bp, Xenorhabdus sp.
  CDS (79)..(1689)
ttttattataacaggttttggattatttattaaaaataaatcggaatgccccactatatggaaaataggcctatttctatgaaaaaaaacaattccgtaaaacctattgttttgtgggtgacattattgtgtggacttttacctgctactgctgccatcgctgatagcgggtatcaagaacaggggcagttaaattcacctgatagctggttatcagaagaatttaaacgccagtggggattaactactattggcgcacattatgcctatgcacgtggatataccgggaaagggatcaatgtcggagtgctggatgaagcagtaaccccccatcctgaatttgcaaataaactgagaagattaagcccggaagatccggtcaactttgacgaagatatttggacagatgtcattgagttcggcgctcatggtaaccatgtctcaggcactattgcggcaaaccgggatggtacagggatgcatggagtcgcatttgatgctggcttgatcactggtaaatatttacagaatgactacaaccgaacagaagcgatgatccaaagtaatgcccgggttatcaataacagttggggggttcgccctcagataagaagggatgcatacggcaatccgataaggcggccagatggtacatgggactatgttaaaaccactctggaggatgtccgtaaatatgttaataataatgatcttagagaaaaattggatcgtctaagccgttcagaaattcctgaattagatgattacacaaccagaacagcgggcttattacgtgctgcgcgacatgacaaattagttgtttttgcggcaggaaatgccaacaactataacgtgacctggttacatgcgggtatgccatatttctttcctgacgtcctgaaaaactatctcagtgtcgccaacataacacaggacaaggagctggctctgtcatcaaccagttgtgggtataccgccagctattgcttatctgcaccgggcaccaaaatttacagtagtaccggtaagtttgtttcaaaaacaggaaagaaaatagacgaaggtgccctgaatagaggagagcttgagattgactcttcctatgatacctatactggtacatccatggcggcaccacatgtcgttggagctgcggctgtcctgatgcaacgtttcccttatatgacagcagcccaaatttctgatgttctcaaaactacagcaacagacttgggtgaaaaaggcatcgacaagctctatggctggggcatgctcaacctgaaagatgccattaatggcccgaaaatgtttatcacggagaaagatattcctgctgaattttatattgaggactcctataccgatacgcagtttgtcgccaatatcgtcggcatgggggaaaaagtagaagcaggcacaacggtagaacgcgtctgcgacagcattgaatgtacctatgactactggagtcatgatatctccggtcacggcgggttaaccaaaaccggtaaagggatgctggaactgaccggtaaaaacagtacctatcaaggcccgacaatcgttgatcagggtcagttacagatcagtggcggcatcacttctgaggtgacggtacataagggtgccacactgagtggaaacgggactgtcggttcactcatcgctaaaagcggttctttagagcac

SEQ ID NO: 587 - DNA, 1001 bp, Xenorhabdus sp.
  CDS (2)..(802)
cccatttaccgacaccgtgtcactggatgaagtcaaagccttcctgtctgataccggcggtcgctggtcatgggagcagcaattgtacggtcatgcgttcagcgtggtcagtggtacttatggtgagttggctgatgcgggtgagcgccgtaataaccagcatgagacgctgttaggggtcaccaaatccccgacaccggactacatttgggcagccgctatcactggtgccgtagcaccgagcctccgaaatgaccccggcaggccactgcaaaccttgccggtggcgggggtattgtctccagccgcagaacaccagcttgatctgatggaccgcaataacctgctgcacagtgggatttccacatttacggtcgcggacgatggcacggtacagattgagaatctaatcagtacctaccagaaaaacccgtatggcgacaacgatgacagctatcttcagatagaaacgctgtttttgctgatgtacgtctcgcgctacatccgcactcaaattacgtcaaagctgggtcggatgaaactggcaaaagacggcacccgttttgctcccggttcggcgattgtcacgcccaatattgtcagggccgagttgatcgcccaatacaagacgctggaatacaacggttatgtgcaggattcgaaggcgttttcggatggtctgaaggtggaaattaacgcccagaacccgaaccggctcgatgttctctggacaggcaccctgattaatcagttgcgggtctttgctctgttaaaccagttccgactgcaacccacttcataaggaatcctcatgggaaataccactaaccggctggcaggcacggcttatgtcagcgttaacgggatctccattatggtggtcggggattttacttatagtccctccaccgtcacccgtgaaacattaaccggtatggattatgtccacgggtacaaagaaaaacccaatgccccgtatatctcctgtcgggtacgtgaca

SEQ ID NO: 588 - DNA, 1001 bp, Xenorhabdus sp.; identical to SEQ ID NO: 587
  CDS (812)..(1000)

SEQ ID NO: 589 - DNA, 1176 bp, Xenorhabdus sp.
  CDS (826)..(1176)
gctcggaccatgtgctctaagagcataggcacgccatttattttgcgtcatactgacctccaatctgtttctcccttatctcttatttaattttatatgcaggtgattctggcagaaatacttctgtaagtaataatggcttttctgataaacgcagtaaagatcgccgcgcccaacgctggccctgtaaccctatttgaatataatcccgcgtcaggttattgccactaaaaaggtagcgcccaagaggaacagttcctagatccaccagctttttatccggccctgttaatgtttctttcgggatcactgtccgccccaacaaccacggaatattatccccaaacaggataatttcccgcagccagtatttttcacttataggtaagtgctcactttcatcaccgagctcttcagctgtaataaagcattcccgaaatggtgtgacagttacatgatggcaatgctgttcaaaacgacgagtcattgaaccaacttccatcagccagtccagaatactctcaggcgtgttggcttcgtcagctgaaagccagtgaataggagtagaagttaatattgtgtcatctgccatgtcattttccaattgcggagaatatcaacttctccgacagcgcaacgaatgggaagtgaggatatcatgttacagaccaataaaataaaaagttggtaacaaattatgtagattgcaaaaaatatccccccaataaatagggcgtgttgacgtttgctcgaagggaattgggtggcatgataatttggtctcttattttcgccaaaaaactcgttacccgaactatcatgccacgacctatgttatcagatcctgtgtgggataagctatttgtcttcatgcaacaaaatcggcttacctatcataaaaaaacgcatcgcctcatcatggaaggtattctttttcgaatgagaaccgggataccctggcgggaactacctgctgaatatgggaaatggaatacggtctttaagcgttttaatgtctggtcaaaaaaaggtgtttttaattcattattcaacgaattagctaagaattctgatactgaatggttgtttattgatggcagtattgtccgtgctcatcagcacagttcaagcgcagcttcaaaggaaaatgaagcgattggaaaaaagccgggtgga

SEQ ID NO: 590 - DNA, 1176 bp, Xenorhabdus sp.
  CDS (660)..(1094)
tccacccggcttttttccaatcgcttcattttcctttgaagctgcgcttgaactgtgctgatgagcacggacaatactgccatcaataaacaaccattcagtatcagaattcttagctaattcgttgaataatgaattaaaaacacctttttttgaccagacattaaaacgcttaaagaccgtattccatttcccatattcagcaggtagttcccgccagggtatcccggttctcattcgaaaaagaataccttccatgatgaggcgatgcgtttttttatgataggtaagccgattttgttgcatgaagacaaatagcttatcccacacaggatctgataacataggtcgtggcatgatagttcgggtaacgagttttttggcgaaaataagagaccaaattatcatgccacccaattcccttcgagcaaacgtcaacacgccctatttattggggggatattttttgcaatctacataatttgttaccaactttttattttattggtctgtaacatgatatcctcacttcccattcgttgcgctgtcggagaagttgatattctccgcaattggaaaatgacatggcagatgacacaatattaacttctactcctattcactggctttcagctgacgaagccaacacgcctgagagtattctggactggctgatggaagttggttcaatgactcgtcgttttgaacagcattgccatcatgtaactgtcacaccatttcgggaatgctttattacagctgaagagctcggtgatgaaagtgagcacttacctataagtgaaaaatactggctgcgggaaattatcctgtttggggataatattccgtggttgttggggcggacagtgatcccgaaagaaacattaacagggccggataaaaagctggtggatctaggaactgttcctcttgggcgctacctttttagtggcaataacctgacgcgggattatattcaaatagggttacagggccagcgttgggcgcggcgatctttactgcgtttatcagaaaagccattattacttacagaagtatttctgccagaatcacctgcatataaaattaaataagagataagggagaaacagattggaggtcagtatgacgcaaaataaatggcgtgcctatgctcttagagcacatggtccgagc

SEQ ID NO: 591 - DNA, 708 bp, Xenorhabdus sp.
  CDS (12)..(635)
agtctttttagggggcaaaaaacgatataaattttcccaaaatgcacatcatctctttaccgactcctttttatccggggcaagctattgatgatgtgaaaatggtgcaagcattacaaacgggtattgcagatttagttaaagcagaagtaaatcttattgtgattccctgcaatattgcgcacatatattaccgtgaaatagaaaaggccagtatcggtataccagtcctacatatcgctgattgtgcactccaaaaaataactcctgatgacacaaaaatagcaatcattggtacagaacccacaattgaagccggattctatcaggcccgtattcaggcggtagggaaagaacctgtttcatcggcagaattgcgtaatcacacaacaaagctgattatgttaattaaagagaaagggtttgagcatgaggaggttgtcgctatctgggatacaatattatcctgtgcgcaagcattaaaggtacatgtattactgattgcctgtactgatatcagtccccttataaaaaacaagagaaaccagtcactgaagatagtggacacagcttccagtctggcggaagctactattcattcattttatgaattgaggggcaacccaaaagattaaaaatatacgggcgtgttgacgatttgttttcatcacttactcgacccacatgggtaaccagataatgataaat

SEQ ID NO: 592 - DNA, 1568 bp, Xenorhabdus sp.; identical to SEQ ID NO: 440
  CDS (1301)..(1567)

SEQ ID NO: 593 - DNA, 1468 bp, Xenorhabdus sp.
  CDS (657)..(1172)
tctctaaggttccatatttattacttatcttaaatattttataaatatcatctgtattcaaatttcattttctacatgcttctatagctccgatgccattgttttgagatgattttaatcccaagaaattaattgattctattttttcacttattaggcgaatccaagtaatttttgtttttataatatgttttattatcataatggatgcgatgaagatattaacttaaatcattctatgaataactaaatagcttgtcaaaatggtaggagtatcaaagaaactcgatcctaaatttgcgaatttttttttcccaaaacgcaaaatcacagaaaaaaggatcgagtcatgcttatcataccacccacttcacgaaatgaacgtcggcagatgaaaaaaatcgttcaaaaaacctctgataaaaattatgcacggcggatcatggggatacttctactgtgtaaaacacattctgtcccccaggtggcggggatactttgttgcgccgaatcttccgtttggcgttggctgaaaaagtttagagcacaaggatgggcgggcttacagtgcttacctgccgggcgtcatattcagtggcatttagcgcgttatctgcctattctctcttattttttagagcacactcctccagcaatttggctatatcggttctcgctggagtctgtcgttttttgtgtttttattcagaaaatatatgcatattattctttccatcagcacactttaccgttacttctgcaaacaaggtattgtctggcgacgagcggcccccacattaaaacaatctgatcccgaatatgacgaaaaaatggcgcgtattactgaagcgctttctcaggcttgcaaaaaacatcctgttgtttatgaagatgaagttgatattgattttaatcctaaaattggcgctgactggtactttaaaggccaacaaaaacagattgtgactcccggtcaaaatcaaaaatattattttgccggttgtcttgatgcccaaacaggaaagatcgtgtctacgggtggcacgagaaaaaactcggatttatttatcaatatgttaaaatcattaaaacgcacatatcgtgatgcagaaacgctgagcgtgattttagataactacggtatccagggcgggattccactttgtctttaatttaatcaaagataagctgactgcggaattccccagaccatgtggctcttcggcgtttagccgcttgactatcctttatactggtattctgtttaatcacatttaacgcaattcggttaaaaagcgccatttgcgcagccccatcagggtctttgagtgagatgttatcttcccgaaaggccacatctaatacccaatgcaggttattttccaccgcccaatgtcttcttattgccttacctgcggtttctgcatctaacgggagagagctgacataccaccgtgagttccggtgg

SEQ ID NO: 594 - DNA, 1468 bp, Xenorhabdus sp.
  CDS (2)..(295)
ccaccggaactcacggtggtatgtcagctctctcccgttagatgcagaaaccgcaggtaaggcaataagaagacattgggcggtggaaaataacctgcattgggtattagatgtggcctttcgggaagataacatctcactcaaagaccctgatggggctgcgcaaatggcgctttttaaccgaattgcgttaaatgtgattaaacagaataccagtataaaggatagtcaagcggctaaacgccgaagagccacatggtctggggaattccgcagtcagcttatctttgattaaattaaagacaaagtggaatcccgccctggataccgtagttatctaaaatcacgctcagcgtttctgcatcacgatatgtgcgttttaatgattttaacatattgataaataaatccgagttttttctcgtgccacccgtagacacgatctttcctgtttgggcatcaagacaaccggcaaaataatatttttgattttgaccgggagtcacaatctgtttttgttggcctttaaagtaccagtcagcgccaattttaggattaaaatcaatatcaacttcatcttcataaacaacaggatgttttttgcaagcctgagaaagcgcttcagtaatacgcgccattttttcgtcatattcgggatcagattgttttaatgtgggggccgctcgtcgccagacaataccttgtttgcagaagtaacggtaaagtgtgctgatggaaagaataatatgcatatattttctgaataaaaacacaaaaaacgacagactccagcgagaaccgatatagccaaattgctggaggagtgtgctctaaaaaataagagagaataggcagataacgcgctaaatgccactgaatatgacgcccggcaggtaagcactgtaagcccgcccatccttgtgctctaaactttttcagccaacgccaaacggaagattcggcgcaacaaagtatccccgccacctgggggacagaatgtgttttacacagtagaagtatccccatgatccgccgtgcataatttttatcagaggttttttgaacgatttttttcatctgccgacgttcatttcgtgaagtgggtggtatgataagcatgactcgatccttttttctgtgattttgcgttttgggaaaaaaaaattcgcaaatttaggatcgagtttctttgatactcctaccattttgacaagctatttagttattcatagaatgatttaagttaatatcttcatcgcatccattatgataataaaacatattataaaaacaaaaattacttggattcgcctaataagtgaaaaaatagaatcaattaatttcttgggattaaaatcatctcaaaacaatggcatcggagctatagaagcatgtagaaaatgaaatttgaatacagatgatatttataaaatatttaagataagtaataaatatggaaccttagaga

SEQ ID NO: 595 - DNA, 1414 bp, Xenorhabdus sp.
  CDS (98)..(931)
gtgctctaaaggtcatgttacttttatgaagacctgtcgttaataacttctccctatataaagactactctgttattacctcatcaggagataaatcatggctgctacacacaatggtattcactactatgatgtatcaacccgttatgcgcgtatttcagtatcggatactggcggtaatgggttacctgttttgtttatacatggcaattcaagtagtaaagaaatattttgtcatcaagtagagtactttaaaaaggattatcgggttttggctcttgatttgccggggcatggtgcatcttccaatgccagtgagccccgtaaggcatattcaatgcctgcctatgcccatactgttattgaagtactggaaaaaataggcataaacagagttgttgttttcggctggtcattaggcgggcatatcgggctggagatgctggctctgtttcccaaaatgattgggttgatgatttgtggtacaccacctgtagccgccggtaaagataatgtcgcacttggttttcgtcagagcgaacatatggggcttgcaggtaaggctgattttactgaagaggatgtgaaaaattatgcctatgagacagtaggtattaatgcgcctcatgatcagtttattcttgatgcggtggcgagaacggatggtttatcacgccagtatatgtttgaagcctttacttctccacaggcaacagatcaacgattattggctgaaacaagcaaaatacctttggctatcgtcaacgggagcggagatccgttcatcaatgcgcagtatattaaaggcctgaattaccaaaatctttggcaggatcaggttattagtttagcgggtgtggatcatgctccgttttgggaagctccgacccgatttaatcctatactggctgattttctttgtgatttttaatctattcgtttaattagcggctgggaattacctgcattatttatctggatatattcatgtaaatgcccagcctcaaattagtcagatatatgagactttttattgttttgtgattttcgtcacttggacaatcctttaatctttcttactaattttcggcaaaacatatcgtttaatattgtcataaattttctagctcattgaatatcccaattataaatatttggttaaaaattattaaaagaaattatgttttgtttttatgtgaaaaataagtattttttccatacctttccgaaaaaataaacttttaatcaggatcacagtttcggttgttttcctttgctgtaatgtttccgtgttattaataccaatgcttaatcattttctcccgtcatttttgcttatcactttttgcccaacatactgattattcaagcccataagcgccgtgtagtgcagtagttgggatctttagagcac

SEQ ID NO: 596 - DNA, 1857 bp, Xenorhabdus sp.
  CDS (2)..(280)
  unsure (1)..(1857): unsure at all n locations
gaaacgtaagtcgatagggctgcgtgttccatcgaaccctatagcattagcgctgttggaggcaatgcgtgagcttctgatgtcatgtagtctgattttacccggaaatgattttgcggaatctgatccggaagagattaaagatgcgctgggtaaacaggttgatttaatcattcacggtggctatcttgggcagcaaccgacaacggtagtggatttaaccgaagattcaccagtggttcttcgcgaaggcgaaggcgatgtaacgccttttttataagataaccactttattattttttattatacgacgcctgtgaaggcgacagcagaggttgctcaatgagcgataaaacagaaaagttacaaaaaattcttgcgcgttctggtcatggctcccgccgtgaaattgaaggatatattcaacaggggcgcatcagtattgatggcaagatcgcaacgttgggtgatcgtattgaagttaaacccggcacaaaaatccgttttgacggccggatcttaaatatcaaagagtcacaaaaaacagtttgccgggttctggcttactataaacctgaaggtgagttgtgtacccgccatgatccggaaggccgtccgacagtctttgaccgtttgccaaaaatgcaggatgctcgctggattgccgttgggcgtctggatatcaatacttgtggtctgttactgtttacaacagatggtgaactggcaaaccgcctgatgcatccaagccgtgaagttgaacgtgaatatgcggttcgtgtttttggtgaagtcgataacgcaaaactgcgccaactgacacaaggtgttcagttggaagatggcccggcttcatttaagacgatttcgtttaaaggtggggaaggtattaaccaatggtataacgttactctgacggaagggcgtaaccgcgaagtcagacgtttatgggaagccgttggcgtgcaggtcagccgtttgatccgcgttcgttatggtgatattgatctgccgaaagggttacctcgtggtggctggactgaattaggtctggaacagactaactatttgcgccagctggttgagctgaatgaagagactgtatccaaagttgcggttgaacgcgaccagcgccgtctcaaagccaatcagatccgtcgtgcagtaaggcgacatgctcaggtagcttctcgcccggcaggaaaacgtcctgcaagtagttcccgccagaacacaggaagaaaaacgacacctaaaggccgttaatcttctcaggccgctgtttagcgcttattgcgctttcaaacagcggctcccatcactcaataatttttaccagccatattgcttaccaatcgatgcctctctgggctttgattcccgcatcaaaggcatgtttgaccggccgcatctctgtcacggtatcggcaaattcaagcaactcacggtgacaacctcgtccggtaataataactgactggctggcaggacgctgtttcagtgctgtcagaacttcgcgaagttccagatacccataactgaccatatacgtgagttcatcaagcacaataagctggattgaaggatcggataacaattttaaggcatgttgccatactgactgacaaggcgtgagtatctgtttcccgattttgggtttcccaggtaaatccggttcccataacatgaaactcaactccgttttttcccagcaggtttttttctccattttcccatgttcctttaatgaactgaatgacacaagcacgttgaccatgaccaacggcacgggtgacagtcccgatgcagnccgttgttttccctttttcattgccagtgaaaccataacataccgcg

SEQ ID NO: 597 - DNA, 1857 bp, Xenorhabdus sp.; identical to SEQ ID NO: 596
  CDS (343)..(1266)
  unsure (1)..(1857): unsure at all n locations

SEQ ID NO: 598 - DNA, 1857 bp, Xenorhabdus sp.
  CDS (3)..(509)
  unsure (1)..(1857): unsure at all n locations
cgcggtatgttatggtttcactggcaatgaaaaagggaaaacaacggnctgcatcgggactgtcacccgtgccgttggtcatggtcaacgtgcttgtgtcattcagttcattaaaggaacatgggaaaatggagaaaaaaacctgctgggaaaaaacggagttgagtttcatgttatgggaaccggatttacctgggaaacccaaaatcgggaaacagatactcacgccttgtcagtcagtatggcaacatgccttaaaattgttatccgatccttcaatccagcttattgtgcttgatgaactcacgtatatggtcagttatgggtatctggaacttcgcgaagttctgacagcactgaaacagcgtcctgccagccagtcagttattattaccggacgaggttgtcaccgtgagttgcttgaatttgccgataccgtgacagagatgcggccggtcaaacatgcctttgatgcgggaatcaaagcccagagaggcatcgattggtaagcaatatggctggtaaaaattattgagtgatgggagccgctgtttgaaagcgcaataagcgctaaacagcggcctgagaagattaacggcctttaggtgtcgtttttcttcctgtgttctggcgggaactacttgcaggacgttttcctgccgggcgagaagctacctgagcatgtcgccttactgcacgacggatctgattggctttgagacggcgctggtcgcgttcaaccgcaactttggatacagtctcttcattcagctcaaccagctggcgcaaatagttagtctgttccagacctaattcagtccagccaccacgaggtaaccctttcggcagatcaatatcaccataacgaacgcggatcaaacggctgacctgcacgccaacggcttcccataaacgtctgacttcgcggttacgcccttccgtcagagtaacgttataccattggttaataccttccccacctttaaacgaaatcgtcttaaatgaagccgggccatcttccaactgaacaccttgtgtcagttggcgcagttttgcgttatcgacttcaccaaaaacacgaaccgcatattcacgttcaacttcacggcttggatgcatcaggcggtttgccagttcaccatctgttgtaaacagtaacagaccacaagtattgatatccagacgcccaacggcaatccagcgagcatcctgcatttttggcaaacggtcaaagactgtcggacggccttccggatcatggcgggtacacaactcaccttcaggtttatagtaagccagaacccggcaaactgttttttgtgactctttgatatttaagatccggccgtcaaaacggatttttgtgccgggtttaacttcaatacgatcacccaacgttgcgatcttgccatcaatactgatgcgcccctgttgaatatatccttcaatttcacggcgggagccatgaccagaacgcgcaagaattttttgtaacttttctgttttatcgctcattgagcaacctctgctgtcgccttcacaggcgtcgtataataaaaaataataaagtggttatcttataaaaaaggcgttacatcgccttcgccttcgcgaagaaccactggtgaatcttcggttaaatccactaccgttgtcggttgctgcccaagatagccaccgtgaatgattaaatcaacctgtttacccagcgcatctttaatctcttccggatcagattccgcaaaatcatttccgggtaaaatcagactacatgacatcagaagctcacgcattgcctccaacagcgctaatgctatagggttcgatggaacacgcagccctatcgacttacgtttc

SEQ ID NO: 599 - DNA, 1580 bp, Xenorhabdus sp.
  CDS (19)..(318)
aaagacacgcttcccaggttggaaattggttcgacctggtatgctaaatcagcgcaacgcacgcctattaatacagaaacaaaatacctgttaatggagtacgcgtttgaaaaactcggttgtgttgcggtggagatacgcactcattttctgaatcagcagagtcgcagagcaattgaacgcttgggggcaaagctggatggcatactgcgcaatcacttacgggcaaaaaatggctcaattagggatacttgcatatacagtataatactcagcgaatggcctgccataaaaactcatcttacatggttaatggcaaagcctcgctgaatgttgtatcagaaaactcgctttttatgatgattattaatggatgagagcgcttttaatatggctctccaaatcatccagtaactgataacggcgacgatattctgagcgttttttgctggggatctcatccagtggttttctttcaatgattgatggcagatgaaagtcattattatcttttctggaaccactcagagattcccagaacgcattatagtcagccaccatcaggtgttttttcttatgccaataacggatactgcgatagatatgagtttcgttgctgacggctaagatctgctcacagttggtatgttcagcaaaacggcaaatagattcgatcagtaaacgtttagggaataaaccatgacactcttttgttgcattacggataatatccagagaattatcccctttagcagggccttgtaatacaccgataaataatgtttgcttgccattaatttttaataaagtgaatgcacattttgccagaatgacattctcttctgtagtcatatataaagatagttcaccttctttattcagattatccaaagagtctatatatatattaaacgactcgtttttcccctgaatagttgccagtaaataagcatcagtattaaatatcttgtcaataacattcggagcaagctgttgaaataaaattttataatgctcactaattgcatgaacaatctggtttcgtttgaaattaatactcaaatatggacgatgtggtttgcagggcaaactcggttgcttttttaaaatatcctgataaataggtgtgctggcaattctgtccaatagtttaaatgtagaaacaggtgtaaaaaaactgcgtaaagcaaatttcgcccgattgctcgaggaatgccagtgtagccctggtgtaatacgttttccgacaaggtcggtaaacagttttatgcctgaatacgttttagtttcagattgttgtagatacttcattagttataaatccaaaataataaaagcagtagcgctattctaccacttttttattggatatatactcatcatctttcagattttctctttggtgatctatagttactcgctaaagttactactttaatgagtagatggttatcaatgatccctagaaagctggctatctgagcattataatgtagcaatgagtctgccgaatatatcatattgactttaaagaattccttaactttatctaaattattttctctaaagctttagagcac

SEQ ID NO: 600 - DNA, 2052 bp, Xenorhabdus sp.
  CDS (1268)..(2050)
ttaccaatcgaagggcaaatatgggcgtggatcaagcaaccaaatctgtgatttcattgcaaatgcgtggctacgttcctgcataattgaggagccctcaccataatcttcacccactatgatcaaggctccccctaaaacaccaccagatgccagatttgccaacgcatcagaagcaacatttgtgcctactgttgccttgaatgtcacagcaccgcgtaatggatagttaactgaggcagatagtgtggcagcggcagtggcttcactggcgctgttttcaaaacgaataccatattcagacaggatatcctgcgcgtcagccagaacatccatcaaatgagaaatgggtgctccctgataaccagcaacataggcaacacctgattccagcagcgcttttgtgacagcgagtataccttctccgctgaaaacttcgccctgcttcaatcttaacttttccacttccttaacgaaggatcgttctgccatgtccacctcgcattttatgcatcttttttaatgccactggatttcgaattacatcgcggcaacagaggaataacttcccggtagatagccgtatattgataaaaacggcgactggggtgacttaagtgcaactagaaagacgggtatatgtatacacaatggatttcaagatgcgtcgcggcggcaagaaagtgagtccccgagagcatagataaccctatgtttacaaaaacggtgaccggggtgagcgagcgcagccaacaaagaggcagcttgaaagacgaagtgtatagtaggagtatggagaatatgaattaatgatcaatacatgaactatcatgcaatagttatttatgcagtagccggataggtcatgcaaagaatggatatacgcttcgtctttcagttttcaatcacaaaatacagcctctactacggatatagagatattggctatgaattatcgccatgagcacttacatatccattcatgaatatattcacgatgatatagcttccatttagaaaaaatgtggatactgcttatcagaacattgtatataccttatgaatttcaggagttaatcaagactacggcctgagaaacgacgggtatgacgttatgaggtttctgataatgacgagcaatccgtggcacaactattacattgataataaatacgttaataataaaagcgccgattcaaggtgtacagactccagatgtgctgtatctgcgattgagtctcacctcagttctccggagcatctgcttttttcgtcccgtgatcttgatgaaacaagatcaatggtcgggcgggtgatgaagccccatcagcttaatatactgggtagcagccgaaaactacattcgagaatgtactacatcccctttgggaatttttccatcagccgcctgcattatggcgcaaatgttgaaattacaccgggtgcgctggattccttttttcttatccaaatgccgttatcaggctgcgcctcaattgaaagtggcggccagtatattgactcaaccccgaatctggcctccgttctcagcccggatcaacatactgccatgcgctggaatgctgataacgatcagtttatggtgagaatttcccgctcattactggaacgaactcttgtcgggcaattggggcatcccttggagcaaccattgatatttgaactgggattcgaatggcaacgatgccagacatggcgctgtctgatgctctacctgcttgaatgtacagttcaggtgccagatatcctgcaatataagctcattaccactcagattgaacaattactttctgtcaccctgctttccgcacatcaacataattacagtggtgatcccgctaaccacagaggttctatccggccacggcatgtgcggcgggtacaggaatatttgcaggctcacgcccatgagcccattaccgcagaacaactggctcaggtcgcgggagttagtctgcgcagcctttattccggtttcagggaatttctggatatcagcccgatgcagtatttacgcaatctgcgtccttt

SEQ ID NO: 601 - DNA, 2052 bp, Xenorhabdus sp.
  CDS (1936)..(2052)
aaaggacgcagattgcgtaaatactgcatcgggctgatatccagaaattccctgaaaccggaataaaggctgcgcagactaactcccgcgacctgagccagttgttctgcggtaatgggctcatgggcgtgagcctgcaaatattcctgtacccgccgcacatgccgtggccggatagaacctctgtggttagcgggatcaccactgtaattatgttgatgtgcggaaagcagggtgacagaaagtaattgttcaatctgagtggtaatgagcttatattgcaggatatctggcacctgaactgtacattcaagcaggtagagcatcagacagcgccatgtctggcatcgttgccattcgaatcccagttcaaatatcaatggttgctccaagggatgccccaattgcccgacaagagttcgttccagtaatgagcgggaaattctcaccataaactgatcgttatcagcattccagcgcatggcagtatgttgatccgggctgagaacggaggccagattcggggttgagtcaatatactggccgccactttcaattgaggcgcagcctgataacggcatttggataagaaaaaaggaatccagcgcacccggtgtaatttcaacatttgcgccataatgcaggcggctgatggaaaaattcccaaaggggatgtagtacattctcgaatgtagttttcggctgctacccagtatattaagctgatggggcttcatcacccgcccgaccattgatcttgtttcatcaagatcacgggacgaaaaaagcagatgctccggagaactgaggtgagactcaatcgcagatacagcacatctggagtctgtacaccttgaatcggcgcttttattattaacgtatttattatcaatgtaatagttgtgccacggattgctcgtcattatcagaaacctcataacgtcatacccgtcgtttctcaggccgtagtcttgattaactcctgaaattcataaggtatatacaatgttctgataagcagtatccacattttttctaaatggaagctatatcatcgtgaatatattcatgaatggatatgtaagtgctcatggcgataattcatagccaatatctctatatccgtagtagaggctgtattttgtgattgaaaactgaaagacgaagcgtatatccattctttgcatgacctatccggctactgcataaataactattgcatgatagttcatgtattgatcattaattcatattctccatactcctactatacacttcgtctttcaagctgcctctttgttggctgcgctcgctcaccccggtcaccgtttttgtaaacatagggttatctatgctctcggggactcactttcttgccgccgcgacgcatcttgaaatccattgtgtatacatatacccgtctttctagttgcacttaagtcaccccagtcgccgtttttatcaatatacggctatctaccgggaagttattcctctgttgccgcgatgtaattcgaaatccagtggcattaaaaaagatgcataaaatgcgaggtggacatggcagaacgatccttcgttaaggaagtggaaaagttaagattgaagcagggcgaagttttcagcggagaaggtatactcgctgtcacaaaagcgctgctggaatcaggtgttgcctatgttgctggttatcagggagcacccatttctcatttgatggatgttctggctgacgcgcaggatatcctgtctgaatatggtattcgttttgaaaacagcgccagtgaagccactgccgctgccacactatctgcctcagttaactatccattacgcggtgctgtgacattcaaggcaacagtaggcacaaatgttgcttctgatgcgttggcaaatctggcatctggtggtgttttagggggagccttgatcatagtgggtgaagattatggtgagggctcctcaattatgcaggaacgtagccacgcatttgcaatgaaatcacagatttggttgcttgatccacgcccatatttgcccttcgattggtaa

SEQ ID NO: 602 - DNA, 1373 bp, Xenorhabdus sp.
  CDS (1027)..(1323)
gcctcgtctcgaatccgctgacttcagacaaagccagctaacacaggccattatgcataaagttcatgccgtcaatgcccagtttaccggtgctgacatgacctatgccgatctttcctatgccaacgtcagcaacagtgattttcgtaccacgcattttatgcgaacactttttcatcgtgctgaacaggctggggcattgttctccgatcgtaatggcattctggaaaatgatcctgaactgtttgccgccgaagagtgggagctacaacgcaagatttaatcaggagaactaaaatgtcagaactttcttacgcgtcctatacactttcttcacctttgcttacggatgaaccttcacaacaggttgccggacaggttatcagccgccttcaggacggtagcttaatggtggaaagccacagccggggatggcattgccgacgggctgccagttgcttactgacacctgaactcggtgataccgtattactcacaaaagtagaggggcaactctgggtgctggctatattagaacgccctgaacaacaacaatcggcagaaatcagcgtacccggtgatttgactattgcgcctcagggtaatttacatttaaacagcgaaggattgcatattgatgccaacgatggccaatgccatatcaagaaaatgcaatacacgggtgaatctctctctgcatgggtgtcagtgacccaattgattggcaataaacttgaatcagtctggcagaccgtcacacaactcagtcaccgcctgtttcgtcataccacacagacagagcaagtacgggcaggccagttagatatgcaggctgaaaactacctgcgcctgcatgcccaacataccatgatgtcagcaaaagccattaccaaaatagatgctgaacaaattcatattggttaaggagatactatgtttgccaatactcaaagcgggggaatggatctggctacccctgatgtctgtatgactccccctttttcaacacctataccgtatcccaatatggctcaaggacctaccggtattacgaatgccatgaacatcttatttgcaggagcaccagcccataatctgatgacaatctatcccatgactatgggcgataacgccggcgttaatactggtgtggcttccggtacggtgatgggaccagcacggcatacattaggggcgaatactctgttaatcaaaggcgctcccgtgacacggctaaccagcatgtcaatgcagaactcgaccaactctgtcggctgtcggattacgccaagccagaccaaggtgctgatcttatcagcctgatacccaacttttcttttattccatactgacctttagaggcacattggctc

SEQ ID NO: 603 - DNA, 1373 bp, Xenorhabdus sp.; identical to SEQ ID NO: 602
  CDS (520)..(924)

SEQ ID NO: 604 - DNA, 1373 bp, Xenorhabdus sp.; identical to SEQ ID NO: 602
  CDS (2)..(283)

SEQ ID NO: 605 - DNA, 1235 bp, Xenorhabdus sp.
  CDS (2)..(781)
aatgaatgcctgcaaagcaggaattaacgagattattctggttacacactcatccaaaaactcgatagaaaatcattttgataccagttttgaactggaagcaattctggaaagaagggttaaacgccagctattggatgaagttcagtctatttgtccgagccatgtgacaatcatgcaaacccgtcaggggattgcaaaagggttggggcatgcagtgttatgcgctaagccactgattggagatgaaccgtttgccgttattctgcctgatgttattttggatgagtacagcacagatttatctaaatacaacctgagcgaaatgttgtcacgttttaacgagaatggtgcgagtcagatactagttgagccagttccttatgaaagcgtttctgactatggtattgttgactgttttggggaaaatttacaacctggtgacagtaagccaattgcccgtgttgttgaaaaacctaaacctgaagaggcaccatcgaatctttccattgtaggtcgttacgtactatctgaaaaaatctggccactattagcaaaaactgcgccaggtgcaggggatgaaattcagcttactgatgctattgctatgctgatggaaaaagagccggttgaagcatatcacttaaaaggccgtagccatgattgtggtaataaactgggttatatgcaggcgtttgttgaatatggaatgaagcataagcaattgggagaatcatttaaagactggattatgactttgcagaatcagattgaaaaataatctattggtaatttaggatgtgagatgaaagtaactgtatttggtattggctacgttggcttagtccaggcaactgtgtttgctgaggtagggcacgacgtactttgtgttgatgttgatgcaaaaaaagttgaaaacctgaaaaatgggcagatccctatttttgagcccgggttggaacctctggttaagaaaaactatgcacaagggcgtatgagttttacgacagatgccaaagctggtgtagcacatggcaaattacagtttatcgctgtcggaacacctcctgatgaagatggctcagcagatgtgcaatatgtcactgccgtagcccgtaccatcgcagaaaatatggatagccataaagtggtggttgataaatccactgtccccgtaggtcccgcggataaagtcagagctgtgatgcaggcagttttggctgtctttagagcac

SEQ ID NO: 606 - DNA, 1235 bp, Xenorhabdus sp.; identical to SEQ ID NO: 605
  CDS (806)..(1234)

SEQ ID NO: 607 - DNA, 2280 bp, Xenorhabdus sp.
  CDS (888)..(998)
gatgtttacccagaatgaaatagaagcgttggcattaggtgccagttgggtggtgaaacgtgcagatccacaattgagggaagcggcaaaaggtgttgtcaataaaatagctgcggttatcccaacagaattgaagcaacttctggagagcagctctttgttagtcgggccagcggcagcagctactcagccagtaatcgatatttcatcaatccggcaggcaattcgtgccagacgtaaagttactttgacttaccgggatttaaaagaacaggattctgaaagaactatctggccatttgcattagggtattttgaaaatgtcagtattgtgattggctggtgtgaattgcgggaagaattccgccattttcggtctgacagaatcctgagtttgcatattgaaaaacagtgttaccctcgatcaaggcaatccttactgaaagagtggagggaatttaagaaaattcctcactgaccaagtaaggctactgacagaaactgtcactcagtgttgataccttacaactattctaagcagcgcagacaatagttggaggtatttcatgttagttctgtctttttctatcccggtaaaagctgaaccatcccatatttgggctcattatgttgattttgagttaaggaagaaatgggaaactgatcttgaatctttgcaatttgaaggtgaggtaagaacagggcaatacggaaaaatggtgttaaggggaaagccagaaattcgattttacctttcaaatattgaaatcaataaagaattcactgatcaggttagtcttccacatataggaactttacttttttctcatcaaattattccacatgagaacaatatggaatatttgattaaggcaacagtatcacttatgcctgattcgaatgtgcctgctattcaggttcagaatttctttaaacaagtcacacatgatttagttgaaacagtattaaggctgaaagctactgttgaaacctattaaatatgaaaaatattgatcagggaaaattgaatcacatcagtctgttatttaaatacaaataaaagttttgataaaattaatatgaggttaatatggaaacaataactgctaaacctaatcttcagcttgactatgcttgtgatatagagcgttcgacatacttctatacaaaaatatttaattctgaaccggttattgctggccaacgctacgttgcattttctgctggtgctgaagctctattatccatttggtctgggggtacgaaacctgattcaaatactccccgattatccgaaattggcatcatgttaccaaatagcgaagatgtagataaattatttgtaaaatggcaacaggaactaaaagttaaagtattacaggagcctcatactgaagtatttggccggacgtttgttattgaagatcctgacggtcatatgattcgcgtttgtttattggattaagatgacaaaatagaaagcccattgaggaacaattataataagagtctatatgattaggctcttttaaaaataagagaactcagtgagggaaaatatgtcaatcctgatgattatcaaagacactccggtatgggtttggatcttatttgtttttttggttctccgtggcattaaagcattagatgacagagaaatgacggtgagtcgtctatttttattgccaatcgtgtttttcatctgggcagtttatgctgtactacatgaaacggtttttcagggttcggcattattggcgcttgttgtggggatattggcaggtattgcaataggctggaaattatggagtactcagccacgcttaagacaaaagccggacagcgatttgattatccgttcagggactcctttaaccttgatttttattctgattatattttgcgttaaattcattatttccgccacggcagcaatacatccagcgctaacacactcttttagctttaatttattatttggttttgccagtggtttgttagatggtgttttctggggaggaacactgaatctctatatcccttattataaggatcggcaaaaaagaagagttgaatgagaataaaaataaaaaagggagttttgaccggtataaaatcaataagccccgttattttaacgaggcatcatatctatatgatttattcaactgatattaaattatggcggtgagagagggattcgaaccctcgatacgttttcacgtatacacactttccaggcgtgctccttcaaccactcggacacctcaccatttttaa

SEQ ID NO: 608 - DNA, 2280 bp, Xenorhabdus sp.; identical to SEQ ID NO: 607
  CDS (2)..(478)

SEQ ID NO: 609 - DNA, 1576 bp, Xenorhabdus sp.
  CDS (694)..(1473)
cgagccatgtgctctaaagtccggaaataacatgcaacaaacattaaccactcaaacctctcgtcttgaactgactgaacgtattatcacagccaaacttgcgaaaaacctctcatgggaagacattgcgcagggcacagggctgagtgtgacttttgttacagcggccttacttgggcagcattcattaccgatggaagcggccaaaaaggttgtcgaacaattagggctgaaagatgatgcggtaaaacttctacaggcaattcctatgcggggttcaatcccaaccggaataccgactgacccaacaatttatcgcttctatgaaatattacaagtctacggaacaaccttaaaagcgttaattcatgagcaatttggcgatggtattattagtgcaattgactttaaattagatatcaagaaaatcgaagatcccgcaggcggaagccgggctgtaatcactctggatggtaaatatttaccgacaaaaccgttttaatcatgtgaaacccgtgtgctggtgggtgttttcctgtaagcggagaagtattcggggtgatgaatgaaaagggataatgagagaacgtatataataagagattctggtcagaaagagtcttaaatcagcacttttaaattatacgctatggatttcgagttgcatcactcccctaccaatgagtactttttatgactgattttttaactgcgaaccaaatagcctgggataaacaagccgaagagcagcatccgtggtctgtccctgttagttccgatatggtttcacaagccaaaaaaggtgaatggcaggttcatctcactccgaaagcgcttcccaaagagtggcttggtgatattagccagaaacgcatcctgtgtctggcctctgccggggggcagcaagcgccaatactggcggcggccggagctgaagtcactgtttttgatctttccataaaacaacttgagcaagacagaattgttgcagagagagacgaactccgaattgagactgttcagggagatatgcgggatctcagtatattcgccgatgaaacatttgatttcatttttcaccctatctctaatttgtatattcccgatgtcaatcctgtatggcaagagtgtcaccgggttttaaaaacaaaagggaaattgttagcgagtttttttaaccctgtcgtttttgtcggagaacgcaatcaagaacatatgcagcaagggattattaagcctctgtataaaatgcctttttctgaaatggatattctgacaccagaacaaataactgataaaaaccagaaacaggaagcgtttgttttcgggcactctttaactgatttaattggcggacaactacgtgttggattccggttaattgatttttatgaggattggcaaccccatccccgttttgtcatagatcagtatttacctacttttatggcaacccgctcgattaaagattagctggtacactatgtggttactttatcctatacacaatggatattagttaaaaaactcttcccgaatagaacattagagacaccgtagtccgatctttagggcg

SEQ ID NO: 610 - DNA, 1576 bp, Xenorhabdus sp.; identical to SEQ ID NO: 609
  CDS (2)..(502)

SEQ ID NO: 611 - DNA, 1056 bp, Xenorhabdus sp.
  CDS (731)..(1054)
aagtttcggtttctatctttggtcgtgctacgccagttgagttggatttcagtcaggtcgagaaagcttgatttgatgcttaattgagctattttgcttgcaaagggtgtgaaattagcatacaatttcgcgccttttgtttttgttcgggggctattttaggttatccgaataggcaataagtctgatgacagacataattttttgtggttttgcctgatttaattattaggcggggcctgaaacgttaggggagcctcttttctgaggcgataacacccatatagaggaaatatagatggctaagaaagtacaagcctacgttaagctgcaagttgcagcgggtatggctaacccaagcccaccagttggtccagcactgggtcagcagggtgttaacatcatggaattctgtaaagcgttcaatgctaaaactgaaagcatcgaaaaaggcctgccaattccagttgttatcactgtttatgcagaccgttctttcactttcgttaccaaaaccccaccagcggcggttctgctgaaaaaagcagcaggcgttaaatctggttccggcaaaccgaacaaagagaaagttggtaaagtaaccagcgctcagattcgtgaaattgctgaaactaaagctgcggatatgactggtgctgatgttgacgcgatgatgcgttcaatcgaaggtactgctcgttccatgggcctggtagtggagggttaatcaatggctaaactgactaagcgcatgcgcacaattcgtgaaaaagttgatgcaactaagcaatatgacatcaatgaagccgttgctctgctgaaagaactggctactgctaagttcgtagaaagcgttgacgtagctgttaatcttggcatcgatgctcgtaaatctgaccagaacgttcgtggcgcgactgtactgccacacggtaccggtcgttcagtacgtgttgctgtatttacccagggtgcaaacgctgaagcggctaaagctgctggcgcagaactggtaggtatggaagatctggctgaacagagtaagtttaaaaggca

SEQ ID NO: 612 - DNA, 1056 bp, Xenorhabdus sp.; identical to SEQ ID NO: 611
  CDS (299)..(727)

SEQ ID NO: 613 - DNA, 1000 bp, Xenorhabdus sp.
  CDS (753)..(992)
attcacgcttgttctggtgtttctccctgttcaagctttcctcccggaaattcccaaaatccgcccatatgtgaatcggcacgacgttgggtaataaaaatttcattattgctgtttttaataatgcctgccgcaatatgcaaatgttttttttccataacgttttccatgatggtcgttcttacaggccataataaatagccttatgggaagatataatctcatgagacctgcatcaattcacatttctttttatctgtatcttcatgcataagagaatattatatatacttgatgcatttctattcataagaagtatattcaatcgatttcaaagtgtatcactgcgacaagaaaacgctccttaggcgcttagataatctatgcttgtaactacgctaaccggatgaacaacgcagataataaaaagcaatttgaagaacaacaaacttacattaaccaaacaatacgacaaaaagaaggcagccagaaaatgaatggaaaaaacgtcaaataaggttttatccaagaataaaaataattaaatcatacaataaagattgagggagaatcattcatgcaataggagtatgtttcatatttcataacatctcacacagtccataaaatcattataaatataaggttatacagataaatcactctctaatagtccattagtatctattgaaatccgaagtatttagggggtatattcgggggtatatttggatttaatgagggtatatccgatgaaactcacagccagacaagtagaggcctcaaaaccgaaagataaaccctataagctcgcagacggtggcggattatatttattagtaaaccccaatggctctcgttattggcggttaaaatatcggattgctggaaaagagaaattactagcattgggggtatatcccgctatttctcttgcagaggcaagaactaaaagaaatgatgccaaaaaagcgatagcggatggaaacgactttagagc

SEQ ID NO: 614 - DNA, 1000 bp, Xenorhabdus sp.
  CDS (831)..(998)
gctctaaagtcgtttccatccgctatcgcttttttggcatcatttcttttagttcttgcctctgcaagagaaatagcgggatatacccccaatgctagtaatttctcttttccagcaatccgatattttaaccgccaataacgagagccattggggtttactaataaatataatccgccaccgtctgcgagcttatagggtttatctttcggttttgaggcctctacttgtctggctgtgagtttcatcggatataccctcattaaatccaaatatacccccgaatataccccctaaatacttcggatttcaatagatactaatggactattagagagtgatttatctgtataaccttatatttataatgattttatggactgtgtgagatgttatgaaatatgaaacatactcctattgcatgaatgattctccctcaatctttattgtatgatttaattatttttattcttggataaaaccttatttgacgttttttccattcattttctggctgccttctttttgtcgtattgtttggttaatgtaagtttgttgttcttcaaattgctttttattatctgcgttgttcatccggttagcgtagttacaagcatagattatctaagcgcctaaggagcgttttcttgtcgcagtgatacactttgaaatcgattgaatatacttcttatgaatagaaatgcatcaagtatatataatattctcttatgcatgaagatacagataaaaagaaatgtgaattgatgcaggtctcatgagattatatcttcccataaggctatttattatggcctgtaagaacgaccatcatggaaaacgttatggaaaaaaaacatttgcatattgcggcaggcattattaaaaacagcaataatgaaatttttattacccaacgtcgtgccgattcacatatgggcggattttgggaatttccgggaggaaagcttgaacagggagaaacaccagaacaagcgtgaat

SEQ ID NO: 615 - DNA, 1681 bp, Xenorhabdus sp.
  CDS (2)..(538)
  unsure (1)..(1681): unsure at all n locations
tgctctaaagtccttagtcatggcggggaataaatgggatggcatgactcaggaagatcgtgatcatgttaaggatatgctggacttacgtctgggatttgttgattttgcccgtgtccactttatttctgctttgcatggcagcggagtagggaatctgtttgattctattctggaagcttatgaaagtgcgacccgtcgtgtcaatacgtccatgctcacccgtattatgcgtatggctgaagatgatcatcagccaccaataatacgcgggcgcagggttaaaatgaaatatgctcatgccggaggatataatccgccaatcgttgttattcacggtaatcaggtaacaggcttgcctgattcgtataagcgctacttaatgaattatttccgccgttctttaaaagtgatgggtacacctattcgtattcagtttaaagaaggggctaacccatatgcgggtaagaaaaacacattaacggcaacacagttgcgtaaacgtaagcgtttgatggaacatttgaaaaagcgttaattaagcaaaaaaataaagagctataaatagctctttatttttgtttaagactattaaccattctgatgaataattaaattgattatcttctgggttatactttttaacatcgaatgattaattacttttttctttatcaattttagttatatcttttttttgtaacggagaattttgggctgattttttcattaacttattaacatcatttaatgtttttagcacatattccttatctttctcatcgcagtgctttgcaatatactccagcaaatggggcgggactatacagcgttggtttgttgtgttgcacataatatacccaatttgttagtgtgtgagcctggtatctatataatatcctccgtttttcaagtatctctttgctggctacactcacgcactccagtcaccgtttttataaatatacgatgcgctatgatcccagagattaatgagcggcttttgtgttccatcggaaaccagcctttatcattcctttgttgccgtgatgcacattgaaacccgttggatataatttaccttgctagtctagatgttagtcaaaataattaaatcagtcactactaaaaatgtaaatttttttattcatttattttgttaattatatatgtaataagcagataaattttcagaaccatagctaaccttatattattgggaattcatgtggttgacgaatttaattaaccccaattctggataagaaattgacgagaagcctgttcaaggagccgtgttttggtgcaagtcgaaacagctccggggaggaacaggctatgaacaacttagttgaaattttcatcgatgtcgatgacttttgtcgttttttcattccacaatgggaacagttttgtctcaataagggatatcgcctacgtcgtagaaaaggtcacatgtatcccagtgaaatcatgaccatcctgatcctctttcatctgtcgcattatcgtgattttaaaaatttttatctggagcatatttggcgatatcatcatcacgattttcccaccttgctcagttatactcgttttatcagtgtcgcgtcttccgttttagtgcctctgtgcagctatctgactcaattaaaaggaaaccctacggngatcgcctttattgact

SEQ ID NO: 616 - DNA, 1681 bp, Xenorhabdus sp.; identical to SEQ ID NO: 615
  CDS (1339)..(1680)
  unsure (1)..(1681): unsure at all n locations

SEQ ID NO: 617 - DNA, 1533 bp, Xenorhabdus sp.
  CDS (77)..(727)
aaatagaaatcaaaagtagcatcagccgtattgattcctttgtcacaaagctgttgcagccaaggtaaccaataatatgaataaccttaatgtcattattgcagatgaccatcctattgttttatttggcatccgcaagtcacttgaacaaattgagtggattaatattgtcggtgagtttgaaaattcaactacactgattaatagtttgccacatatagaagcagatgttctcataacggatttgtcaatgcccggtgacaaatatggtgatggcatcaccctgataaaatatattaaacgccattatccgacattggctattgtcgttctgacgatgaacaataatccggctattttaagtgcagtacttgaacttgatattgaggggattgttttaaagcagggagcgccaaccgatttgcctaaagcactttctgcactacaaaaaggtaaacaatttacacctgaaagtgtttctaaattgttggaaaaagtgaatgctaatggttacggagataagcgtttatctccaaaagagagtgaagtgctgcgtttatttgctgagggtctactcgttacagatattgcaaagaagcttaatcgtagtataaaaaccattagtagtcagaaaaaatctgcaatgataaaactgggagtggataacgatattgcgttacttaattacttatcttcagtcactattgacaatgatatggttaaatagcctatttgttatttctttcagtataggatcggtgatttatgttgccgatcttatatgtgccactaatgtttccttcaattttgtcagtgatactggttttagtaaacaataatccataccgacatcagcacaacgttgcctttcctctgccattgcattcgctgtaatcccaatgatgggtttagtatatcctttatttcttaaatattttgtgaattcataaccatccatattgggcatgttaacatcggtcagaataatatcagtctcgttatttttcaggtattcaatagcatcaagcccgtcattggccattgctgttttgaggcctaatgagcttaattgttcaaccagtaaatgccgattgataggatggtcatcaacaactaaaatcctaattgtatttagtctatcatctactttgactggcgttgttattgttgaagcagaagacataggcatataattattgtctgatatcaggttatcaataaaagcagcaaaatcactaatctggtaagtgttatgcaaccagtaattattatgggtgttttggggttccccgatatgctgttctgatatttcaatgtgataatggtcagaattattgggctcaatagggagatcactgactagaaattcagagtcagtggctttattctcatcatataaagcaatttgaaaatgtgcctttgtaagcaaattgtacaggtatttttctaaacaatcattgtgaatagctaagactattttttgttgagcatgctttggagaataggtgttagcttggtatttattctttgttt

SEQ ID NO: 618 - DNA, 1533 bp, Xenorhabdus sp.
  CDS (3)..(770)
aaacaaagaataaataccaagctaacacctattctccaaagcatgctcaacaaaaaatagtcttagctattcacaatgattgtttagaaaaatacctgtacaatttgcttacaaaggcacattttcaaattgctttatatgatgagaataaagccactgactctgaatttctagtcagtgatctccctattgagcccaataattctgaccattatcacattgaaatatcagaacagcatatcggggaaccccaaaacacccataataattactggttgcataacacttaccagattagtgattttgctgcttttattgataacctgatatcagacaataattatatgcctatgtcttctgcttcaacaataacaacgccagtcaaagtagatgatagactaaatacaattaggattttagttgttgatgaccatcctatcaatcggcatttactggttgaacaattaagctcattaggcctcaaaacagcaatggccaatgacgggcttgatgctattgaatacctgaaaaataacgagactgatattattctgaccgatgttaacatgcccaatatggatggttatgaattcacaaaatatttaagaaataaaggatatactaaacccatcattgggattacagcgaatgcaatggcagaggaaaggcaacgttgtgctgatgtcggtatggattattgtttactaaaaccagtatcactgacaaaattgaaggaaacattagtggcacatataagatcggcaacataaatcaccgatcctatactgaaagaaataacaaataggctatttaaccatatcattgtcaatagtgactgaagataagtaattaagtaacgcaatatcgttatccactcccagttttatcattgcagattttttctgactactaatggtttttatactacgattaagcttctttgcaatatctgtaacgagtagaccctcagcaaataaacgcagcacttcactctcttttggagataaacgcttatctccgtaaccattagcattcactttttccaacaatttagaaacactttcaggtgtaaattgtttacctttttgtagtgcagaaagtgctttaggcaaatcggttggcgctccctgctttaaaacaatcccctcaatatcaagttcaagtactgcacttaaaatagccggattattgttcatcgtcagaacgacaatagccaatgtcggataatggcgtttaatatattttatcagggtgatgccatcaccatatttgtcaccgggcattgacaaatccgttatgagaacatctgcttctatatgtggcaaactattaatcagtgtagttgaattttcaaactcaccgacaatattaatccactcaatttgttcaagtgacttgcggatgccaaataaaacaataggatggtcatctgcaataatgacattaaggttattcatattattggttaccttggctgcaacagctttgtgacaaaggaatcaatacggctgatgctacttttgatttctattt

SEQ ID NO: 619 - DNA, 1600 bp, Xenorhabdus sp.
  CDS (2)..(1600)
gctcgatccatgtgctctaaagtctcttttacaacatgttgatatccgtgagttcaatcaggaagaattgcatcaacaactcacccaatggcaaagcggattcgattaccacaacgggccattatggcaggcggctcatctgattggctacgcagatggcagcgcccgtttgttttttgccttccaccatctgattattgatgccgtatcctggcggattattgccgaagatatgcgtttactcttgcaaggtatggcattgcgcccaaaaaccagcagttatcgccaatgggtagccgcagtacatcactacgccgaacagcatcagaatgagattacctactggcaacaggtgatggcaggccatgatgttaaaccagcacaggataacatcacccatcacccattaagtctttctgtggagacgacaaacattctgctgcatgaagccaacaccggttatcacactgaaattaacgatttacttctgagtgcgctggcgctggctttgcaggaagtcttcgcacaacccgtcaatcacattacgctggaagggcacgggcgggaacatatcgataacacgctggatgtttctgaaaccgtgggctggtttaccacgctgtatccggttcagttgcaaacacagtctgatattgccgaaaccattattcataccaaagagatgctgcgtggtattccgaacaaaggtatcggttacagcgcattgcatcaggcggggtatctgaccgatgatttaccggctatcagtttcaactacctcggtcagcttggaggagccagccatcaggattggagcatcaccagcgatgattgcgggaatgcgatagccagtgaaaatagcagccatttattgctgggcatcaatggcgcaattcaggccggaagactgcaattcagtgtggattcccgcctgccgcaaagccagaccacaatgtttatcaccgcatttgagcaaatgctcaaccgcgttatcgccattgctcaggcacaggcgcaatcaggagggataaaaacgtccagtgattatggtattgaagggctttccgtcaggtcattaaatcggcttcaacagcagtatcaaattgaagccctgtatcccgccaccagcctgcaacaaggttttgtctaccattatctggctcagccgcaggatgatgcctatcgcgtacaatggttactggattatcacactgatgttgacattaccgcctaccaacaggcgtgggcgctggcttcgcttcgtttccctactctcagaaccgcctttgactgggaagggaaaatattacaggttattacaaccgaggccagtattggttcagccaacttcagaagaaaagatctcacccaattatcagaaacagactgcaaccgggtgattgacgaagttcagcaaactgaccgtaccctgccgtttgatttaagtcagcccggtttggttcgctttacgatgattcaacagcgtgaacaactgactaccgtgcttgtcacgctgcaccacagcattatcgatggctggagtacgccgattttattacaggctgtacatgagtattacaacgccatcattcagggcgaa

SEQ ID NO: 620 - DNA, 1449 bp, Xenorhabdus sp.
  CDS (1323)..(1448)
taccccgagtttattctgtatctaccttcctagaaaagaaattctagctttagccgattgatttttataataactcaaatcaccatacacggaacattaaaagggggcggttcccgtaaatccctatgcgcttagtcttaatgctataacccttttattttatacaattctgtcagaaaaccagaattccggctctgagcaggaattgaggaatatcaatcggttaaaaggactttgaaaacccatttagcataagctattgattttattcatactcggcatggtgcggtatttattgataatcaatgagttacgtgtaattattttgtaacctattgtttttacttatttccggcagagaaccggagattaagtaaatcaaggtgtgaaccaactgttggggaaatccctatcgttgccgtagagagtcaaaatcgtggccctctcaaagtgtgatatcccacttagggtattggggaaatctcaataccttttgcttttgtacatgcgggattttcccgtatttaactgagtgactaactgtcagtctgatggtagagcaaagcgggaattcccacttaggtgataactcattgatatatattcagacgctagatttggcgtctggtcatcgtgtaactgacccaattattttgggttacctgtctcgttgttcgaagcaagaactgcccctctttaagaggttcagtttgagcaccgaaaatatcggtatgcaaaatccaatgtccgataatcggactttgagcgtaactgatagttactcacaaatgactctgtgcataaataatatttactcacaatttgagcgtcagtctggctgactcacagaatttgtacacctctttaagaggtgcgcaaaaggtgagatagggacaatgtattaccctctattgtggtaatcacaacgcaggtgggcttgagtttaagccgtccagcccaaggttacttaatataactcaatgactccgtacgtattatgttcgcagtgatttaacttattgattattattatgattgaaaaaccagttcatctataggtggtggaacatggcacgaagacagaagaagaatgtccctctatagtcgacatggttacgggaaaggctttttattggcagggctatcagttagctgacacctctatcgcttaatagctatacggctggcatattttcggtattattcgttatgctcacatcattcagaataacaatacgtaaggcgaatacatggacaacaagatcatcgaaatactccagtacgaattaaagaaaggaaccggcagtcagtttcatgaaattatggtaaacgtcagcgttccgttacatcgctcacagggaattgatgtggtgagtttcggtaactcgcagcatgatccagattgttattatcttatccgggcatttgaagatatgggcgaactgtcgg

SEQ ID NO: 621 - DNA, 1590 bp, Xenorhabdus sp.
  CDS (1)..(1590)
  unsure (1)..(1590): unsure at all n locations
cagatactcgctgatatcntgcactgttcacgtcgccatgtccgttccctattaaataatatgcagcaagctggctggttacgatggcacgctgaagccggcagaggaaaacgttcccggctccactttctgcgcagtggactagaactccagcaacagcgggcagaaaagttgttcgaacaggaagacattgaggagctggttcatttagtcggtgacaaaaataccgtgcgccaaatggtactatcgcaactggagcgcaatttcaggcaagggaaaagcacattacgcattatttactatcgcccatttccaaatttattacccggcacagcactcaggcgttcagaaattcacctgatacggcaaattttcaatgggttaacccgtataaatgaggaaaaagaggaagtagaaggtgatctggctcatcactggcagcaaatgacagaacatcattggcgtttttatctgcggccagccatctatttccaccacggcagagaattacaggcaaaagatatcatcaactcactggagcatttaaaaagctttccgcttttttcccacattaaaaaaatcacctccactattccctatacggtagatatctttcttcatcagcctgacactcggtttgactttctgatgggcagccctcatgccatgatcctgccacaagaatggaaaagcctgcccaactttgctcaacgcccagtcggaaccggcccctatcaggtcgttaccaataatagccataaattaaaaattaaagcatttgatcactattttggtttcagggcgctacttgatgaagtgaatatctcgattcatcctgaattgacggaaaaactggtttgtacaaccctgcatctgggaaacgatggtaacaataacaattcattggatagccgaatggaagaaggctgttatttcctgttaagtgatcaacgctcggcgaaatgtgcaaggcaagaagtgcgtgactggctgtgtagtttactcaccccgattaatttattagcgaactgtgatcctttctatcagcgccactggtcaccggcatatgggttattgctacgttggcatcacagcaaactcctcccacaacgccaaaaaccggaagatattaccagcctgactgtcactttttatcaacagcatcatgaatatcatactatcagtaagatcctgcaagttattctggcaaagtatggtgttgagctgactatcaatattgtggattacgaaacatggttcaatggcgatgccgaaagcgatgtctggttagccacagcaaatttttataagccactggagttttcactgtttgcaactctctacgaaattcccttgctgaaaaaatgtctgaacagcgatttaaacagcgaggtttctttatggcggcaggataagctaaatgttgaagagtggtgtgaaaaaatcgttgatgaacataggttacatccactattccatcactggcttgaattacaggggcaaagaagtatgagaggagtgaaaatgaatacttttggatggtttgactttaaatctgcatggtttacacctccggaaggctttagagca

SEQ ID NO: 622 - DNA, 1294 bp, Xenorhabdus sp.
  CDS (3)..(1292)
atatagagctaactggacatgacggtcatagtttaagttcttctaaaacacaatcacgctttagtgggaaactatggtatgaaacggatgctcaaggacgcacaacccaatatatttatgatgatcgtggacgaatccttaaatgtatcaataatgctaatactgactattttcgtgaagaaacttataattattccattgaagacaatggttttctgacaagcactaaaactgatatatggggtaaccagcgccgaacccgttttgatggacttgggcgtgtttaccagcaagagattctggaaaaaggtcaagaggaacaaggatggcggttgattcaggaaaatcagtatgacgctttcagccgaatagtgtcggaaactaattatgactggttacctgtgggacaagaaaataccaaattaacaaaaatcgcttctcagaaatattttgaatatgatgattggggacagcagtgtcgggtaacttttaatacaggtaataatacaagtaagagttttctacaaaattatgatcctgtaacccgcactacacagagcaccacacaggctgacggattaaattttagccataaaattgtggagtatgatcagaataatcgaccaatcactgtcaaattatatgacagccagcacaaactctataatcaacagacttatcattatgatggcctcggtcgtttgcgggcgacttttgatgttttgggaaaagaaactaaatacacctatgacttatttgatcgggtttcgtccattaaatatagtgatggctcagtaatcagaaaaacttatgctccattcagtctcgataaattagtcacgcaaattgaaatagatgaacatatcttgggcactcgtagctttgatagtctacaacgtgtacattcaaccactagtggagaacgtacatatagatataattatcagggaaattgtccttaccaaacgactgacccattagggcaaattgtaactcgtgaatatgagccattgttaattaatgcattaatgcatgttagcgctggcgaaatacagcaaaatttcacttacgataaaaaaacaggtgttctgactcaggttactgcggaaaatactgtaactaatgaaatgcgttatactccttcaggtcatctatatcaaaaaatcagccgttttgatgattctgaagtatcacgtatagcagagtatacttattctcccatcggtcagttgacgagttatcgggatatcactggcaaaatttgtcagatgcaatttgataaatttgctttaga

SEQ ID NO: 623 - DNA, 1560 bp, Xenorhabdus sp.
  CDS (1)..(165)
tctggcgatcaagaaagccagattttctgcacccatttaaatgctgagctaacctctattgccggccaatattggctcagtgatgaaattccagataattttgctggtaaagcggtgaaattacgtctggtaaataatgaattaactattgaaaccttaatctagcccttataacaaggaatcgcttcatggcacgcattattgttgttacatctggtaaaggtggcgttggcaaaaccacttcaagcgcggccattgctaccggcctcgcacaaaaagggaaaaaaaccgtagtcattgattttgatatcgggctgcgtaatctcgatctcatcatgggatgtgagcgccgtgtggtttttgacttcgttaacgtgatccaaggtgacgccacattaaatcaagcgctgataaaagataagcgcacagagaatttatatatcctgcctgcttctcagactcgggataaagatgccctcacccgtgatggtgtcgaaaaaatcctgaatgaattaactcagcaagggtttgattttattgtctgtgattcaccagcaggtattgaaagtggtgccttgatggctctctactttgccgatgaagctattattacaacaaatccggaagtttcatctgttcgcgattcagatcgaattttaggtattctcgcgtctaaatcacgtcgggctgaacgaggtgaagaccctatcaaagaacatcttttgttgactcgttataaccccggtcgtgtgaaccgtggtgatatgctgagtatggaagatgtcctggaaattttgtgtattcctttaatcggtgtcattcctgaagatcaatctgttttacgctcttcgaaccagggagagcctgttattctggataaagagtctgatgcgggtaaggcatacgaagacacagttttacgtttactcggtgaagagcggcctttccgctacattgaggaagaaaaaaagggctttttgaaacgcctgtttggagggtaacgcatggctttgttagatttcttcctgtcgagaaaaaaaccgacagccaatattgccaaggaacggctgcaaatcatcgtggcagagcggcgccgtggtgatgctgagcctgcctatttgcccgaaatgaaacgcgatattctggctgtcatttgtaaatatgtacaaattgacccggatatgctttctgtacagtttgagcaaaagaatgatgatatctccgtactggaactcaatgtaacattaccggagattgaggaatcgccaaaataacgctatcaaatagtgctatttaatttaagcgcgtaatttcccgaaagtaatcgggatgtataaacatcccgatttcagttcagacaaataaatcactaaactgggtaatcagctaatatttcagcaatctgttcagccaatagattattccgccagccccgtaataactcaggtagattgtctgatgatttcagcttccagcgagcactgagtaattgattaatctgacggcgggatgccaataattcggcgcagaactggtgcggctcactgaccttatttatca

SEQ ID NO: 624 - DNA, 1560 bp, Xenorhabdus sp.; identical to SEQ ID NO: 623
  CDS (189)..(1001)

SEQ ID NO: 625 - DNA, 1560 bp, Xenorhabdus sp.; identical to SEQ ID NO: 623
  CDS (1005)..(1274)

SEQ ID NO: 626 - DNA, 1560 bp, Xenorhabdus sp.
  CDS (3)..(191)
tgataaataaggtcagtgagccgcaccagttctgcgccgaattattggcatcccgccgtcagattaatcaattactcagtgctcgctggaagctgaaatcatcagacaatctacctgagttattacggggctggcggaataatctattggctgaacagattgctgaaatattagctgattacccagtttagtgatttatttgtctgaactgaaatcgggatgtttatacatcccgattactttcgggaaattacgcgcttaaattaaatagcactatttgatagcgttattttggcgattcctcaatctccggtaatgttacattgagttccagtacggagatatcatcattcttttgctcaaactgtacagaaagcatatccgggtcaatttgtacatatttacaaatgacagccagaatatcgcgtttcatttcgggcaaataggcaggctcagcatcaccacggcgccgctctgccacgatgatttgcagccgttccttggcaatattggctgtcggtttttttctcgacaggaagaaatctaacaaagccatgcgttaccctccaaacaggcgtttcaaaaagccctttttttcttcctcaatgtagcggaaaggccgctcttcaccgagtaaacgtaaaactgtgtcttcgtatgccttacccgcatcagactctttatccagaataacaggctctccctggttcgaagagcgtaaaacagattgatcttcaggaatgacaccgattaaaggaatacacaaaatttccaggacatcttccatactcagcatatcaccacggttcacacgaccggggttataacgagtcaacaaaagatgttctttgatagggtcttcacctcgttcagcccgacgtgatttagacgcgagaatacctaaaattcgatctgaatcgcgaacagatgaaacttccggatttgttgtaataatagcttcatcggcaaagtagagagccatcaaggcaccactttcaatacctgctggtgaatcacagacaataaaatcaaacccttgctgagttaattcattcaggattttttcgacaccatcacgggtgagggcatctttatcccgagtctgagaagcaggcaggatatataaattctctgtgcgcttatcttttatcagcgcttgatttaatgtggcgtcaccttggatcacgttaacgaagtcaaaaaccacacggcgctcacatcccatgatgagatcgagattacgcagcccgatatcaaaatcaatgactacggtttttttccctttttgtgcgaggccggtagcaatggccgcgcttgaagtggttttgccaacgccacctttaccagatgtaacaacaataatgcgtgccatgaagcgattccttgttataagggctagattaaggtttcaatagttaattcattatttaccagacgtaatttcaccgctttaccagcaaaattatctggaatttcatcactgagccaatattggccggcaatagaggttagctcagcatttaaatgggtgcagaaaatctggctttcttgatcgccaga

SEQ ID NO: 627 - DNA, 1206 bp, Xenorhabdus sp.
  CDS (10)..(336)
  unsure (1)..(1206): unsure at all n locations
gtgctctaaagcgatctctttgtctccgccatcaccatcatggaattagaacttggcattttattgattgagcgtaaggacgccacacagggaacgatactgcgggcgtggctggagcaacatgtcttaccggagttctttgaacgaaccttgcctgtcgataccgccgtagcacaacgctgcgcacggttgcacgttcctgacaagtgcagcgaacgtgatgcactgattgcagcaacggcacttgtgcatggtatgacgatagtcacgcgtaatgtagccgattttcaagcctcaggagtaacaatcctcaacccgtgggagccgaagccataatgatgttcggaaactgtcattagtagattaccgtgtgcgctgctgaagatctttcagcatgtcctgcagtctctcaatggcctgcgcattttccgcagcggattgcttgtaacgcgcatcgactctggcctgttcagcaagttgttcctgtaagcgccgaccggtttttgcatccagaaaatgatcccgactggcctccactatccagcgggtatctgtggaggcgtgaccactgaccagcgatgtccactcagaagcatgacctgatttatccaccagccgtgcccgaaagtaaaatttctcccccgctgccagcccttgcaacgtgtaggtgcgctgcggataggcaatatcagcgaactgcaacgtgtcatcctcttctccacttttgttgtagccaatttccgttttcagcaggacatttgttgacttgacaaaagcccaatccaaccgaataccaaaaagtagcggcgtggtttggagagactgcggttccgatggcggccttgtgtgtctttccagcagggtatcccgcgtggtcgtccaaatactggagattgccgcggcattcatcgccctgactcgcgcctgatagcgtccttcatcgacgttcggcacctcaagacgccgggctgtcgtctgtggagcggttatccagttaccgttgtcttttcgccattcgacttcatagaccacggcactgctggcggcatcccatgtgaccctgcaacgtggtggtgataatgccctgattaatcgaataatcactgtcgatgcggatatttttcggggccggctgaacacggggtggaagagtagtcacgnggcgttcgtcataccgggtgttcctgtcgataagcgcatacttgt

SEQ ID NO: 628 - DNA, 702 bp, Xenorhabdus sp.
  CDS (1)..(207)
ctctcaggtgatgaacaggacggaggtgccctcctcttcctgaagcgtcttgatgagatcgagaatctggccctgaatggtcacatcgagcgccgtcgtcggctcgtcggcgatcaggagcttcggccgggacgcaagcgccatggcgatcatcacgcgctggcgcatgccgccggaaaagcggtgcggatattcatcgaaacgtgaggcggccgaggggatgcggaccttttccagcaggcggatcgtctctgcccgcgcatcggctttcgacatcggctgatggcacagcagagcctcggaaatctggtcgccgatggtgaagagcggattgaggctggtcatcggctcctgaaagatcatcgccacttcattgccccgcacccgccgcatggcgtcttcggaaagcgagagcagattgcgacctccgagcaggatttcaccctgcaccctgctgctttcgcggtccagcagccgcatgatggaaagcgatgtaacgcttttgcccgaaccgctttcaccgacgatcgcaaccgtgtcgcccggcccgacatcaaaggaaatatcacgcaccacgggtttccagccgccatccacgtgaaagaacgtggtgagattgcggacggaaagcacggcatcttcggcactaagcggtgctgcctgcggcatggtcatgatcgttcccttttctttattctgggt

SEQ ID NO: 629 - DNA, 702 bp, Xenorhabdus sp.
  CDS (1)..(699)
acccagaataaagaaaagggaacgatcatgaccatgccgcaggcagcaccgcttagtgccgaagatgccgtgctttccgtccgcaatctcaccacgttctttcacgtggatggcggctggaaacccgtggtgcgtgatatttcctttgatgtcgggccgggcgacacggttgcgatcgtcggtgaaagcggttcgggcaaaagcgttacatcgctttccatcatgcggctgctggaccgcgaaagcagcagggtgcagggtgaaatcctgctcggaggtcgcaatctgctctcgctttccgaagacgccatgcggcgggtgcggggcaatgaagtggcgatgatctttcaggagccgatgaccagcctcaatccgctcttcaccatcggcgaccagatttccgaggctctgctgtgccatcagccgatgtcgaaagccgatgcgcgggcagagacgatccgcctgctggaaaaggtccgcatcccctcggccgcctcacgtttcgatgaatatccgcaccgcttttccggcggcatgcgccagcgcgtgatgatcgccatggcgcttgcgtcccggccgaagctcctgatcgccgacgagccgacgacggcgctcgatgtgaccattcagggccagattctcgatctcatcaagacgcttcaggaagaggagggcacctccgtcctgttcatcacctgagag

SEQ ID NO: 630 - DNA, 1507 bp, Xenorhabdus sp.
  CDS (1)..(1017)
cgtgaaatcgtctttacttcaggtgcaacagagtcagataacctcggtattaaaggtgcagcgaaattctatcagaaaaaaggcaagcacattattaccagtaaaactgaacataaagctgttttggatacttgtcgtcagttggagcgtgaaggttttgaagtgacttacctttcaccaatgagcaacggcatgattgacctgaaagagctggaagccacaatgcgtgacgatacgattctggtttctatcatgcacgtcaacaacgaaattggtattgttcaggacatcgtgactatcggtgatatgtgccgcagtcgtggcatcattttccacgttgatgcgactcagagtgtcgggaaactacctattgaccttagcaaactgaaggttgatctgatgtctttctcggcgcataaaatttatggcccgatgggtattggcggtctgtatgttcgtcgcaaacctcgtatccgtattgaagcacagcagcacggcggtggtcatgaacgtggtatgcgttccggtacactgcctgttcaccagatcgtcggcatgggcgaagcctaccgcattgcaaaagaagaactgcaagccgagtcagaacgtctgcgtggtttacgtctgcgtttatggaacggtatcaaagatattgaagaagtttacctgaacggtgatttggaactgggtgcaccacacattctgaatgtcagcttcaactatgttgaaggtgaatcattgatgatgtcactgaaagacttagcggtttcttccggttcagcatgtacttctgcgagcctggagccttcctatgttctgcgcgcactgggcatgaatgatgagctagcacacagttctattcgtttctctttggggcgttttaccacagaagaagaaatagactatgcaatcaagttgattcataacgcgattggtcatctgcgtgatctttctccattgtgggaaatgttcaagcagggagtggatctcagcaccatcgaatggtctcatcattaatcagacagtttcaggagtaacgacatggcttacagcgaaaaagtaattgatcactacgagaatccacgcaatgtagggtcatttgatagtgaagatccttcagtgggtagtggaatggttggtgcgccggcttgtggtgacgtcatgagactgcaaattaaagtcagcgatgacggtattatcgaagacgcacgttttaaaacttatggctgcggctccgcgattgcatccagttctctggtaacagagtggatgaaaggaaaatcactggatcaggcagaagcaatcaaaaacactgagattgccgatgaactggagctgccaccagtgaaaattcactgttctattctggcagaagatgcaattaaagctgcgattgcagattataagagcaagcgtcaggccaaataattcttctaaatataccctatgaatttcgagttgtatcgaggcggcaagagaatgaatccctaggaggatcgattgtcta

SEQ ID NO: 631 - DNA, 1507 bp, Xenorhabdus sp.; identical to SEQ ID NO: 630
  CDS (1042)..(1428)

SEQ ID NO: 632 - DNA, 1538 bp, Xenorhabdus sp.
  CDS (657)..(1493)
gattgcacattactcgctatcacaccattgggctaccctatgaaaataccatcattttttcgtttactccctctctccgctgttttgctgacggcctgtaccgttacacaggcaccagacggaacagggtcaatgagctccccgcaatggaatgatcgcaaaacacaattgcaaaatttgactcattatcaaacccggggatctttcgcttatctggcaaatgaaaagaaagtgtatgcccgttttttctggcaacaatatgcggccaataactacaagctacttctgctcaatcccttagggacaactgagctggaattatctgttcagcctaatatcacccagattactgacagtgaagggaaaaaatatatcagtaataatccggaagaactgatttataagctgaccaatatgaatattcctttggataatctgaaaagctggattatcggcctgcccggcaatgcccaaaattttgagctggataaaaactatctgcttaaatcggtaagcgataaagaaaatggtgaaatctggcaggtaaattatcagggatacgatacgtcaatgactccggccttaccaaaccggctggaactgacccaaggtaaaaaccgtattaaactgaaaatggataactggactacccaataatgactttaacctggccttctccggcaaaattaaatttatttttatatatcaccggacgccgttctgatggctatcatgaactacaaacactgtttcagtttctggattatggtgatgaaataaccattactccccgtcaggataatcagatccgcctgctgacacccgttaaaggcgtgccaaatgacgataatctgatcgtccgggctgcgcggttattacaagaccacgctgaaaagcagtcaaccggcacccaataccggggcgcagatatccacattcataagcgcctgcccatgggtggcgggctgggtggtggttcttccaatgcggccacggtactgattgccctgaactatcactggcagacaaacctgtcggatgatgaattggcacaacttggcgttactctcggcgcggacgttcctgtcttcgttaaagggcacgcagcttttgccgaaggtatcggtgaaaaattgcaaccagcctcacctgaagagaaatggtttctggttgctcaccccggaattgagatcccgaccccaaaaatattcacagatcctgaattaaaaagaaattctccgatccgcactttacccgcattattacaggcaccattcaaaaatgattgtgagccaatcgcaagaaaacgtttccgtgaggttgaacagcttctttcatggctgttagaatacaccccgtcacgcctgaccgggacaggtgcatgtgttttcggcgagttcgaatcaccagcatcagcccgtaaggtgttaaatcaagccccagagtggatgcagggctttgttgcgcgtggcgttaacatttcaccattgcatacatttcgctgcaaacaaacagctctaggataaacatgttattga

SEQ ID NO: 633 - DNA, 1538 bp, Xenorhabdus sp.; identical to SEQ ID NO: 632
  CDS (1)..(657)

SEQ ID NO: 634 - DNA, 1538 bp, Xenorhabdus sp.; identical to SEQ ID NO: 632
  CDS (1449)..(1526)

SEQ ID NO: 635 - DNA, 1676 bp, Xenorhabdus sp.
  CDS (237)..(1112)
tgtgctctaaaagaatgatataatatattaagattcttcacaatatgacttgcagtttttatggaattaatatgaagtgataaaatatcctatttgggtaaattcatgcgatagataaaagaaataaacgtaaattatgtcaatttttataaggttatgatttagtgataataaaaaatatttattattgctatgcaaaaagatataattatttttaccataagtgatagagaaaaaataatatgattgagagaacggatagtatatataagctacttaaaaatatctttaatttaagaagagatcatgaaatacatatttctttgcttggtggtatgacaaatacgaattatctagtgatcattgatggtaaagaaatggtattacgtataccaggaaaggcaacggaaaattttattaatagatataatgaaaaaattaacagcgagttgacgtctgtattaggtgttaactctaatgttatttattttgatcataaaacaggtgttaaaataacaagttttataaaaaactccaccgctttatcccctaaaactgctaagtacaacgataatataaaattaatcagccataaattaagagaattacatagttcaaacttgatatttaataattcattcaatgtgtttactgagtttaaacattattattctttattgaaaaataaaataattccttattcttttgagtataaagaggaggttattgactttttttatcaatctgaaggaatattaaacacattagggttagagctctgtccttgtcataatgatttagttgcagaaaatatattgaaacttgacaataatatttatatcatcgattgggaatattcaggaatgaacgatcctatgtttgatatagcagctttatttttagaatgcaattactcctcgagagaacaagaagaatttctttctaattatttagaaaaagacgttcatgataaggtcttaaaaaaaatacttttatttcagtttactcaagatattctttggactatctggacaattgttaaagaagaaaacggagaatcgtttggaaactatggattaaatcgtcttatacgcgcccatgaaacaatgcaaacatacaaatttaattatgcttgattttcattcgaaaatattaccgaacttctatggattatgctcaggagtattttggggattgagttgttctcttttagcattattgctaaaggataatactctggcatcttgctttattattcctataattattgcatttatgaatgattttatttcatttatatctctctatttatatttgttatgcaaaaaagacaataagaaaatactatccagtttaaagaataaaaataatttaattatttttgttgcagctatatttggaggacctatgggaatgtctttttatgttttatccataaaatatataggagtaggatacactgtaattatttcttctttatatcctgctattggtgctctaatatcattttttatacttaaagatcggattcataaaatagggttattagggttattagggttattcttggctgtgttgtgtacagtaattttaggttattcggtttctagtcaggttatatcgggtaaaagtataggattcttttttgctttcttatgtgccttaggatggggagc

SEQ ID NO: 636 - DNA, 1676 bp, Xenorhabdus sp.; identical to SEQ ID NO: 635
  CDS (1165)..(1671)

SEQ ID NO: 637 - DNA, 2544 bp, Xenorhabdus sp.
  CDS (1100)..(2290)
ctcgtgcaatgtgctctaaagtcatcaacgaactcttaccctgtaccaccgcgtgggcctgccagtgttttgtgggttgtcgttgtcacaacgtgagcatgaggaactgggtttggataaacacccgcggcaatcaggccggcaacgtgagccatatcaacaaaaaggtatgcaccgatttcatcagcaatttcacgcatttttgcccagtcaaccacaccagagtaggcagagaagccaccgatgatcattttaggctgatgtttcagtgcctgattacggatatcgtcgtaatcaatttttccattttcatcaatgccatagggaacaacattataaagtttcccagagaagttgaccggagaaccgtgagtcaggtgcccaccgtgtgccaaattcatccctaaaacagtgtcaccgggttgcaacagcgtcatatataccgccatattcgcctgagaacctgaatgcggctggacattagcataatctgcgccaaacagctcttttgctctgtcaattgccagttgttcaactatatcaacgtactcacagccaccatagtagcgtttacccggataaccttccgcatacttgttagtcagctgagagccttgagcctgcataactcttggactggtgtagttttcagaagcaatcagttcaatgtgttcttcctgacgacgaacctcctgctccatcgcctgccacagttcgggatcataattcgcaatattcattttacgctttagcatttggatctcctgactcagctacatctttaaaaaatacccctgagggccagaatgtgacacagggtaaactctttttatcaaatgagatagtcttgacaggacattttacgcaaacgattgcctcaagacctaccgccctatagcccatcatgttttttatccgttccggatttatcattgatctttgtgattcctgtcaaatattgctgtttcacaaatcctgcgattttgatttaagtcaaaataatttctgctttttactttaagctctttcccataagaataagttgcatttaaaatacaacttatcaattgagcatgatttaaaaattcaggagatcatgatgttagacagtcaaactatcgcaactataaaatccactattccgctgattgtttctaccgggccaaaattaacggctcatttttatgaacgcatgttcagtcataaccctgaattacagaatatctttaacatgagccaccagagtaacggtgatcagcgtcaggctcttttcaatgccctgtgtgcttatgcagctaatatcgataacttatctgctctgttaccggcggtagaaaagatcgctcacaaacatgcaagcctgaatattcagccggaacactaccagattgtggggactcatctgttggcaacaattgatgagatgtttcatccgacagaagaagtgctggatgcctggggaaaagcctacgatgtattagccggtgtttttatcaatcgtgaagaagaaatttatcagagtggtgaactttcggcaggaggatggcgtggtctgcgtcagttccgtgtcagccggaaacagccgcaaagcgatattattaccagttttgaatttgtgcctgtcgatggcggtaaagtctcagattataaaccggggcaatacttgagtatttatctggaagatcctgcctttgaacatcgtgaaattcgtcagtattcattaactgccgcaccgaatggaactcactatcaaatcgccattaaacgggaatctcatggcaaggtatccagctatatgcacgataaagtacaagaaggagataccgtattactgtccgcaccgcgaggtgatttcttccttgatatccagcctgatactcctgttacgcttatctctgccggtgtcggcctgactccgatgatgagtatgctgcaatatctgcataaacaacagcatactggtatcgtcaattggcttcacgcagcagaacatggtggttttcatgccttctcagacaaagtaaaagcgattgccgaatccatgcctaatatgaattatcaagtctggtatcgcgaacccagaaatgaagataatttcggcgcagattaccaacagacagggttaatggagctgacttcggtaaaaaatgaaataaatgtagaagggatgcagttttatctctgtgggccggtcgctttcatgcaatatatcgccgctcaacttctgaaaatgggcatccatgaacaacatatccattacgaatgttttggcccacataaagtcatttaactcggcattgtcatctagaaccccgccatcgtggcggggaataaggctcttagagattaaattgcttcttcgtcctgttcaccagtacgaatacgtacaacacgagcaacatcgaacacaaaaatcttgccatcaccaatcttaccggtttgggcggtctgcataatagtatcgacccaggtatcaacaatatacgatccggtacgataatctctattttgactttgggcagaaaatccgccatatattctgca

SEQ ID NO: 638 - DNA, 2544 bp, Xenorhabdus sp.
  CDS (1790)..(2509)
tgcagaatatatggcggattttctgcccaaagtcaaaatagagattatcgtaccggatcgtatattgttgatacctgggtcgatactattatgcagaccgcccaaaccggtaagattggtgatggcaagatttttgtgttcgatgttgctcgtgttgtacgtattcgtactggtgaacaggacgaagaagcaatttaatctctaagagccttattccccgccacgatggcggggttctagatgacaatgccgagttaaatgactttatgtgggccaaaacattcgtaatggatatgttgttcatggatgcccattttcagaagttgagcggcgatatattgcatgaaagcgaccggcccacagagataaaactgcatcccttctacatttatttcattttttaccgaagtcagctccattaaccctgtctgttggtaatctgcgccgaaattatcttcatttctgggttcgcgataccagacttgataattcatattaggcatggattcggcaatcgcttttactttgtctgagaaggcatgaaaaccaccatgttctgctgcgtgaagccaattgacgataccagtatgctgttgtttatgcagatattgcagcatactcatcatcggagtcaggccgacaccggcagagataagcgtaacaggagtatcaggctggatatcaaggaagaaatcacctcgcggtgcggacagtaatacggtatctccttcttgtactttatcgtgcatatagctggataccttgccatgagattcccgtttaatggcgatttgatagtgagttccattcggtgcggcagttaatgaatactgacgaatttcacgatgttcaaaggcaggatcttccagataaatactcaagtattgccccggtttataatctgagactttaccgccatcgacaggcacaaattcaaaactggtaataatatcgctttgcggctgtttccggctgacacggaactgacgcagaccacgccatcctcctgccgaaagttcaccactctgataaatttcttcttcacgattgataaaaacaccggctaatacatcgtaggcttttccccaggcatccagcacttcttctgtcggatgaaacatctcatcaattgttgccaacagatgagtccccacaatctggtagtgttccggctgaatattcaggcttgcatgtttgtgagcgatcttttctaccgccggtaacagagcagataagttatcgatattagctgcataagcacacagggcattgaaaagagcctgacgctgatcaccgttactctggtggctcatgttaaagatattctgtaattcagggttatgactgaacatgcgttcataaaaatgagccgttaattttggcccggtagaaacaatcagcggaatagtggattttatagttgcgatagtttgactgtctaacatcatgatctcctgaatttttaaatcatgctcaattgataagttgtattttaaatgcaacttattcttatgggaaagagcttaaagtaaaaagcagaaattattttgacttaaatcaaaatcgcaggatttgtgaaacagcaatatttgacaggaatcacaaagatcaatgataaatccggaacggataaaaaacatgatgggctatagggcggtaggtcttgaggcaatcgtttgcgtaaaatgtcctgtcaagactatctcatttgataaaaagagtttaccctgtgtcacattctggccctcaggggtattttttaaagatgtagctgagtcaggagatccaaatgctaaagcgtaaaatgaatattgcgaattatgatcccgaactgtggcaggcgatggagcaggaggttcgtcgtcaggaagaacacattgaactgattgcttctgaaaactacaccagtccaagagttatgcaggctcaaggctctcagctgactaacaagtatgcggaaggttatccgggtaaacgctactatggtggctgtgagtacgttgatatagttgaacaactggcaattgacagagcaaaagagctgtttggcgcagattatgctaatgtccagccgcattcaggttctcaggcgaatatggcggtatatatgacgctgttgcaacccggtgacactgttttagggatgaatttggcacacggtgggcacctgactcacggttctccggtcaacttctctgggaaactttataatgttgttccctatggcattgatgaaaatggaaaaattgattacgacgatatccgtaatcaggcactgaaacatcagcctaaaatgatcatcggtggcttctctgcctactctggtgtggttgactgggcaaaaatgcgtgaaattgctgatgaaatcggtgcatacctttttgttgatatggctcacgttgccggcctgattgccgcgggtgtttatccaaacccagttcctcatgctcacgttgtgacaacgacaacccacaaaacactggcaggcccacgcggtggtacagggtaagagttcgttgatgactttagagcacattgcacgag

SEQ ID NO: 639 - DNA, 2544 bp, Xenorhabdus sp.; identical to SEQ ID NO: 638
  CDS (1)..(198)

SEQ ID NO: 640 - DNA, 1737 bp, Xenorhabdus sp.
  CDS (1188)..(1652)
tcgagccatgtgctctaaagaactgcgcatagtttaactggatggttttatactgcatttcccttatgtttattgatattcttaattgtacacctattatcatctcctttatctagccttttcccaatatctttttctccgaataaaatttcgggttataaggattggcttatttttgtgttttcgttatttttaggcgccgtaacccatattatctgggattcattcacccatgagactggatttcttgtcgaaaaaatccctctattacaatttcaaatttttcaatctgttactaacggaccggacattagagtctataagatactgcaacatctcagttcatgcttagggctgctgtatattgccataatatactggcgctatcagaaaaggctgcattttatggaacaagaagaaaacataaaaaagctttctcgtctgatcattattggttttatctcaggtctctttgtatgcccgatagcattgtttttatcctgggatatatcaggaatcaatataggtaaatttatttttaagcagctcactttatctgttcctgttttttctattattttggtggtaatggcattatgggtaaaatatcaggaatggtgtacatatcgaatcaaaaagtaattaaccacatccctgtttaagaagagatgtggttaaataatgcattactcctatttcgtaaaacattttatctatcgttcatatacacaataaatttcaaggtgtgtcgctgcgaaaagagttcatccccgtgagcatagataaccgtatgtttataaaaatagtgactggagtgaacaatcgtagccaacaaagaggcaacttgaaagataaactgtatagtacattttatgctgtattttatcgtcatatagtaacgcttttattacagattctaagtcctcccttactcatcagattgtgtaagagctgtcactaagtgttttttgtccacattatctgtggataaggtagtagataaaaatgtggatatacaggctattcagtgtgggatggaggaaaaggacaagtttatcatctgtacaaaattacaccaaaaaagcaataagagacgaaagcgctgtttaaggttaatataaccccactaaaaggtttgattatttgaaaatagtcggaatattttgaattgaaaaaaatgaaattgagaggaatctgttatgtctatatgggtagatgccgacgcatgtcctaaggtgataaaggaagtattatatcgtgcggcagaacgtgaaaaaatacaggttacattcgtcgccaatcaacgattaagcgttcctgcatctgcttttctacgtactttacaagttcctgctgggtttgacgtcgctgacaatgaaattgttcgtcgctcagaaagtggagatctggtgattacggcggatattcctcttgctgctgaagtaatggaaaagggggctatcgcactcaatccgcgcggtgagcgttatattgatgcgacaatacgtgagcgcctggctatgcgggatttcatggataccatgcgagcaagtggaattcaaacagggggaccatttactctaaaccaacgtgatcgtcagcgattgctcaatgaactgtataaaagggtattgcctccaaaaaaatcctgaaaataaacgtgactgtctctagataaaaaggaaaaggcacggactattattacaaaaaatatcacgaaaaccgtccatatatttg

SEQ ID NO: 641 - DNA, 1495 bp, Xenorhabdus sp.
  CDS (1)..(909)
tgctctaaggggtgtggcataccgttccctccattattagagggggcaacagtacttgacttaggttgtggtggaggcagagattgttttgtgttatccagcctagtcggtgagctaggcagtgttattggtatagatgccactcccgaacaaatcgctttcgctcagagttatattgatcatcatcgtgaagcctttggttatgccaaaagcaatgtcagttttctgcaaggccatattgaggaactggataagctcaaccttccacctgaaagtgtcgatgtcattgtctcgaattgcgtaatcaacttgtcaatggctaaagcggatgtactggctggcatggcaaagttactcaagcagggaggggaagtttactttgccgatattttttcagatcgccggttggaaccagacttgaagcaagatcctctcatcgtaggtgaatgcataggtgatgcattgtatttcgaggattttattcatttggcgcgacaggccggatttcttgatgtgagagttattgccaagacattgaaaacgatatctaatcccataattgaggctaaacttgggggagcaaggttatattctattactttgcgattgtttaagatggatctagaggaaagctgcgaggactacggtcaagttgctatctacaaaggaaatttgcctgaagcacccgatcgttttatgttagatatcggccattcttttgagactggacgtgctgtacccatatgtcgtaatacggctgatatgataaaaaaaagtcgatatagcgtgctatttgatgtcatcggcgaagggcttcgacattatggatctttccagtgtggaacttatcagcagcccgtgttctctattgaatctagcgcttccgatagagctagttgtgggtgttaacaatatttcaagattatcaatcacagtgcatctttctgcacgcaggagacaatagggaagtgttttgcaaatagaaaagatagcacgttcagagagtattgagacaggagttcagtggagtagagcagatagtgtacactaatgttctagcaacatttgtattagttatcacttgatagggcattcaatcttgaaagattgagagttactagttttgaaataggtgtcttattcttgatgcaaaatacgaagtaactctcatgcttgatattaataattccatgatcaaacccaaaatgggtttgatcagtttggtagggagttaggttagataaccagaccgggcattttctaattctatagccccaatttttctgttaggtatattacaactgtaatcatatttaataagaagaaactctctataaaaaaattaaaattgcaagattattaatttagtgattatcagatgacacattgatttatgatcgcttaagactctaatataggataagatttttattgacctaatactctaatcttataatcgatatattaaggtgattttttatccaaaactaagtta

SEQ ID NO: 642 - DNA, 1664 bp, Xenorhabdus sp.
  CDS (747)..(911)
accatgtgctctaaagaagttacagaaatgtatgttaatggattggggtttaagctattaggtgagtttcaggggcataataactttgatggttcaatcattgggcatgaaaaacacagctatcatttggaatttacgcatcatcagggaactgttgttggaagagcaccaacaaaagataatctgctagttttctactttagtgaaaatagtgtttgggaacaatgctgtgagtgtatgataaacgcaggttttaaggtggttcaatcatataatgactattgggatgtagtgggaaaaacctttgaagatatagatggttatagagtggttctacaaaatagagaatggaccgcttaagggatttattaatttcaatatgtggttaaaagcataaagttatgtttttgatcacatgttgaaattattatttgatattggttttaaattattgagtatgaattaaataaatcactggtaatctgattcatatttagagtatgatgcctaacttcaattttatatattgactaatctacattaacgactgaaaggagaaagtataatgacgacagtaacaatgactcttttcgggccagtctgtagctaattactaagatttctacatctggtattgctttggctaggacagcctgaactataactcttattatttttatcgatcataggattgatctatgggcaatacattatattcggctgcaccacaatcgcatatccagattattgcagcagaaaatacctggctggaaggtaaggccatccagcaactcgaaacaacagcacaacttcctgatatggtacgtgtggtcggcttgcctgacctgcacccgggtagaggttatccggtgggtgccgcatttttctcacactcacgtttttatcctgcactcatcggtaatgatattgggtgtggtatggcattgtggaaaacaaatttagcgctgaataaatggtcgttagataaactggagaaaaaactcggttctatcgataatcctttggaagaagatgagctgcctgaggatatggccgaatatttttgctatgcaccggggacgattggtggtggtaatcactttgctgaattgcagcaaatagatgaaatttatcagcctgaaattcttgaaacatggcaactgagtaaacaagagcttttattgttggtacacagcggttcacgcgggatgggacaaatgatcctcgaacagcatgttcgccagtatgggcataaaggattggaggcatccagtgtacgggcgcagcattatcttcagcaacaccaacaggctctcgattatgctcatcttaaccgtcagttaattgctgaacggatgctggggcgctggcgagctgaaggaagctgtttactggatgtttcacacaatttactcacctccggtgttattgagggaattgatggctggctacatcgcaaaggtgcaacaccttctgatcagggattggttgttattccgggttctcgaggggactatagctatttagtaagaccggtagcaactgaacaaagtcttttttctcttgctcatggtgctggtcgtaaatggggacgtaatgagtgtaaatcacgtttagctgggcgttataatgcacaacaactttcgcgtaccgcattgggcagt

SEQ ID NO: 643 - DNA, 1664 bp, Xenorhabdus sp.; identical to SEQ ID NO: 642
  CDS (939)..(1664)

SEQ ID NO: 644 - DNA, 1664 bp, Xenorhabdus sp.; identical to SEQ ID NO: 642
  CDS (1)..(360)

SEQ ID NO: 645 - DNA, 1804 bp, Xenorhabdus sp.
  CDS (3)..(116)
tgaaaatgatccagcaggagccggataaagaacaattactcatcgtcaatttatccggtcgcggcgacaaagatatttttactgttcacgatattttgaaatccaggggggaaatctgatggagcgttatgaattgcttttcaagaaattagagaaccaaaatcagggtgcttttgttccttttgttactctcggtgaccctaatcctgaattatccttagatatcattgatgctcttatttctggcggcgctgacgcactggagattggtattccattttccgaccctgtggcagacggcccgacgatccagaatgctaacctgcgtgctctgtctgctcatgttacgccaacacgctgttttgaattactggcacagatccgggcaaagtatccagatatccccatcggattattaatgtatgcaaatctggtatttcacagtggaatcgatgaattttatgctcgctgtaaacatgccggggttgattccgtgttaattgcagatgtgccagtatctgaatcacgtcctttttactccgcagccataaaacatgatgttgcccctatttttatctgcccacccaatgcagatgataatttattgcgtgagattgcttcatttgggcgcggttacacttatctgttatccagagcaggaacaactggagtacagaatagaatgaaaaacccactgacggatctggtcaacaagctcaaagaataccgtgctgcaccggccatacaggggtttggcatttccgagccagctcaggtcacatctgtcattaacagtggagcggcaggagctatttcgggatctgctgtggttaatatcattgagaataatttacaccaacctcaggttatgttagaaaacctcagagcatttgttcattcaatgaaatcagctaccctgcgataataccgttttcccccataagccaattcgtgggggaaatgactcaaaacataaatccagcttatttgtaagttcccttatattcaacaatactgtttaatcactgctattacattattccctggtaaaaagtccttgtcacattaatgtgttaaaaatcaacgccagaaaacaggaaacatatttcgcaaaattattcctgacatcaacggagaaccattatgaaaaaattacagtccatttccacactccttatcgcagcggttatcaccgccatgctgtcagcatgtgctccaactgcaacgaccgaaagcaccggaaactatattgatgacacggtaatcagcacgaaaataaaaacagctctgtttgaagaaaagaaccttaaatccaatgatattaatgtagaaacatataaaggacgtgttcaattgagtggctttgcacgttcacctgaagaagtcaggcaagccattcagattgcaagaagtattccgggggttaaaactgttattaattcgataaaactgcgctgatcaagcagatatattgtaaaaatgtagaaagtacattgtaaaaaaagggggcaaataatgccccactggttctcatatcaaacacacaggttaactgtatcaaataatcaaaatttataaccaataccaaacataaatacccagggatcaagacgagttttatatttgtgttcttcatcacctactttaaatttcacatcggtttcgatattaatccaccagagcgaagtatttaacatccagtttttatcaagttgaatatccagaccaacctgccctgcattaccccatgaatctttcaaaccaggctatttaattttgcggatttacagtcgtattatattaa

SEQ ID NO: 646 - DNA, 1804 bp, Xenorhabdus sp.; identical to SEQ ID NO: 23
  CDS (45)..(239)

SEQ ID NO: 647 - DNA, 1804 bp, Xenorhabdus sp.; identical to SEQ ID NO: 645
  CDS (119)..(925)

SEQ ID NO: 648 - DNA, 1883 bp, Xenorhabdus sp.; identical to SEQ ID NO: 150
  CDS (3)..(806)

SEQ ID NO: 649 - DNA, 2399 bp, Xenorhabdus sp.
  CDS (2)..(1420)
attttatctgacttttaggaacgtatctttggaaaaaaaattaagcctcacttctctgaccgcattagtcttcagttcaatggttggagcgggcgtattcagcttgccacaaaatatggcaaacgcagggagccccgctgccttaatgataggttgggggatcacaggcataggcattctctttttagccatttctttacttttattgtcccgtttgcgtcctgatttggatggcggaatttttacctatgccagagaaggttttggcgaattagtcgggttctgctctgcatggggatattggttttgcgcaatcattgctaatgtttcttacttagtcattgtctttgctgcattaagcttttttactgacaccgaacattccgtaattttgggcgacggaaatacctggcaggcgctgatcggcgaatctgttttactttggtttgttcactggcttgtactcagaggtgtacaaacagcggccggtgtcaataaattagcaactatggctaaactgttacctctaggaatattcattattctggccgtttttgcctttaaaatggatgtatttacatttgattttactggcattgagatgggcgttcctgtatgggaacaagtcaaaaataccatgctgataaccctatgggtttttattggtgttgaaggtgcagttgtcgtttcagggagagctaaaaagcgtaaagatattggaattgcaaccctgttggctgtgatttcagcattaggcgtttatgtgctggttaccctgctctctctgggtctggtcaccagaccagaattggctgcaatacgtaatccttctatggcaaatctgatggtagggttaattggctcagcaggccaattcattattgttgcgggtttaattgtttctgtctgtggtgcttacctgagctggacaatcatggcggcagaagtacctttcattgcttctttgcataactcatttcctaaaatatttagcaagcaaaatgacaaaaaagcaccagcatcttcattgtggatcacaaatggtgctgttcaggttgctctggttttaatctggttaagcggaagcgattacaataccctgctttctatcgcatcagaaatggtgctcgtaccttactttttagtcggtgcatttttagcaaaagttgcctttgagcgcagtaaccgtgtcttactatttattgccacaggtgcctgcatgtatggcttatggctgctttatgcctctggcttaatgcatttactgctttcggtcatcctatatgcaccaggattacttgtttttctatatgcacgtaagcaaatggatgatagtagtagactgaataaattagagaaatctgcaattgctgttctattattgactacaattccttctacatggttactgatgcactaatacttacagtatatttcctaagctgcattctttgttaaagatagggagagaacaactagtttctcttcttgcttttcctctacttcattttcaaaaaattaaccttgttgagcttttttatactcgatattgatgagtgttgttttagattttctttaaaagtatgttgtaactaatattgcggttaattggtggcaaaatgatctattcataagtatttattcagtttcgttgttatgctcttttttaaagtattcatcatacaaatcatgtcataccagttattattaacagccagttaacttgagttggtttgaagttttacttttttgaaaaaaaatagctaaagcgactaactaatgtcaaatattaggcattaatgataattttgagacttgcgtcacaaataaataatatttagttaaatatataggaaaaatataaaaccacaaaaataagcacttttatcctcatctttattttctgaaatttcccgaaattaatagttaatcttataagacagaataaaaatacattcacgattgaaaaacattctattttctgaattacaattctatttatggaaagttggcagattaatgtttcaagtattgtgctttatcgagttattatttttatctttagcaattgatcgctactatatgctttgcaatatctgtcggataaagaattttggtatcttcttgtaccatctttcagatatcaacttagactactcatttgctgtattatatttgtacggctttaatgttaattaaatcagctatatccctgttgtattcatacatcagggatgggatatattaaaaatgaaaaccaagttaattatttcatccttattcatttcttctgtatttatgccgttggctcatgctgctgatgggaaaatccaatttaaaggagcaatacaagctgaagcatgtcaaattgagacctcttctcaagatcaagatgtaaa

SEQ ID NO: 650 - DNA, 356 bp, Xenorhabdus sp.
  CDS (242)..(355)
gctctaaaggatacggggtcccgtggcgaaattcccacttcaccccctcaaagttggacttaccgtccggcccgatgatcggtgtgttatccagaaagatattggtgccatccagtccgccggcgaactcgccttcccccagtgccagtaagattttggcatacgaggtcgactgtaacgaatccggcgattcgaccggggtacgggggctgtcactgccgcctttgctgccctgaatctgatgctgttccatatttcacccgtaaaaaaaagccgcctgagcgacctgactgaacattgtgaagcgttattgctgatcttcggcgtaaatccccgcggagataatggcacccccg

SEQ ID NO: 651 - DNA, 1899 bp, Xenorhabdus sp.
  CDS (991)..(1899)
tcggtagctagtatgataattttaagaccccattgcattttcccgttagcaaatatttttcctgctggtgttcctgaatatgtttgtaaatgaaatttggataatttgctaggcaaaagttcttcggatttattattgtattcattcttcttgttcattttgattttccttatttttaataaatactatttaatgggatttataattatgtctagattgataacaataaattaatttctttaataattagagtatttttggaaccacttatacgcaagcgaaaacttagtaagtttctattctattatagttgctattcgtacttatgagaaatacaggagagaaattatatttaacctctgaaattattatgaatcctattgctttaatccattgttaatgcttgggatttaaaattttatccacttgattttgaagtgttaaatagattgttggttgtattaatccaaagagtaggattgaaaggataactaatcaattggttgaattaatttaaaataaatattttatacttttaattattgctatatggagtttttgttctatacttaattggtaacttgtatccatcattgggtatcatttcaaaaacgatagaacaccaaataggctgtattcgttaaaaaataccatgtatatatactcttcatttgttttaatgattagtattgtagttattgtttttccttattgttaatatatagagaggaaagtggtttttttacaattctgatatgttctttaagttatcttaagcttgttaatgaaatttaattaatattaaattttcataaaaatgttctatttatttttatgagttctttctatattaattttttatttaaataatattaatttttttgtagttaatccatggggaattttatgaatgatattaaaaaaagaaatccattttcattgggttctgaggctaattttttttcgaatgctaacaatttccaaagtgctgtcatggggaaagttgatccaaggacaggtttatttaactatctaatgccaattattaatttgataggaaataaccaactagggccagaacaatcaattacactttcttacaatccgcttaatgttgctgacattggtttcggtaagggattttccctaggattaacccagtatgatgtaaaaaacagggttttggtattatcaacaggtgagcgttataaggtggatgaatctgacaagacggtttttctccgacaatacaagcaggatgtggtgcgatttgaaaaggatgtggttcaagacgtttatcgagtgatccataaatccgggttggttgaaatattgactggcccccttaatgcttttgatattaaagttcctaagaaattagttaattctttcggacattacttaacatttgactggttatatgagatggatgaagcgcctcatctcgcgtccatttcagacgaaacgagtaaattattaaatattaattataagaaagatatttgcactgaaattactgtctggcctggctcatctgaggcgtataatattgagctaatcttttataataataagattagtcagataaaaaacaggacaccaaaccaaatattgagttgggagttggattatgacccagatagtgagtttttatgtcaggtttcaacgccaacaggattaacggaatgggttatgtataatcctaacggacataaatttccgcagggtgcctatttgccctctttaccctacgttacgcaatatatgcaatatactaaggacggggtggtaatagtccgggattatgagtatacggatttaaattttctgggttatggagctgaagagggaagtcatgatgattgggacagtgatgacgactatctttctttagagcac

SEQ ID NO: 652 - DNA, 1448 bp, Xenorhabdus sp.
  CDS (1027)..(1221)
gccctaaactaaaattatgctattttgctgaaattacatgcttttgttcaacttgataaggttgaaagtaaggtgattgctctgagcatgcaatcataaaaacatcataaaagcatattccgttcttttttataatgatttgtttgatttcgtttttcacttcattggggacattcggatgaccgagtattgtattgacggcattctgagataccttttcatcgacaaaccactcgccgttataacaaacacgtaaatccagcacatcaatatcgtcaaaatggtaaacgggtttgatatcgaaaaggagaacggcagccatcacaaaaaaaagtgcagtaaataaaagcagtgaccaagtgccaaaatagggggcataccacatcagtacagcgaggaaaacataagtaacgatcatagctaaaaacaggtatggatgctgatgaataaagatactattaaaatgtactttaccatccctacgttctgcgagattgatccgctctaggtcctgaatcaatatctgtttgatgatgttcataataccagcccaattattgtagaaatcagttatcgaattaaaagtacccacctttccaaggttatcatgccggatgtttccatctgtatagcaattacttcttttaatttgtaaaactgttattgttcctgatgatcacgaatatttttgtttaagataaaagttgaataaatcaaataaaagcataaatacatctatttattaggttattctgttctaatattgagcgtctaaaatttttttagatctataatccataaaaaggttgctattccggttcggtcatgcgttaatgcgtttggcctgattaacagacctactttatgtacgacatcttgagttaatgcgttatgtgtaagtgctatcttgattagcctttgtagaccgtttccttcttagtgccccataagtaatagctgataatggccaacacatgcccaaggtggcgagttttttttgatatataggaaagacacatgtctgacaaaatgaaaggtcaagtgaagtggttcaacgagtccaaaggttttggtttcattactccagccgatggtagcaaagacgtattcgttcacttctctgccattcaaggtaacggtttcaaaactctggctgaaggccagaacgtagagttcaccattgaaaacggtgccaaaggcccagcagcagcaaacgtaactgctatttaatttgcctttatacctatttgttaagctcgccatgctaaaatgccctggcgggctttttgtttattaggtgatattcaaacagctagccattatatcttaaacgatggtcatttttttatgacacatgtcgtgcagaataccattctttcaataagtggagccgtgacttattaatcttatatgcttataagttcgtgcaaattttattggataactaa

SEQ ID NO: 653 - DNA, 1448 bp, Xenorhabdus sp.
  CDS (908)..(1375)
ttagttatccaataaaatttgcacgaacttataagcatataagattaataagtcacggctccacttattgaaagaatggtattctgcacgacatgtgtcataaaaaaatgaccatcgtttaagatataatggctagctgtttgaatatcacctaataaacaaaaagcccgccagggcattttagcatggcgagcttaacaaataggtataaaggcaaattaaatagcagttacgtttgctgctgctgggcctttggcaccgttttcaatggtgaactctacgttctggccttcagccagagttttgaaaccgttaccttgaatggcagagaagtgaacgaatacgtctttgctaccatcggctggagtaatgaaaccaaaacctttggactcgttgaaccacttcacttgacctttcattttgtcagacatgtgtctttcctatatatcaaaaaaaactcgccaccttgggcatgtgttggccattatcagctattacttatggggcactaagaaggaaacggtctacaaaggctaatcaagatagcacttacacataacgcattaactcaagatgtcgtacataaagtaggtctgttaatcaggccaaacgcattaacgcatgaccgaaccggaatagcaacctttttatggattatagatctaaaaaaattttagacgctcaatattagaacagaataacctaataaatagatgtatttatgcttttatttgatttattcaacttttatcttaaacaaaaatattcgtgatcatcaggaacaataacagttttacaaattaaaagaagtaattgctatacagatggaaacatccggcatgataaccttggaaaggtgggtacttttaattcgataactgatttctacaataattgggctggtattatgaacatcatcaaacagatattgattcaggacctagagcggatcaatctcgcagaacgtagggatggtaaagtacattttaatagtatctttattcatcagcatccatacctgtttttagctatgatcgttacttatgttttcctcgctgtactgatgtggtatgccccctattttggcacttggtcactgcttttatttactgcacttttttttgtgatggctgccgttctccttttcgatatcaaacccgtttaccattttgacgatattgatgtgctggatttacgtgtttgttataacggcgagtggtttgtcgatgaaaaggtatctcagaatgccgtcaatacaatactcggtcatccgaatgtccccaatgaagtgaaaaacgaaatcaaacaaatcattataaaaaagaacggaatatgcttttatgatgtttttatgattgcatgctcagagcaatcaccttactttcaaccttatcaagttgaacaaaagcatgtaatttcagcaaaatagcataattttagtttagggc

SEQ ID NO: 654 - DNA, 1613 bp, Xenorhabdus sp.
  CDS (1001)..(1507)
attacttttaataaaccagacattttaattagctcattacaagaggttaggaaagatactgatgtgatatatgaatccagattcataaagccaactatacttaataaaaaaaatgcgataaaagattatttagtacataaaaaatttcaagcacattcatgtggtaaattttttagaaaggatttgtttaaagggagtaattttccagaggtttcgtgttatgaagatgctttatcctttccatcgattctagtaaaatgtaataaaatatattatacagaaatgaaatattataattatattaaaagagaaagtagcctttctggcacagtgaactcagaaaaggctaatataatggctgatgtaatattaatgtccaataaaatttttggtgatgaatttaaaaaattaaatgtatgtcatgcaatagatgtcatatataaatatggagagcatttatcaaaaaaatcttactcgaaactaatgaagctaattgatggggtatctatttttgattttgttatggattttaatattaggtttagttttaaaaggaaattttacaaagtaaaaaaatacaattctattaataaatgaattagagatgttgagttttgtcttttataagttttgttacttttatgtaatatatttatatagaattgagagtgtaggtttccccgttgagcttagttggataaatcatttgatttttatagtgtattattatattaataaatagaaagttaatgataaatactttgctcgaataatgagttgcttttaatttgaacggtataaatgtagtttaggcttcctcaactggtaactacactaatggtatatgctctaatattatcaaggtcaattatttatgttaattaaaaaggtaaaggaaagtttaaataaaaatgcattatttagatatattaaatttatcttgatgccatctattttattttctgaagaaaaaataaaaagaaataaaaggtaccataaatataacctatctgcactatatgcattccaagaggcaatgaatgatattaataaaatattttggcttgattggggaactttacttggtgcaataagagaaaataattttatagtccatgataacgatctagattttggtatgtttttatccgatttttcagatgaaattgaagtagcactgataaaaaaaggatttaaaaaaattaaaaaatttgaaaaaaaagatggaatggaagctcttgaactaacctactcttttaagggggttcaggttgatatatttttctatcaatctagagataatcatatgatctgtcatcattttggtgaatttgataatcctaaaattaataataatgttaaagaaggcctatgtactacctttgaaaattattgtcctttatttgagttaacagactataattttcaagggagaaaatttttcatacctaaaaatactgtagagtatctaattaattactatgggaatgatttcatgaaaccagttatcgaaactgaatatattccagataagtattcctatactaagcctattgggattggaaagtattatttatactaagacttatgtctaacttgttgctttagagcac

SEQ ID NO: 655 - DNA, 1626 bp, Xenorhabdus sp.
  CDS (1023)..(1625)
tgtgctctaaagcctgtgccagtgccctcgccagacgtctttcataacgctggatagccagttctgcgattttatccccttgtgccacggcctccatgatttcatggccttttttatgtattccactggcgcggaaataatctctcataaagccggttcccgatacaaacatctcagtacaaccgggtttaccacagaaacagcgcacctcttcctgatatgcacgatcttcatcgttcatccacggcaatgggttatgaccccactctccagccagaccattgccacctgcatgaactctgccatcaaatgccagacccgagccacaacccgtcccgacaataaccgcaaataccatttgtttacctgccgccgcaccatcagtcgcttctgatacagccagacagttcgcatcattagcaacccggacttcacgtcccaacagggcagaaatatctctgtccaagacctgatcattcagccagacagaattggcatttttaacttttccggtaaaaggtgaaattgcccccggaataccaatcccgattgttcctctctggccagtcgcctgttcagcatctgctatcaaaccggcaatcgcagccaaagtctgcgggtaatcgttgcggggagtatctacccgcttacgaaacagctcttttccctgatcgcccaatgcgatcacttcaatcttggttccaccaagatcaatacctatacgcatagcttacctttttctctgtggttaaccgttagctgcatttttcagcctaactggatcgtgttgttacaggatcattgcctgagcagcattaacaatcaagaactataacgtcactttgttttaggaattggacgtttgttttcagaattgtgcataaccaacaaaaagaaaacctacaaaacgacgggtatgaatttctagggcttcaccgcatgattcgttatcatgcacagctacgcttttcaaataacgtttatatgacgtttgtcacaatgcataaatatggggtaaccgcatgttatggttcaaaaatttaatgatttaccgtttaaaccgagaaatatcgctttctgcggatgaactggaaaaacaattaagcccactggtattcaccccatgtggcagtcaggatatgatgaaaacaggctgggttacgccaatgggtgcgcatggtgaagcactaacgcatgcagccggtaatcagatcctgatctgtgcacgcaaagaagaaaaaatgttgccttctccggtcattaaacaagaacttcaggccaaaattgcccgtctggaaggagaacaacaccggaaattaaaaaaaaccgagaaagactctctgaaagatgaagtgattcatactttattaccaagggcattcagccgtttcagccagacttatatctggatagatactgttaaccatctgattattgtcgattctgccagtgccaaacgcgctgaagataatctggcattactcagaaaaacgctgggttcattgcctgtcgttcctctgacgttcgctgatccgattgagttaacattaactgaatgggttcgttcaggagacctgcctgcgggttatgctctgatggatgaagcagaattaaaagccttgagag

SEQ ID NO: 656 - DNA, 1626 bp, Xenorhabdus sp.
  CDS (900)..(1625)
ctctcaaggcttttaattctgcttcatccatcagagcataacccgcaggcaggtctcctgaacgaacccattcagttaatgttaactcaatcggatcagcgaacgtcagaggaacgacaggcaatgaacccagcgtttttctgagtaatgccagattatcttcagcgcgtttggcactggcagaatcgacaataatcagatggttaacagtatctatccagatataagtctggctgaaacggctgaatgcccttggtaataaagtatgaatcacttcatctttcagagagtctttctcggttttttttaatttccggtgttgttctccttccagacgggcaattttggcctgaagttcttgtttaatgaccggagaaggcaacattttttcttctttgcgtgcacagatcaggatctgattaccggctgcatgcgttagtgcttcaccatgcgcacccattggcgtaacccagcctgttttcatcatatcctgactgccacatggggtgaataccagtgggcttaattgtttttccagttcatccgcagaaagcgatatttctcggtttaaacggtaaatcattaaatttttgaaccataacatgcggttaccccatatttatgcattgtgacaaacgtcatataaacgttatttgaaaagcgtagctgtgcatgataacgaatcatgcggtgaagccctagaaattcatacccgtcgttttgtaggttttctttttgttggttatgcacaattctgaaaacaaacgtccaattcctaaaacaaagtgacgttatagttcttgattgttaatgctgctcaggcaatgatcctgtaacaacacgatccagttaggctgaaaaatgcagctaacggttaaccacagagaaaaaggtaagctatgcgtataggtattgatcttggtggaaccaagattgaagtgatcgcattgggcgatcagggaaaagagctgtttcgtaagcgggtagatactccccgcaacgattacccgcagactttggctgcgattgccggtttgatagcagatgctgaacaggcgactggccagagaggaacaatcgggattggtattccgggggcaatttcaccttttaccggaaaagttaaaaatgccaattctgtctggctgaatgatcaggtcttggacagagatatttctgccctgttgggacgtgaagtccgggttgctaatgatgcgaactgtctggctgtatcagaagcgactgatggtgcggcggcaggtaaacaaatggtatttgcggttattgtcgggacgggttgtggctcgggtctggcatttgatggcagagttcatgcaggtggcaatggtctggctggagagtggggtcataacccattgccgtggatgaacgatgaagatcgtgcatatcaggaagaggtgcgctgtttctgtggtaaacccggttgtactgagatgtttgtatcgggaaccggctttatgagagattatttccgcgccagtggaatacataaaaaaggccatgaaatcatggaggccgtggcacaaggggataaaatcgcagaactggctatccagcgttatgaaagacgtctggcgagggcactggcacaggctttagagcaca

SEQ ID NO: 657 - DNA, 2067 bp, Xenorhabdus sp.; identical to SEQ ID NO: 24
  CDS (1502)..(2065)

SEQ ID NO: 658 - DNA, 1733 bp, Xenorhabdus sp.
  CDS (874)..(1335)
gtgctctaaagagtttttcaccttaacggtaaatttattgtcatttagcactgttcccgtcagtgtaattgttcagatttcgtcctccacaggcaacttccccctttcttctccactaaatctaaacgggactcatgctgaagcaattcctcatcagaggcgtaaattactttcagccctgcctgtgggcgggtaattttttgaatttccgcaacctgtgcattgttggatgcttccccttccatcgaaaaagccagcgatgtctgaccaccagtcattgccagataaacatcagccaaaatctcggcatcgagtaatgccccgtggagagttcgtttggcgttatcaatatggtaacgatcacacagcgcatcaaggttattacgcttaccggggaaaagcttccttgccatcgtcaggctatcggtaattgtacaaaattcagcggttggcggaattcctcgattaagtttgctgaattcataatccataaaaccgatatcaaacgttgcgttatggatgatcaactcagcgccacggataaattcaataaattcatcggctatatcagcaaatacgggtttatcctgcaaaaattcatcgctaatgccatgtacttcaaaggcttccggatcaaccagacgatccggcttaatataaatgtgaaaatgacgccctgtcagacgacggttaatcacttccaccgcgccgacttcaatgatgttatgcccttcgtagtgaactcccagtttattcataccggttgtttcagtatcaaggacgatttgacgggtaattgcagtgctcatagtgtttttttgtgtcagactttagagttttgaataaagatgatataggaagagtctaccaaatatgaataaacaggtagaaattttcaccgatggttcctgcctcggtaatccgggtcccggcggatatggtgttttacttcgttataaacaaaaggaaaaaaccttaaataaaggttatttccgtacaaccaataaccggatggagctaatggccgctatcgccgcgctggaagcccttaaagagccatgctcaatcattcttaccactgacagccaatatgttcgtcagggaattacccagtggatacataactggaaaaaacggggctggaaaaaagctgataaatccccggtgatcaatgttgatctgtggcaacggctggataaagccatttctcctcacgaaatcgaatggcattgggtcaaggggcataccggacatcgtgaaaacgaattgtgtgatgaactcgcccgtgcagcggctaactccccgacccaaaccgacagtggctatattgaataaagccacgcacttcgtctttcaaaagctaatcgcgctgatgagaatttttcactactcccagtgcattactgaatttcggtttcaacaatcttgcccgcatgggattgagagtcagaggtattgtccgcttgcgggcaataatcacattcaggcagccaaatattgatgatgaaggttcatgcgcattattggcactcttccacggtaaaacatggaagttagcatgatgaagaacttcatagttcagcaggcgaagccaatccaactggcgcagtctggaaaacatttgggctcgataaaaccgcttgcggcatacaactgaaataggttttctcaaacccaacagactgatcgggttaaagccagagacaattagccagccatcatcaatcatgatc

SEQ ID NO: 659 - DNA, 1733 bp, Xenorhabdus sp.
  CDS (925)..(1674)
gatcatgattgatgatggctggctaattgtctctggctttaacccgatcagtctgttgggtttgagaaaacctatttcagttgtatgccgcaagcggttttatcgagcccaaatgttttccagactgcgccagttggattggcttcgcctgctgaactatgaagttcttcatcatgctaacttccatgttttaccgtggaagagtgccaataatgcgcatgaaccttcatcatcaatatttggctgcctgaatgtgattattgcccgcaagcggacaatacctctgactctcaatcccatgcgggcaagattgttgaaaccgaaattcagtaatgcactgggagtagtgaaaaattctcatcagcgcgattagcttttgaaagacgaagtgcgtggctttattcaatatagccactgtcggtttgggtcggggagttagccgctgcacgggcgagttcatcacacaattcgttttcacgatgtccggtatgccccttgacccaatgccattcgatttcgtgaggagaaatggctttatccagccgttgccacagatcaacattgatcaccggggatttatcagcttttttccagccccgttttttccagttatgtatccactgggtaattccctgacgaacatattggctgtcagtggtaagaatgattgagcatggctctttaagggcttccagcgcggcgatagcggccattagctccatccggttattggttgtacggaaataacctttatttaaggttttttccttttgtttataacgaagtaaaacaccatatccgccgggacccggattaccgaggcaggaaccatcggtgaaaatttctacctgtttattcatatttggtagactcttcctatatcatctttattcaaaactctaaagtctgacacaaaaaaacactatgagcactgcaattacccgtcaaatcgtccttgatactgaaacaaccggtatgaataaactgggagttcactacgaagggcataacatcattgaagtcggcgcggtggaagtgattaaccgtcgtctgacagggcgtcattttcacatttatattaagccggatcgtctggttgatccggaagcctttgaagtacatggcattagcgatgaatttttgcaggataaacccgtatttgctgatatagccgatgaatttattgaatttatccgtggcgctgagttgatcatccataacgcaacgtttgatatcggttttatggattatgaattcagcaaacttaatcgaggaattccgccaaccgctgaattttgtacaattaccgatagcctgacgatggcaaggaagcttttccccggtaagcgtaataaccttgatgcgctgtgtgatcgttaccatattgataacgccaaacgaactctccacggggcattactcgatgccgagattttggctgatgtttatctggcaatgactggtggtcagacatcgctggctttttcgatggaaggggaagcatccaacaatgcacaggttgcggaaattcaaaaaattacccgcccacaggcagggctgaaagtaatttacgcctctgatgaggaattgcttcagcatgagtcccgtttagatttagtggagaagaaagggggaagttgcctgtggaggacgaaatctgaacaattacactgacgggaacagtgctaaatgacaataaatttaccgttaaggtgaaaaactctttagagcac

SEQ ID NO: 660 - DNA, 1733 bp, Xenorhabdus sp.; identical to SEQ ID NO: 659
  CDS (2)..(352)

SEQ ID NO: 661 - DNA, 1724 bp, Xenorhabdus sp.
  CDS (649)..(1020)
tcttactttaatttaccggcagtactggtgcgttctatctcaaggttgttgcgacaaggaaaacagattgaaattatcattggcgacaaaacagctaatgatttttatatcccgcccgaagagccattcaagattatcggagcgttgccttatctctatgagattaacctgcgtcgtttcaccagtcgattgcagcactttatcgatagtcagttgctggctatccgactgtggaaagatgaagataatagctatcacttaaaaggcatctgggtcgataacaaatggcaattgatcaccggtaataatctcaatccacgtgcgtggggactggatttagaaaatgctattcttattcacgatccacataaagaaatgcaagaacaacgctctttagagctggattctattcgcactcatacaacggttattaccagttatcaggaactggatagtatacagttctatcccgttaaggttcgcaaattaatacgccgtttacgtcgtatccgtgttgaccgcctgatcagcagaatattgtaaacatagataatatttatctcatttattaatcctctcttgtcataacaagagaggattttttgtatcttatttatcaaaacgctattatttattaaattattaataatgtcgaaaaataagatgaaaaaggccggaagaaataaatttataaacatattaatagtaatctccctcctatctaccacaaccgcatgtactaatattcgccaggcaaatgatacctggaccggtaaggataaagcccaacattttctattttctgctgctatagccgctgcaggtaacgcttatggcgagcaccagaactggaaacatcgcgaaagtgctcaatttggtctattactatcgattgggcttggtgctgcaaaagaattttatgatagtcgacctactggaacaggctggagctggcaggattttgtgtacgatgtagctggggcagtgacaggttatagtctttatcagtatttaaaatagcccgataattatatccgtgaattgattttctattgctaaaaataaattttatctattccagattacgcaaaaaagccatccggttaaggatggcttctctgtcaaagtgatgtctggcagtgtcctactctcacatggggagaccccacactaccatcggcgctacggcgtttcactgctgagttcggcatggggtcaggtgggaccaccgcgctattgccgccagacaaatcctgttttcaatcccgaacaagctgtgtcaccggctactttctgttttccggtcattcttcatctgaaacttagtctttactctcaatccccgcaaaacaccttcggtgttgtcaggttaagccgcacggttcattagtactggttagctcaacgtctcgcaacgcttacacacccagcctatctacgtcctcgtctcgaacgttccttcagtgtcctctagggacaagggaagactcatctcaaggcaagtttcccgcttagatgctttcagcggttatctcttccgcacttagctaccgggcagtgccattggcatgacaacccgaacaccagtggtgcgtccactccggtcctctcgtactaggagcagcccctttcaatcttccaacgcccacggcagatagggaccgaactgtctcacgacgttctaaacccagctcgcgtacctttagagcacatggtaggagcat

SEQ ID NO: 662 - DNA, 1724 bp, Xenorhabdus sp.; identical to SEQ ID NO: 661
  CDS (1)..(543)

SEQ ID NO: 663 - DNA, 2304 bp, Xenorhabdus sp.; identical to SEQ ID NO: 355
  CDS (751)..(1944)

SEQ ID NO: 664 - DNA, 2344 bp, Xenorhabdus sp.
  CDS (3)..(2333)
agcaaaatttaaaggacgaagacctcattctattattgagtgctgatattggtcagtttattgcacgtcagacactactggatcaggccgctaaacttgcgaagcgttaccatattagtacgtttgatcgtatacaggcagatgcgttattacagttaccccgcttaacactctatcagcaggtaaaagaacgaatcagtggtttttgtcggtgcgggattacggacattgacgattggactgagcagtttttattgactcagcgtttgtcacttgagcaagttattgtgatgctggctgttccggcaaagcaatggtttgtgccagaaaaacagcgttacattcagcacgtcatgcagttttttacccggaaaatcactgcgagtactcaacggggtaatttggttcgtatgcgcctgactccatcggcaggtcgggttgatatgatagaactgaatggcgttaaaaaaagtgctctggatttgttacagcatctaattaaccgccctaaaaatactatcgcaatcgatagccaaactttactgcaaatgcctaaagttaacgacaggttgcggatattgcagatgaaaagcgagttataccatcgtgacacgggtataaacggcatgtatctgggatttcctttcctacttattcatacccgaccgtcacaaatgaagccccgtatagcaccgttgtttctctggcctgttaatttagtcatgaataccggaatgcgaggtattgcccgtttacagtttgataatgaacgaggagcagtgaaactcaatccggcattagccagtctgaatgatattccgccggtaaaagagtggcagacgattttagagcaacttatcgggtatgcgggtttgactgttgacggggtcatggagaagctctctactatcatgccggtatcagtaaaagacttatcatcactaccatcagatgcggaaatagcggaaaacagtgcatcattatgttgctcagctgttttgttccatgcatcgtttatcggacaggccatcggtgaagatctacaacaaatagccggattgccgattgagaacacagcgctggaaaaagcattggggctggtggaggctgaaatatcagaaccttttccactgaaagcagcagaacgttattttgttagtgcgacagatccctcacaagaaacggtgatatcggtagcacgccagaacaagggattattggttgaagggccaccgggaacggggaaaagccagaccatcgtaaatctgattgcggatactatcggtcaacagaaaacggcactggtgatttgtcagaaaccagcagcattagaagttgtgtataagcgattgatagcttgcggcctgattaatcgtattgtgcatgtacgtcaggcgcagaaagggcgggatgtaattcaatcagtacgtgaacagatagactctctgtttatgctgaagaaaactggcgatcaaataataaactgggaatataaacgtggccttattgctaagcgtataaatacacatgaaactcagttagataactattacaacgggttgtaccagcatcatgaggcggcagggtgttcttatcgtcaattgctagcatctctgattactttgcgtgataagcataatacagcagcagtttgtttcgatttaccgcagcttttaccaaaactacggctgtttttccgttcatcagagccaattgaaatagctaaaattattgattatatcgttcaggctgctccgctctggctggctgcaaattatgaaaacagtccattttcacaattatgttatttctcttcggatgagcatagccttcagcaatttaaccgggttttagccggatttatacagaccgaaacggcacgagaacaaacactgacacttcctcatacacagataaccattgataaactagctgatcatcaggctgccttggatgcctgtaaaacagctttctctttgttatccgctctggagtggaagcagttttcccgctggctgccgttattttgcgatgaaaaaggaccgcggttacgtggtcagcagattattagtcagttggaagttctgatagagcagctacagcagatagataactccttgtgcgaccctcgtttctttaatcttttggcacaaagtgaaagccggctgctgatgcaattgtcactggcgctaaaagagaaacaacttacttcattctggttgcatctgaatccggtttattataaccgtcagcgcaaactcaactcatttactgccactcatgggatcgaaaataaatctgacacagcatatcgcactttatcattccattaaagctgaacagg

SEQ ID NO: 665 - DNA, 1676 bp, Xenorhabdus sp.
  CDS (523)..(930)
agcgtacccctttcgccgaataaccctgtgtgcggggcatagactgcgaaaaaccgctttcatccagataaacaatcggtttcatcgcctgttcgtagtggctgatgcgttcgacaaacgcctgacgagcctgagcgtcagcgttggggtgtcttagcgttttttttgacggttattttcagccgtttcaaggcgtaatggatagcagattgcgcgacacccaagcgttttgccctttcccattgatagtcatcggggtaatttttgacatcagtgagaagcgcttcatcactgattttcgtgggcggcttattccgtgtcacacagggttctattttgtgacgccaccgaaataaggtccgcatagaaatctcaaaatgggtacacgtttgttcgaaggtcaacgaatgcttgtctttatatgccagtactcgctttcgaaaatccagactatagcccatctcactttatcctttgtcatatgaatccagctattatgtcatattaatatgattctgctatatactgaatgacaaagtgctgccgttctttgaatcgcatcaattaccgatgctaagaattttgacagatcggggtacagaatattgcgggcgtgtcgaatatcacgactatcagctttatttggccgtcaatgatatcgaccacacaaaaacaaaggcccgctccccccaaacaaacggcatctgtgaacgtttccataagagcattttgaacgagttttaccaaatcaccttcagaaagaaactgtacatgtcactcaatgagttgcaaacggatctggatgaatggatagataactacaattatcatcgcactcaccaagggaaaatatgttgtggtcgcacaccaatagagacattattggaaggaaaaacaatttgggctgaaaaaaatctaacccgcatttaatctgacaggcactaaatcaaaatgggtgactgtcagatcaagtttgaactactacaaattatgacaacatattatctttatctagagatatgagtaactcacctatattttttaaccgttctggctcatattccagtttaattaaactcacaattttcgttatgcttctttccgcaagataatacatgctatcctgtcttgggcctgcatgatccattggtacattattaactcttcagcacacagtcacgcagcgaacttatcgtaatatggagttcctgctgacgactctgccaatcttcttcattcccactcaaataagccttccgcgcatcagccaagactgtggattgtataacgggaagacgtgccgccgcccagtcagcagcgatattcttaggaacaaactctccggtaactaacgttctccacatacgcgccaacgttaacaaaacattacgttcatctccctgtaaggtttcaattaaccccggcagaacatctttaatagcccgacgaatctctgactttggaataactggaattagatcacttacgggtgggccaatcagagggatcgcttcctgtcgtgactgagccaacactaaagttagttccggatcacaaacagatttaagcattttcccttcttcatattgatgacgtagccattcgccatacatgaactcacttcgggctggataatgcgatgctctcagatcagtgcacaggaaaataatcaattc

SEQ ID NO: 666 - DNA, 1676 bp, Xenorhabdus sp.; identical to SEQ ID NO: 308
  CDS (1592)..(1675)

SEQ ID NO: 667 - DNA, 867 bp, Xenorhabdus sp.
  CDS (86)..(505)
aagtgtgctaagattttacctgccgcgccagaattatatgccgcgtgcctgaaaaaacaaaaaaggggttccgcacgtgatgaaacttgaccggatcgatatcaagatcctctatgaactgcagaaaaacggtcgcatcaccaatgtcgaactggcggaactcgtcaatctgtcgccaagcccctgcctgatgcgggtgaagaaacttcagtcggaaggttatatcgaaggctattcggcgcagatcaacatcaacaagctcggccagacgctgacggtcttcacagaaatcaccctcaagaaccaccggcagatcgatttcgcccgctttctcggtgtcgtcgaaaagatcgaccaggtggtggaatgccacctcgtttccggcggctacgactacctgctgaaattcgtcacctcgggcatcgttgaatatcagtcgatcatggagcgattgacggatatggatgtcggcatcgacaaatatttcagtttcgtggtgctgaaatcgccgatcaccaaatcgcatatgccgctgaccagcctgtttccgctttgaagtgagaaggaatgcatcaaacgtccgcagaggtgatgggtttgacagggtgttgcacttacactccgtcaccccggactagatccggggtccagcgcgatcaggtccttgatcgcgagagactcttatgacagcgcagacgcgccgtggctggatgccggatctagtccggcatgacggaggagaggttttaaattttcttcgtgaatccgaacgcgcggaaataccgcgcgttcggtgatttggcggtcggtccgactatttcagcgccgcatcggtgatgtcggtggtgtaggcgcctctagagcgca

SEQ ID NO: 668 - DNA, 1919 bp, Xenorhabdus sp.
  CDS (375)..(1469)
aaaccaacatggatacaggacacggtggaaagccgggacgtttcaatcgtataaacgatatcgctttcgattatagttttctgttgatgttggatgatgctaaaacatattttccacacttaaaagattaataaaaatatattaataattatggatgctgataattagttatcagtatccagggtttttacaccctaaaaacaataaaactatcgcaaaattagcgaagcaatgtgagctttaataaatatttttagtttaggatgatattaatgaaaatcatggcaagaatagccggagccagtgcagtatttatcgggcttcagggaatcgcttatgctgaaaacacagatgacaataaaaaccagaaagtcatgcgattcagcccattaaaagtttccggttctcaggataataaaaacaggccacaaattgaagccatggaaaaacccggtgcttatagttctgtgggggaagataataaactggaatctatggacagcgtattacgtagtttgccggggacttatacccagatggatacaagtcagggcacgatagctgtgaatatccgtggaatgagcggatttggccgcgttaatatgatggtagatggggtgagccagagtttttatggtatcgcaccaagtgaattcgctcatgggacgcagccttataaccagactggtgctttgattgattctaactttattatacggacagatgttgaccgtggacaggctaacgattcggattctgttaatgcactggtaggaagtgctaatttccgcactattggaattgatgatgttatttttgaaggtaataaactgggtatactgactaagtcagcctatggtacgaacggcttaggcaaaaatggcatgattgctatagcgggaagaacgcaggcattcagcaccgaaggttcgattggtgctatgcttgctataagtgggcacagtattgatgctcactataaaaatgctatgggtgttagcagtgaagaatttggtacagataagacatttaatcgggagcccaattcacaattgatgaaaatcaatattaaaccaaatgattttcatgagttagaattatctgggcgtttttatcataataagtttactaaacgtcatatcgatagttatgactattatttgaagtatcactatacgccatttagtgaattgattgacacaaatattttgcttggttcaggaaaagggaatcaatattttgttaaatctatgagcggattaggaaaaggtgagtctcataataaatccaatactattgatataaaaaatacaagtcgattcaattatggtgaaacagatatctcctttactcttggtagtaaactgatggacactgaataccataaaaaaacaggtatagatcttagcggagaccttcagtctacagaagaaatagtcatttctctccagctggaaaacagaatataaaaagtatttatagtcggttgaaaatagagcatggtatttatactacagattttggactaaattatttaaattccagcttaaaaggaagaaagccagcttgtgataaaagggtcaactgtttcccccaaggtgaaacacaattaaatattaaatcgcgtggttttaatcctagcgttttattatctgcagaaattttaccaatatttcaaccatttgtaagctatactcattcaatgcgggcgccaaatgcacaagaagctttatatcccagtgagttcggcgctgctatcaatccattcttgaaaggtgaaatagcagatacttatcaaataggttttaataggtatcgctcaaatttaattgttgatggagatacatttcatctgaaaacatcatttttccatactaaaattaaaaattatatcagtagcgaccaatatatgctttgtt

SEQ ID NO: 669 - DNA, 1919 bp, Xenorhabdus sp.; identical to SEQ ID NO: 668
  CDS (1703)..(1918)

SEQ ID NO: 670 - DNA, 2096 bp, Xenorhabdus sp.
  CDS (3)..(1337)
gctctaaagataccaaaactggcgcgaaaagagctgaaaatatgctgtggcataaaatccctaaatctatctatttccgtcgtggctcattaccagtcgctttggaagaagtggcaagggatggtgccaaacgagcctttatcgtgacagattctttcttatttaataatggttatgccgatcaagtcatcagggtcttaaaatctcataatgtagaaacagaagtattttttgaagttgaagctgatcctactttaagtattgtccgaaaaggtgctgaacagatgcgtttgttcaaaccagatatcattattgctctcggtggtggctcaccgatggatgcagccaaaatcatgtgggtaatgaatgagcatcctgaaactcattttgaagaattggcattacgctttatggatattcggaaacgtatctataaattccctaaaataggtataaaagcaaaaatggtagcgattacaaccacctctggtactggctcagaagtcacaccttttgctgttgtgactgatgatatcaccggccagaaatatccattggcagattatgcactgacaccggatatggctatcgtcgatgcaaaccttgtcatggatatgcccaaatcattatgtgcttttggtggcttagatgctgtaacccatgcgctggaggcttatgtttctgttttagccaatgaatactctgatgggcaggctttacaggcgctaaaactgctgaaagattttctccctgccagctaccagcagggggctcaaaaccctgtggctcgtgaacgagtccataatgctgcaactatcgccggaatcgctttcgccaatgcctttttaggtgtttgtcattctatggcccataaacttggttctgaattccatattccacacggattagcaaacgctctgcttatctgtaatgtaatacgttataacgccaatgataatccaactaaacaaactgcattcagtcaatatgaccgccctcaagcaagacgccgttacgctgaaattgcagaacatttaggattaagtaaaacgggtgaccgcaccgctactaaaattgaaaaactgctggcatggttagaagaattaaaatctcaacttaatattccagactcaatccgtgcggccggagttcaggaaagtgattttctggcaaaaattgataaactcgcagaagattcctttgatgatcaatgtaccggtgcgaaccctcgttacccgctaattgctgagttaaaacaattgttgctggattctttctatggacgtaaattcatagaatcgcccatatcacaggaaggcgctaaaattgaaaaataataagaaataataaactaatgtaatctaaaaggcatcagagtatatctgatgcctttttattaattcatttttctaatttaatcgtatgacccatataagcggactatacctgttcagattttttcgctttagcttcatgaatgacatcataatagtgcctgcggcacactgagacatatttttcgttaccgccaatatcaacctgtgccccatcataaacaacattaccatcgctgccaaaacgcagtacacggcttgcttttcttccacaatggcagattgttttcagttcaactaatttatccgcccaggcaagaagatattggctgcctttaaataattcaccctgaaaatctgtccttaatccataacagagaacaggaatatcatcgtaatcaacaatttcacaaagctgctcaacatgttcttttgttaaaaactgacactcatcaatcaaaatacaatgaatcttttctgcatcattttcacgtctgataagctcagcaatattaatgtctggtgaaaacagtaaggcatcagcagatagcccaatacgggaacttaccttcccttttccaaatcgtgtatctatttctgctgtaaaaatcaacgtcctcattcctctttcgttatagttataggaagactgtaataatgaagttgattttcctgcattcatagcagaataataaaaataaagctgagccattggcccgtccgtcctcttgtcaaatttaaccaagcaatactttagagcac

SEQ ID NO: 671 - DNA, 1997 bp, Xenorhabdus sp.
  CDS (1375)..(1995)
atgttttttaactgccagacaacattaattgatacattcaaaacactttttcctgagttaattttttcaaaaaaccgggcaataattttagacccttacgccgatttaccagtaaatgagttaagactatgtattgagatgtcactcacttataaactgaagaaaaagagataaaaattaggagatacccgttgaataatcaactcacggatatagcattaaccaagtactgaaaaaagctcaagaataagtattctatactttcaagttgcctctttgctggctgtgctagttcaccccggtataaacatacaattatctatgttcctaggggttaacggatatcatagccgattaaggcacaagctattatttttaataaaatcaataaagcagcgtaaccggggtgaaagcgtctggttacggtaataaactgcattaatcggctgtttttgctcaaaagtgatatgagaaagtacctgtttaaattcactggactctctcatctcatgagtcataaaatcagacatacatacgataccgactccttttcgggtcagattacataatacttcaccactacttgcagcaattgttggggtaattttgatcccctttttatcaccatgaaagagtggccattcgttgagattttctggtgcagtaaacccgagcagacagtgctgttgtaattcttcaacagttttcggttcgccaaaacgttctaaatagagaggacttgccagaactcgcagtttactatgacctaacaaggtcgcgtgcagagaagaatcactcagtgttccaatgcgaaaggcaatatcagtctgtttttccagtagatccgtcacaccttcgtaattcgtcaattccagcgctatctgtgggtatatttcgtgaaattgagcaaccagtggtgcaatgacatgtaatagaaaaggagttgcagcatctactcgtaacgttccggagggaatatctttgtgactcagcaatatttcttccgcttcttgtgcgagtttcaccacttcccgtgctttttgtagaaatgcagcgccttcttcgcttaactttatacgctgggtagtacggtataacaaagtactgtccactttttcttcaagacgcaacaacgctcggctggtggcagaaatagtgaaccccagccattcagccgctgcggttattgaaccactgtccactacagcaataaacacccgcatttcttccagagtaattttcattttcgcatttaagtcaaaagtttttctcatattaatcagtgtttctgcaaatatcaaactgacataatcaccctcacttacagtgatgtcgtgtcagcaataacgctgagattaaagatatgaggaaattatgcgaacgagcaccgctctgttatcactttctattggggcatttgctatcggggctaccgaattttcaccaatgggtatgttgccggagatagcttcagatctggcaatttctatccccaccgctggtattctggtgatggtctatgcacttggtgtgatgctgggtgcaccggtaatgaccttgttactgattaaacgttccccgaaagccgctctgatttttttaatgagcatttttaccgtaggaaatatcttgtcggcattatcacctgatttctccctattacttattgcccgttttgtcaccagcctaaatcatggcgcattttttggcataggcgccttggtagcgacccgagtagttgagaaagggaaggaagccagcgcaattgccagcatgtttatgggattgactatcgctaatctcggcggtgttccggcgattacgcgtttatcgcaggtattgggctggcgggaggcttttttcctgatcagcgtattgggattcattaccatgatttctctgttattggcgctcccacgaggaatgcagggacagccgctcaatttacgccgtgaactacaggttttattgaactttagagcacatggctcgagcag

SEQ ID NO: 672 - DNA, 1400 bp, Xenorhabdus sp.; identical to SEQ ID NO: 25
  CDS (188)..(847)

SEQ ID NO: 673 - DNA, 2320 bp, Xenorhabdus sp.
  CDS (681)..(962)
tgctctaaagatgagatatgtgagatttatcacaattagtaaagtaaatcatcatgttgaatgggttaaaatgcgatttaacagtttaatatttgctttttgttgttttcggtaccttttgttgaaaatactggccttaaaaggtggttaccatggctaaagatatctcttctcctcttgagcagctcagtgaaatgcagcgttatgtgacgcaagaagcaggcacagagccaccattttcaggaaaactgttgcacaacaaaaaaagtggtatttatcattgcctgtgctgttctcagccactctttgtttccgacacaaaatttgattccggatgtgggtggccaagtttttatcagtcaattaatgacagatccattaattatattgatgattattcttatggtatgcatcggatcgaggtgcgttgcagccattgtcaggcacatttgggacatgtttttcctgatggccctaaacctacaggagagcgtttttgcattaattcggctgctttgcgcttcattgatgaagattcaggagaagaaaccgccggttaatatgatgagtagcgacatttttgaccaaatgtgatgcgaattggtaagtgatatagaatcgattcagctggtgatattagtatatagttttaaggaaataatagccttaaggaaataccgatgaatgtagatgatttactttctgccatgacacctgagatttaccagcgactagttcaggctgtggaattagggaaatggcaggatggtgttccattaacaccagagcaaaaagagcatagcctgcaaatggtaatgctttggcaagccagacataatcatgatccggaacatatgacgattggcaccgatggccaaattgccgtaaaaagtaaacaagaactgaaagcgatgtttcagtcagaaatggttgccaggttgaagccgcaatcagaagaatgaaccagtagattaaatcggtagcctcgttctcacctattgattgagtgtaaagaacgaggctaatctgatttcgtatatgtagttatagtggtcagcggattaaaaatacttttatgctcggcacgttaaaaaagtgcagctatctccgctaatgaagtaaatttggcacctttagctgccatttcctcgatagcctgctggctgtcatccgcatgaatattaacccctcggcagccttctgtaatgacgtaagtttcatacccgtgttctaaggcatctaatacggtgaattttacgcagtaatcggtagcgataccaagaataagcaggcgattgatatgttgctctgatagccagccatgtaatcgggttgcgtttttacgatcgttatcgaaaaatgcactgtaactgtctatctgtggattttcacctttacggaaaatctcccggatagcagtttggtttaaggctggatggaaatctgcaccagattgcccctgtacacaatgtacaggccaccatatctgagggataccgtttagtacgcctaactcaccaactggctggcctgaattcactgcaaaactcatatgattagacggatgccagtcctgacttgcaatgatgctgacattgtaatgctgacacaattgaatagcttcatttgctacggagataacttcttcgctctcttttaccgccagtgcgccacctgtacagaagtcattttgtagatcgataagtaatagtgcggttttcattccattcctcaattcatactttcgtcttatagtcggcccgttaatattttgaatatgcttattatttgtcggagtaactcaattctccgcgtagattttgctgcatcagggaacgaatttcttcggttgcataattctggcttagcaggtagtgaagttttgtcagggttgcttcaaatgtcatatcgtatccgctgatcacacctgatgcagccagtgcatggccgttagcataaccttccatattgacccttccggaaatacattgtgttaagttgattacaatgattcctctttcagtcgcttcttttaaaattcttaataaatcagggcgttgaggagcattgccgacaccataagaacgcaaaatcaatgctttgacaggctgcatcaggatattttcaactacctggctggacaaccccggatagatagtgacgacgccaattggctgtgacctaatttgatgtacgacaaaatctccatgaccaacgggcagtggcgcggtattaaatgtccggatattgatacccgcttcgataagcggaggataattaggagaagagaaggcatcaaaaccgtcagcatgggctttga

SEQ ID NO: 674 - DNA, 2320 bp, Xenorhabdus sp.
  CDS (607)..(1233)
tcaaagcccatgctgacggttttgatgccttctcttctcctaattatcctccgcttatcgaagcgggtatcaatatccggacatttaataccgcgccactgcccgttggtcatggagattttgtcgtacatcaaattaggtcacagccaattggcgtcgtcactatctatccggggttgtccagccaggtagttgaaaatatcctgatgcagcctgtcaaagcattgattttgcgttcttatggtgtcggcaatgctcctcaacgccctgatttattaagaattttaaaagaagcgactgaaagaggaatcattgtaatcaacttaacacaatgtatttccggaagggtcaatatggaaggttatgctaacggccatgcactggctgcatcaggtgtgatcagcggatacgatatgacatttgaagcaaccctgacaaaacttcactacctgctaagccagaattatgcaaccgaagaaattcgttccctgatgcagcaaaatctacgcggagaattgagttactccgacaaataataagcatattcaaaatattaacgggccgactataagacgaaagtatgaattgaggaatggaatgaaaaccgcactattacttatcgatctacaaaatgacttctgtacaggtggcgcactggcggtaaaagagagcgaagaagttatctccgtagcaaatgaagctattcaattgtgtcagcattacaatgtcagcatcattgcaagtcaggactggcatccgtctaatcatatgagttttgcagtgaattcaggccagccagttggtgagttaggcgtactaaacggtatccctcagatatggtggcctgtacattgtgtacaggggcaatctggtgcagatttccatccagccttaaaccaaactgctatccgggagattttccgtaaaggtgaaaatccacagatagacagttacagtgcatttttcgataacgatcgtaaaaacgcaacccgattacatggctggctatcagagcaacatatcaatcgcctgcttattcttggtatcgctaccgattactgcgtaaaattcaccgtattagatgccttagaacacgggtatgaaacttacgtcattacagaaggctgccgaggggttaatattcatgcggatgacagccagcaggctatcgaggaaatggcagctaaaggtgccaaatttacttcattagcggagatagctgcacttttttaacgtgccgagcataaaagtatttttaatccgctgaccactataactacatatacgaaatcagattagcctcgttctttacactcaatcaataggtgagaacgaggctaccgatttaatctactggttcattcttctgattgcggcttcaacctggcaaccatttctgactgaaacatcgctttcagttcttgtttactttttacggcaatttggccatcggtgccaatcgtcatatgttccggatcatgattatgtctggcttgccaaagcattaccatttgcaggctatgctctttttgctctggtgttaatggaacaccatcctgccatttccctaattccacagcctgaactagtcgctggtaaatctcaggtgtcatggcagaaagtaaatcatctacattcatcggtatttccttaaggctattatttccttaaaactatatactaatatcaccagctgaatcgattctatatcacttaccaattcgcatcacatttggtcaaaaatgtcgctactcatcatattaaccggcggtttcttctcctgaatcttcatcaatgaagcgcaaagcagccgaattaatgcaaaaacgctctcctgtaggtttagggccatcaggaaaaacatgtcccaaatgtgcctgacaatggctgcaacgcacctcgatccgatgcataccataagaataatcatcaatataattaatggatctgtcattaattgactgataaaaacttggccacccacatccggaatcaaattttgtgtcggaaacaaagagtggctgagaacagcacaggcaatgataaataccactttttttgttgtgcaacagttttcctgaaaatggtggctctgtgcctgcttcttgcgtcacataacgctgcatttcactgagctgctcaagaggagaagagatatctttagccatggtaaccaccttttaaggccagtattttcaacaaaaggtaccgaaaacaacaaaaagcaaatattaaactgttaaatcgcattttaacccattcaacatgatgatttactttactaattgtgataaatctcacatatctcatctttagagca

SEQ ID NO: 675 - DNA, 2320 bp, Xenorhabdus sp.; identical to SEQ ID NO: 674
  CDS (3)..(536)

SEQ ID NO: 676 - DNA, 2320 bp, Xenorhabdus sp.; identical to SEQ ID NO: 673
  CDS (180)..(557)

SEQ ID NO: 677 - DNA, 1771 bp, Xenorhabdus sp.
  CDS (48)..(404)
tgctctaaagatggtgttgcagtgaataaatattgtaagagtgcatagtggcccgtatagcaagcattaacattcctgatcagaaacatactgtaatcgcattaacttcgatttacggtatcggtaaaacccgctcacaggctatctgtgcagcaacgggtattgctgaaaatgttaagatcagtgagctgtctgaagagcaaattgacaagctgcgtgacgaagttgctaaatacgttgtagaaggtgatttgcgtcgtgaagtaaccctgagtatcaaacgtctgatggatcttggttgctatcgtggtttacgtcatcgtcgtggtctgccggttcgcggtcagcgtactaagaccaatgcacgtacccgtaagggtccgcgtaagccgatcaagaaataatcggggtattgaataatggcaaaagcacctattcgtgcacgtaagcgtgtaagaaaacaagtctctgacggtgtggctcatatccatgcttctttcaacaacaccatcgttactattactgatcgtcagggtaacgctttgggttgggcaactgccggtggttccggtttccgaggttctcgtaaatctactccgtttgcagctcaggttgcagcagaacgctgtgctgaagcagtaaaagaatacggaattaagaacctggaagttatggttaaaggacctggtccgggccgtgagtcaactattcgcgcactgaacgcggctggtttccgcatcactaatattactgatgtgactccgatccctcataacggttgtcgtccaccgaaaaaacgtcgcgtttaatacgtcttcgtttttaggattgttggagaaagaaaatggcaagatatttgggtcctaagctcaagctgagccgtcgcgagggtacagaccttttcctgaagtctggcgttcgcgcgattgacaccaagtgtaagttagaacaagcaccaggccagcacggcgcacgcaaaccgggtgtgtctgactacggtgttcagttacgtgaaaaacaaaaagttcgtcgtacttacggtgttctggaacgtcaattccgtaactactataaagaagctactcgtctgaaaggcaacacaggtgaaaacctgctaactttgctggaaggtcgcttagataacgtcgtttatcgtatgggttttggcgcgacgcgtgctgaatcacgtcagatggtgagccacaaggctatcatggtaaatggtcgcgttgttaacatcgcttcttatcaggtatccccgaatgacgtagtcagcgttcgtgaaaaagcgaaaaagcaggctcgtattaaggcagctttagagctggctgagcagcgtgagaaaccaacttggttggaagttgatgctgcaaaaatggaaggtgtgttcaagcgtaatcctgaacgtactgatctatccgctgacattaacgaacacctgatcgtcgagctttactctaagtaaagcttagcaccaaagagaggacacaatgcagggttctgtgacagagtttctaaaaccgcgcctggtaggatatcgagcaagtcagtttcgacgcaacgccaaggtgacccttgagccattagagcgtggctttggccatactcttggcaacgcactgcgccgtattctgctttcgtctatgccgggttgtgcggtgactgaagttgagattgatggtgtactgcatgagtacagcaccaaagaaggtgtacagggaagaaatcctggagattctcctcaatctgaaagggctggcggtgaaaagtc

SEQ ID NO: 678 - DNA, 1771 bp, Xenorhabdus sp.; identical to SEQ ID NO: 677
  CDS (420)..(809)

SEQ ID NO: 679 - DNA, 1771 bp, Xenorhabdus sp.; identical to SEQ ID NO: 677
  CDS (845)..(1465)

SEQ ID NO: 680 - DNA, 1771 bp, Xenorhabdus sp.; identical to SEQ ID NO: 677
  CDS (1491)..(1769)

SEQ ID NO: 681 - DNA, 2672 bp, Xenorhabdus sp.; identical to SEQ ID NO: 154
  CDS (427)..(759)

SEQ ID NO: 682 - DNA, 2672 bp, Xenorhabdus sp.; identical to SEQ ID NO: 153
  CDS (500)..(1003)

SEQ ID NO: 683 - DNA, 2472 bp, Xenorhabdus sp.
  CDS (1125)..(2078)
ctccccttgaaaaggcttctgacattacttttgcataaccatctccactaccggcttcttctttaaagtttaattcaagaaattcagcgcccatgctttgcacttgttccttaacctcaggacgagtatcgaaagcacgaaccacagcaccaagactgccagctgctccaatggctgcaaggcccgcaacaccagcaccaatgatcataaccttagcgggagctactttaccggccgctgtaatttgcccagtgaaaaaacggccaaactcatgagcggcttcaacaatggcacgataaccagcaatattcgccattgagctcaaagcatccagtgactgagcgcgggaaattctcggaaccgaatccattgccagaacggtaatattgcgctctgataacttatccattaattgagggttctgtgctggccagataaaactgagcagcgtagcgccttccttcattaaggaaatttcgctctcttccggcgcgttgattttaaaaataatatctgattgccagacttcattattttctgcaatcacagcccctgctttttgataagcattgtcatcgaaactggcgagatgccctgctcctgactcaacgactacattaaatcccaatttcagtaattgctctacagttgacggcgtagcagcaacccgagcctcattggggtatcgttcttttggtacaccaatatgcataatgtttccttctctaagaatgaaatattgctgattattacctgctgaagccaatttaacgattcgattgttgttattactactatcagtaaaacctatcaatgagatttatcaacaaagcattaagtgataacaaatgaaataatatcatattgaaaacacagcgttgttgataatagtttttgtagaaagcaaaacaactcttaatgtaagccatgatgctttttatataaatcgctatttttattaaaattattagcgacatctaccaaaaataggtaagcagttatttagatagaataaatttttgcgacaattaacattattacatgcaataattgcaagctatgtgataaagaacaatgttcagcacgttataaatattttaatgcgcaaggcgaaaggattttttatgaagctgaaaaccacgatcatcgcaacagcgatcttctccttaacgacaattaccacggcaaatgcagcgaaagaattaacaccagagaaagctgctgagattaaaccctttgaacgaattacagtaaccgggcgttttaatgcaatctatgaagcagccgatgctgtttcccgtcaggctgataaaaaaggcgctgacagtttctatattcaaagtctggatgattttaatggaagcggtaatttacgtgttgttgctgatctatatcataaggatgcagaaaaagtagataagacgactcaatatcgtatttatcgaggaattaaagaactgcctaaaacggaagctattattctggaacctttcgatacagtaactgtgagtggttattttccgactgaccccgatctgaaagaagctctcgccaaagcagctaaaaagaaaaatgctgcgtccttctttattgcccgtgatattgcaccaaacaatgggggtaatcaggtcgtcactgcttatgtctataaagaggatgcgccaaaacgtcaggttcaatctaataaagcggtgatcccggctgattctgaagcaggacgtcaggctttagaacaaggaggagaagcagctgaaaaagtagaaatcccgggtgtcgcttcatcaacatcaaccagtaatatcgttggtcgtttttttgaaacccagtcatcaaaaggtgggcgttacactgtaactctaccgaacggaaccaaaatagaagaactaaataaagcctctgccgctcaaatggtaccttttgactccatcactttctccggttattacacaactgcgcctgaagtctcttatcaggtcgctaagcgtgccgcagaaaaaggggcaaaatattaccatgttacccgtgagtggcagtctaatggtggaaacgttaccattagcgcagatctgtttaaataacaaactcaccgaagaagtatgcattaacaatgtatacttcttttatttttcctcacctattgctatcacatttatacatctactttttgtaatatctataaaattcattacctgacttttagttaaacaatttcctaaaatgtttatcgattgtttattaaaagtaaaataaattctatcttattaataatgtttataatatgaacattaacctcccttctgaaatagtatccctgtcaccttaaaaattgtttctgttgaccgtatcatttccttaccactgcgatatgactggcaatccgatgaatatcaaacgtcggaaaactatttattgtttatttcattaggaaatgaagatttttatgcataaattttatgtttttttgcataaatt

SEQ ID NO: 684 - DNA, 2472 bp, Xenorhabdus sp.
  CDS (1761)..(2471)
aatttatgcaaaaaaacataaaatttatgcataaaaatcttcatttcctaatgaaataaacaataaatagttttccgacgtttgatattcatcggattgccagtcatatcgcagtggtaaggaaatgatacggtcaacagaaacaatttttaaggtgacagggatactatttcagaagggaggttaatgttcatattataaacattattaataagatagaatttattttacttttaataaacaatcgataaacattttaggaaattgtttaactaaaagtcaggtaatgaattttatagatattacaaaaagtagatgtataaatgtgatagcaataggtgaggaaaaataaaagaagtatacattgttaatgcatacttcttcggtgagtttgttatttaaacagatctgcgctaatggtaacgtttccaccattagactgccactcacgggtaacatggtaatattttgcccctttttctgcggcacgcttagcgacctgataagagacttcaggcgcagttgtgtaataaccggagaaagtgatggagtcaaaaggtaccatttgagcggcagaggctttatttagttcttctattttggttccgttcggtagagttacagtgtaacgcccaccttttgatgactgggtttcaaaaaaacgaccaacgatattactggttgatgttgatgaagcgacacccgggatttctactttttcagctgcttctcctccttgttctaaagcctgacgtcctgcttcagaatcagccgggatcaccgctttattagattgaacctgacgttttggcgcatcctctttatagacataagcagtgacgacctgattacccccattgtttggtgcaatatcacgggcaataaagaaggacgcagcatttttctttttagctgctttggcgagagcttctttcagatcggggtcagtcggaaaataaccactcacagttactgtatcgaaaggttccagaataatagcttccgttttaggcagttctttaattcctcgataaatacgatattgagtcgtcttatctactttttctgcatccttatgatatagatcagcaacaacacgtaaattaccgcttccattaaaatcatccagactttgaatatagaaactgtcagcgccttttttatcagcctgacgggaaacagcatcggctgcttcatagattgcattaaaacgcccggttactgtaattcgttcaaagggtttaatctcagcagctttctctggtgttaattctttcgctgcatttgccgtggtaattgtcgttaaggagaagatcgctgttgcgatgatcgtggttttcagcttcataaaaaatcctttcgccttgcgcattaaaatatttataacgtgctgaacattgttctttatcacatagcttgcaattattgcatgtaataatgttaattgtcgcaaaaatttattctatctaaataactgcttacctatttttggtagatgtcgctaataattttaataaaaatagcgatttatataaaaagcatcatggcttacattaagagttgttttgctttctacaaaaactattatcaacaacgctgtgttttcaatatgatattatttcatttgttatcacttaatgctttgttgataaatctcattgataggttttactgatagtagtaataacaacaatcgaatcgttaaattggcttcagcaggtaataatcagcaatatttcattcttagagaaggaaacattatgcatattggtgtaccaaaagaacgataccccaatgaggctcgggttgctgctacgccgtcaactgtagagcaattactgaaattgggatttaatgtagtcgttgagtcaggagcagggcatctcgccagtttcgatgacaatgcttatcaaaaagcaggggctgtgattgcagaaaataatgaagtctggcaatcagatattatttttaaaatcaacgcgccggaagagagcgaaatttccttaatgaaggaaggcgctacgctgctcagttttatctggccagcacagaaccctcaattaatggataagttatcagagcgcaatattaccgttctggcaatggattcggttccgagaatttcccgcgctcagtcactggatgctttgagctcaatggcgaatattgctggttatcgtgccattgttgaagccgctcatgagtttggccgttttttcactgggcaaattacagcggccggtaaagtagctcccgctaaggttatgatcattggtgctggtgttgcgggccttgcagccattggagcagctggcagtcttggtgctgtggttcgtgctttcgatactcgtcctgaggttaaggaacaagtgcaaagcatgggcgctgaatttcttgaattaaactttaaagaagaagccggtagtggagatggttatgcaaaagtaatgtcagaagccttttcaaggggag

SEQ ID NO: 685 - DNA, 1641 bp, Xenorhabdus sp.
  CDS (2)..(1639)
tgaaagcattctggcgatacttttttcttattgtggcataataggcaactatcgatttttccaaattccctttttattcactttaagagcaaaagttgtgttaagtgcaaacaacatcactatgcagtttggcagtaagcctctgtttgaaaacatttctgttaaattcggtaacggcaaccgctatggcctgattggtgccaatggtgcgggtaagtcaacctttatgaaaattttggggggagacttagctccgacttccggtaatgtcagcctcgatccgaatgagcgtttgggtaaattacgtcaggatcagtttgcctttgaagaatatacggtactggatacagttatcatgggccacacagagttgtgggaagtgaaacaggaacgtgaccgtatttatgccatggcagaaatgagcgaagaagacggctatcgtgttgctgatttggaagttgcttatggtgaaatggatggctacagcgcagaagcccgtgccggtgagttattacttggtgtgggtattccggtagagcagcactatggtttgatgagttcagttgctccgggctggaaattgcgtgtcctgctggctcaggcgctgttttctgatcctgatgttctgttacttgatgagccaaccaacaacttggatattgatactatccgctggctggaacaagtactgaatgatcgcaatagcaccatgattattatttcccatgaccgtcactttctaaacactgtatgtacgcatatggctgatttggattacggtgaactgcgccagttcccgggtaattatgatgagtatatggtggcagcaactcaggcacgtgagcgtttgttggcagataatgctaagaagaaagcgcagatcgcagaattgcagtcatttgtcagccgttttagcgctaatgcctctaaatccaaacaggcaacttcccgtgcccgtcagattgacaaaattcagttagaagaagtgaaggcctccagccgtcagaacccttatattcgttttgatcaagagaaaaaactgttccgtaatgcactggagctagaaggtctgacgaaaggttatgacaatggcccgctgtttaaaaacctgaacctgctgatggaagttggcgaaaaaatggcagtgattggtgaaaacggtatcggtaaaacgacactgctgaaaacactgatcggtgaaactgaaccaaccagcggtacggttaaatggtctgaaaacagtactattggctattatgcacaggatcatgccagtgattttgatggtaatctgactgtgtttgaatggatgagtcagtggagacgtgaaggtgatgatgagcaggcagtacgcagtgtactggggcgcttattgttcaatcaggatgatatcaggaagaaagtcggggttttatccggtggtgaaaaaggccggatgttgtttggcaagctgatgatgcagaagccaaatattctggttatggatgaaccgaccaaccacttggatatggaatctatcgaatcactgaacctgtcactggaactttatgaaggtacgctgatttttgtttctcatgaccgtgcttttgtcagctcattagccagccgtattctggaaataaaatctgataaggtcattga

SEQ ID NO: 686 - DNA, 1472 bp, Xenorhabdus sp.
  CDS (814)..(1326)
taatggtatccagtctcttatccaaaggtgtctgttgttgtgagcgatttgtataccgccgaaggcgtgatggacaaaaatagcctctggaagcgctatgtaccactggttcgccatgaagcactgaggctacaggtgaggttgcctgccagtgtcgagcttgatgacctgcttcaggccggtggcatagggttgctgaatgcagtggagcgttacgattccctacagggaacggcgtttaccacttatgcagtgcagcgcatcagaggtgcaatgttggatgagttgaggagccgtgattgggcgccacgcagtgtgcgacgcaatgcacgggaagtcacgcaaaccatccgtaaacttgagcaagagttaggccgtccagccagtgagcaggaagttgctaaagaattaaagattaatctgatagaatatcggcaaatactgttagaaaccaataacagtcagctattttcttatgacgaatggcacgaaatttacggcgaaagctgtgagccagtaattgaggaagagcatgagacaaatcctctccaacagttattggaaggtgatctccgtcagcgggttatcgatgttattgagtcgttacctgaaagggaaaaaatggttctgacgctgtactatcaggaagaactgaatcttaaagagattggcgcggtgcttaatgtgggggaatctcgcgtgagtcagctccacagccaggcaataaaaaggctgcgggcgcgtttgaatccagagaagtaactttttgcttatttgttttttgttaagactacacacagggctttatctcttatgtctgttacaacacaaaagaaacggcctcttagccgttatattaaggactataaacatagtcagactcattgtttgcattgtcataagactcttgaccgtatttcccttgtttttaacggtcaggttatcaataaagaagcaatttccgagatgaccgaattggttgatgacaaaacatggaatgagttacagggtaaatttgtagcgctgtgccgcttctgtagtgaaatttattgcaatagccagactgattatttcgacattatgtcatttaaacagtatctgtttgaacaaaccgagatgagccacagcacagtgcgtgaatacgtggttcgtctgcgcagattggatgagttactgacctcagacaattatcctgaagaagagtttacaccagaaaaaattcaggaaaaattgagtgagaagctgtccgaatctgctttcagtaattacaatatcgcgctgcgtaaatacgaacaatatctgagctggcaacagaacgggcattgattaattcggcgaaaacatagcgtctgtttggctgaacaatttggtcagttttagaggggaatgtacaaatagtgcattcccctttatttttaatacatcatgtcttatatgtctatttggttataaatatataaccaaatagagct

SEQ ID NO: 687 - DNA, 1562 bp, Xenorhabdus sp.
  CDS (1203)..(1562)
tatatgatggtaaagtttataacgtatttcaatggcttaattccaaacaaattaagattttttttaaaaaaatagatctatcgattttccatttgctcgtcaatggttttatttaaaaggagtgaatgatctatcctctgtttttaaagaggtattaactgctgctgcgtgtgtttttttttattattattggaagttaattattataatatgcatttttaaggaataaaaatctttttaatgaaataaattagtataatgttttgtttgtttttttattctctatcattgtcgccgttgtcacagaggttctctgctttaccagatgcgcagtgtgactcgggaaaacggagctcaggttacaagaggtcagtgttgagttcttcattcatcataggatgtgcttatggggtgactcatgcacttgatatacttgcttgtgggtgcggttccatttcttatgttattgccttttgctgtaagtgattttatagggattgtactgttaaggatggaatgaaccgataatatcttgattggaagacgttaaatgatggtgcgtctgttcatgccccgttcgggtttgagggcagcttaaaacatattaaaccgcaagcaatggattaaaaaatggccactaactatcgggttttattcttagcagtcatattatttttatttggatgcagtagtaacaaaaaacatgcatcaactaaaacctctgacagagttaaatacactgttgttaataacactcaatatagcctctctgtaattcgaaaaaatgtggagtggggtagctgggtttccatacctctatcaactattcggccttatagcagggattcattttctaccgagactgagggtaatgtaaaatattcaatttatggaggaagctttgatgtttattggagcttgtcgcattggggttctgttaaaaaccttttgccggtaaatgatcaaagcaaattgtacgatatatattgtgtaaatgatgcgagaaacacataacatacccgagagcgagttattggaacggatctatttttatataaattaatattgcctttatgcaattaaagctattcactattattcttactgtgatatgccatatcaaactgcaaagtaacaattaaacatatcattttaataaactaaattcgttatcactctttgataaattatcgaggtttatcatgccagatcagacttctgacaaaaaacaaaaaaaactcacggaactcaccaattcacacgacattcttaagcgacttaatcccctgtcgcgaacatcaaatatttcaccaaccagacttaatctaaacgtattgagagaacttgaaaaatatacttcagaagctgaactcaaagaatttcttgctaaatgggaaaccgctttagctgtcgctgcaacacgtagtcgtgaagatcgccagaaatcatcccggcagcaaatatcttctcaaaaaacgggggttcgtagtctggtatctggacccagttacagcgatcaatttttgcccgatgtgataaacagtagccagccgggttcgatt

SEQ ID NO: 688 - DNA, 2058 bp, Xenorhabdus sp.
  CDS (1098)..(2057)
atgtacgctggctggcgggtgtgggtactgattacggtatgattgccgttcgtcaggactctccttataagactttaaaagagctcatcaatgtgttgcagagcaaccccgccaatcttgtttttggtgccggggcttccatcggcggtcaggattggatgaaaaccgcattactggccaaagaagccggtattgatccacacaaaatgcgttatgtcgcctttgaaggtggtggagaagcgcttaccgccctgctgggtaaccatattcaggttttttccggcgatatcagcgaagctctaccatacctgacaagtgataaaatccgtgttcttgctgtctatgcagacaaaagacttgatggcgttctggcggatataccgacagctaaagaacagggttacgacattatatggccggtgatccggggtttttacatgggaccgaaagtttctgatgaacaatatcaatggtgggttgacacgttcaacaaactgcaacaaaccgacgaatttaaaaagcagcgtgagctgcgtggtctgtttgaattcaatatgacaggcaaagagctggatgattatgtgagaaaacaggttactcagtaccatgaaatggctaaatcttttggtttagcaaaataatagggactgtatttatgagtgatcgtatttttgccgtcatctggttagtgttgtgcggaatagggctggtcattggctggggcatccatagtgaatacagttatgaaccactaggcccgcgccctttcccgattgctattatttcgttaatggcactatgcgcactgctactactattcagaaaacctgaaatagttaactggcctgccccacaaacattactccgcttattcttgctgattacctcactgatattttatgccggaacgtttgagtggttaggctttcctctggcaacaacattattgactgtcagcatcgcattgctgtttaacgccacacttcccgccgcaattgtttctggcttgatcttaggtatctctcttttttttatctttgatcgcctgttagatgtcactctgccaattggtagcctgttcaggtaaggagataaaaatggatacatggatatacctaacacatggttttgaagtcgcattaatccctaaaaatctgatcattgcattaatcggttgttttattggtactgttgttggcctgcttccgggtcttggcccaatcaatggtgttgcgattttattacctctggcgtttgctctaaagctcccggcagaatccgccttaatcttactggcaacggtctatattggctgtgaatatggagggcggatatcttcaattctactgaatgttccgggggatgccgctgctattatgaccgctctggatgggcacccgatggcaaaacaagggaaagccggggttgcattatctatctcagcagtcagttcattctgtggctcaattctggctattgccgggatcattttgtttgcgcctcttctggcaaaatggtctttagcattcgggcctgccgaatattttgccctgatggtttttgcaattgcctgtcttggcagcatgatgagccataactcggttaaatcgctactggcggctttgattggtttggatttagccaccgtaggtgttgattccaacaccggtgtttatcgtttcactttcgatagtgtccacctctccgacggaattcagtttattgtcgttgttattggactattttctgtcagcgaaattctgttgatgctggaaagcacgtctaccggccaaaaagtcataagtaaaaccggaaagttactgtttaataaaaaagaagctaaagcctgtaccgggccaatattacgctcatcagttattggtttctttgtcggaatactgcccggtgccggagcgaccattgccagcgcaatcacctacatgacagaaaaaaggatcagtggtaacagtgattcgttcggtaaaggtgatattcggggggttgccgctccagaagctgccaataatgcatccgcatgtggttcattcattcccatgc

SEQ ID NO: 689 - DNA, 2058 bp, Xenorhabdus sp.; identical to SEQ ID NO: 688
  CDS (656)..(1087)

SEQ ID NO: 690 - DNA, 2058 bp, Xenorhabdus sp.; identical to SEQ ID NO: 688
  CDS (3)..(641)

SEQ ID NO: 691 - DNA, 1795 bp, Xenorhabdus sp.; identical to SEQ ID NO: 357
  CDS (1708)..(1794)

SEQ ID NO: 692 - DNA, 1795 bp, Xenorhabdus sp.; identical to SEQ ID NO: 357
  CDS (818)..(1690)

SEQ ID NO: 693 - DNA, 1551 bp, Xenorhabdus sp.
  CDS (303)..(1550)
tgctctaaagaattaatatccacattgatataacaaagtcataaaagcatcaaaaaccgcattcgattgatttttatttattcaacgctaacctatcaggtaactttttgacgtataacacctttattaggtaactaaagcgatatccttatccctgtttcttattttcaatccactatacacaatggatttcaagatacatcgcggcagcaagcaacttgaatgacgaagtgtataaatggatattttattcttaggtcttacatgaaatgaatactaaaaaaatcaatggaatacggatttttagcgcatttattgacgcctgctggaaagaatcttactctttctcccgttttatcaaagatatcattgccggtatcactgtgggtattatcgctatccctctggcaatggcactggctatagggagtggagtagcgccgcagtatggtctttataccgccgcaatcgccggtatcgttatcgccattaccggcggttcacgttatagcgtatccgggccgactgccgcctttgtcgtcattctctatccggtatcacaacaattcggcctgagtggcctattgatagcgacactcatgtccggtgttatcctgattgttatgggtctggcacgtctgggccgacttatcgaatacattccgctttctgttacccttgggttcacttccggcattgctatcacgattgccaccatgcaaatacaaaatttctttggcttgcaaatcagcgaatttccggaaaactatatcgataaagtcattactctctctcaggcaattccttcatttcatttaagtgacacgattataggcctaactacccttctgatattaatcttctggcccaaactgggattaaagttaccggggcatttacccgctttggctgcgggtacggcgattatgggaataatgcatctgctcgggcatgatgtagccactatcggctcttcattcagttatacgctggaggatggaacacaaggtcagggcattccgccaatcctgcctcagtttgtattaccgtggagtttaccgaattcgccttctttcgatattagctggagtacgatttccgcattaatgcccgctgcattttcaatggctatgttaggcgctattgaatctttactgtgtgcggtcattcttgatggtatgacaggaaaaaaacatcattccaacagtgaattggtcgggcaaggcttaggcaatattgtagcccccttctttggtggtatcacagcaaccgccgctattgcccgttctgcagctaatgtgcgagccggagcaacctcccctgtcgccacagtgattcattctttattggtgttattaactttactgtttctggcccccatgctttcgtacttaccattagctgcaatgtccgctattttactgattgtggcctggaacatgagtgaagctcataaagtggtggatttaatccgccatgctcccagagatgacattattgtgatgctgctatgtatgtcattgacagttctgtttgatatggtgatcgcaa

SEQ ID NO: 694 - DNA, 2409 bp, Xenorhabdus sp.; identical to SEQ ID NO: 155
  CDS (1899)..(2408)

SEQ ID NO: 695 - DNA, 2409 bp, Xenorhabdus sp.; identical to SEQ ID NO: 155
  CDS (1777)..(1926)

SEQ ID NO: 696 - DNA, 2409 bp, Xenorhabdus sp.; identical to SEQ ID NO: 155
  CDS (480)..(878)

SEQ ID NO: 697 - DNA, 2659 bp, Xenorhabdus sp.; identical to SEQ ID NO: 442
  CDS (1965)..(2657)

SEQ ID NO: 698 - DNA, 2659 bp, Xenorhabdus sp.; identical to SEQ ID NO: 442
  CDS (136)..(1023)

SEQ ID NO: 699 - DNA, 2659 bp, Xenorhabdus sp.; identical to SEQ ID NO: 442
  CDS (5)..(133)

SEQ ID NO: 700 - DNA, 1773 bp, Xenorhabdus sp.
  CDS (221)..(457)
tgtgctctaaagggccaaaacaaagttgattcgccaccgcccaagcactgactaaatggatagccggagagccgttggctttgtcgagtgtgcctctcattgttttgccatccaatgcaataatgtcggtggagattttggctaacttattcacccatgcgataaaagcctccccgaattcttggggattcagccggtttatcacatcgttaaaggtatcatggctggggatcccattggggagttccagaaattgtctgaaccagtcctccttggattttccgtattcttcaatcgcattgaaactctcacaaccgcagataaccgcacaaatcgagatggtgagaatgtcgatcaacaaatgctgtttcgtacgattaagccggggatcagtgaggtgtccaaaggtattgctgagggtggttgctttcatgacggtttctacggttatcattgacagaaaacggattgtaaatcacaaacgatcatcaatgttcctacctttatgtactgaaggcacatcactgaactaactgttcaatttagacccgtttgccctactaaagtggtaatacattctctgagcagccaataatttatgataatgttacttggatatatcaagacaaaggcaacaacagaccgatgaatatcacgatgaccgaggcaaggattggataaaaatagtaatctgacgcacgtaaaatttactgggttttgataacttgttttgataactttttgataaccgcttcttccgtgacaataaaacaacgggaaccattaagcccccgttatctattttaattagttactattacatatgagaaataatagcatcaccaaattcgctacatttcagcagcttagcgtcttccatcagacgctcaaaatcgtatgtgaccgtcttggcagcaatcgaaccttccatacctttaacgattaggtcagcagcttcgaaccatcccatgtggcgcagcaacaggaaaaaaatagaaccttaacttactgtatatattgaatattttaaggctataacatcagttttatgtatataaaatcacttaaataacacgttgttttatatacttttaataaaagttttgcagaatgaaaaaatcgcctaagctattacaaattccgctattgaaaagccactctttcgataatcactgcacgaaaaattcaataagctcatgcagcagaaagcggagtgactcataaagggcttttaaatcccatttaatcacattgattagtctctccatttgaaacagaaggattgagccaaagtgaagaccacggaataatcaatgggttaaaggtgggaaatctcacctttatgtaacttgttgattttacttatttccggctcagggacggaattcaattaaatcaatgagttaaaacgggataattatcttatttaaccccaattctggataagaaattgacgagaagcctgttcaaggagccgtgttttggtgcaagtcgaaacagctccggggaggaacaggctatgaacaacttagttgaaattttcatcgatgtcgatgacttttgtcgttttttcattccacaatgggaacagttttgtctcaataagggatatcgcctacgtcgtagaaaaggtcacatgtatcccagtgaaatcatgaccatcctgatcctctttcatctgtcgcattatcgtgattttaaaaatttttatctggagcatatttggcgatatcatcatcacgattttcccaccttgctcagttatactcgttt

SEQ ID NO: 701 - DNA, 1773 bp, Xenorhabdus sp.; identical to SEQ ID NO: 156
  CDS (1368)..(1772)

SEQ ID NO: 702 - DNA, 1773 bp, Xenorhabdus sp.; identical to SEQ ID NO: 700
  CDS (1526)..(1771)

SEQ ID NO: 703 - DNA, 2715 bp, Xenorhabdus sp.
  CDS (1986)..(2702)
aaagagtactcatattaagtaaccttatttattttttatatatttaatactaaggaattacaatgttgttatattatttccaataattataaaaaattaaaaacagattccacacgatgtgtttcattaaatatttaaaacaataacaccatcggtgttaactcgatgaatgttgataagtcaatttgtatcctcattaatcatatatagataacactagtataaactcaggatatttccataaatttaaaattaaaaactaaaaataaaattcattttcatattaaaaatacaaaaataaaccataattaattattttcagttaaaaattaaagtaaaaataaaattatttttattgaaatattaatataaacattagtcatagcttgtaaaattcagccacctccagcattctacttctttataatatgaactatactaataatatgatttttagttttcaaaatacttagtcatagcctgaaatagactagatatgatatcaataccaaacataaatcactccatttttataggtctttgaaaactaaaattttcactagaaattacttctatgatgttataagtcaggggtttttatgttcatctgaggaaataaaaatgaattcacaacaaaaaaacactaacaaagtaaatagaataattagcttaccagaatttagtatagaattactttccggccatcaaagtgatgtcatatatgctaatggtaatatgcaagtgggtgtattgattaatattcaagcaatggatgaaaatctacatattattcaactatctgatgaccaactcgataaaatagaattaattaactatgtaactgggaacacattagacctagaatggtcatatagttcaactaaaaatgattatgataatacttttcctcactctactcctgaaaatactcaaaagcccccttcacaatataaaaaaataaccgtaaataaattagataataactctgaatatcaaagaaaaatctattgggttacaacaacgaaatatgaatccatcatgattgcagcacaagttttgcttgatgaaaaaatatttgcaacaaatcagggaagtcaagattcaagtgcctgcgttacgggatacccccgtattatttatcattctgacgatcttgaacatccagatcctgtcctagatcgctctggtcaatacgttgttcatatagataaaaaatattctatatcaccacctgaacattatgataaaaactatgattggcaacagcacaattattatctcactttgataaataaacccactggtttctcagtaaaacatgttgatatagaagacacttacaatgattatgctttcaatattgctaattaccatggcattgtccatcgtgtagaatctgataatctctatttttggtttctctggggaacaatgaaaaaagataaaacggtaggggatgaacaccccacagtaagaaaaacatctgttccaaatgttgagacaacgtacacatcaattgcacaagctgatatcttaacagcaacacgtacagattcagtttgtctcagcagattgtactttgagtcaccagtagagagattctgggttgaattgccaaatgccttggctcatttcagattttatgacaattacggaaatcaatcctatcaaatagagtttattatggagggtgcaaaatcctttcacctacaagatatgcagccgtaattaaattttaatcttaagactatattactctataaaattaaaaacctaaaaaataaaaaccgctccctaataagagctggaaatattttatataaagcaggagaaataatatgattagattagatgaaaattacgattaccctagagtagtcgaccatttgagtcattttagtattgatttgtactcaggtcatcaacaagattatctttatgccaatgggaatatgcaagctgttgtttttattacaattatagcagtggatgctaatcaagaacaagttaagttatatgatagtatattagatactattgaattaattaaattcactgacagtcaaaaactgccagaaggatggtcatatactagcattgaaaatgattatagccatacatttccttttgctaatgacacatttaaaatggaaaatttttttgatttgtcatatagaaaggtaccacattataagtcagatgaaaaaccaccatattaccaaaggaagctcttttgggttacaactaataatattgattcaatcaggatatcagcgaaaataacacttgatgggaaaacttataaaacatttgatcaattgaccttaaaagatcacagggaaggcagtaaatttactacccttgttggttatcctcctattatttatcatgcacaagatcttatccatattataaaaaaagacttcaattttggtgaatatgtagttaaaactgacgctagggaaaaacactataaatgggtgcagaataattattatattcttccaaaaattaaatttggtaactttacaattaaggatatcaccgtttctgagacttataacgattattatactacagcgaataattatcgttgcttcacccatcatacaaaagctaacgatctctatctttggtttatctgggggcaagaaagaacagtaaaagatgcaggagataatcactctacaaaaaaactttagagcacatggctcg

SEQ ID NO: 704 - DNA, 1812 bp, Xenorhabdus sp.
  CDS (682)..(1635)
gaatgaaattgctaatctggcagaaatgctgggcgctgatattgaacatgtacgtcaggggattggttctgattcacgtattggatatcattttatttatcccggttgtggatacggtggttcatgttttccaaaagatgttcaggccctaattcgtacttcagagcagattggctatacaccaaagattttacaggcagttgagttggttaacgaaaaacaaaaaagaaaactaccttctttcgttaaacatcattttgggaccgatttatctggtaaaacatttgccatatggggactatcatttaaacctaataccgatgatatgcgagaagcatcaagccgggtattgatggaagccttatgggaaagtggtgctaaaatacaggcttatgatccggaagcgatgcaggaaactcagcgtatttatgggcagcgtgatgatcttgctttgatgggaacaaaagaagcggccttaaaaggtgctgatgctcttattatttgcacagagtggcaaaactttagagcacctgattttgatcttataaaagactcgcttaatactccggttatttttgatgggcgtaatctttatgatccggaacgcttgcaagccagagggtttacatattatggcattggccgtggtgactctatcaatccagttatttgagttgtgatatgaaatttttagtaacaggttccgctggttttattggttttcatgtaagccagcggttattgaatatgggatatgaagttgtcggcattgataacatcaatgattattatgatgttaatttgaagcaggcaagattaaatttattactccctcatcccggttttaaatttgaaaaactagatttggctgatagagccgggatcgctgaattgtttactaagcaccaatttcagagagttatccatttaggggctcaaccgggtgttcgttattcaatacagaacccaatggcatatattgatgccaatattgttggtcatatgaatattcttgaagggtgtcgtcacaacaatgttgagcatttattatatgcatcttcaagctcagtatatgggttaaataaaaaacaaccattttctactgatgattcggttgatcatccggtctctttatacgcagcgaccaaaaaagctgatgaattaatgtctcacagttattcacatctttataaattaccaaccacaggtttacgattctttacggtatatggtccgtggggacgtcctgatatggctttatttaagtttactaaagcgatgttagaagggcggactattgatgtttataatcatggagatatggtaagggatttcacatatattgatgatatcgtcgagtctataatcagattacaggctattattcctgaacctaataaagattggtcagttgaaactggtcaagtctctgctagctcagcgccatatcgtatttataatattggcaatggtcagccaacaaaattgggtgattttattgaagctattgaagcttcattagggataaaagcagcgaaaaactttatggaaattcaggacggcgatgtgctgtctacttgtgcggattccagtgcgcttacgagaaaattggtttttctccgaatacaccagtaagagagggtgtgaaacaatttgttgattggtatctgaatttttatcagatgtcttaacattagtttaataataagaaaaggagctattagctccttttttaatttacggctttagccagtttaagtcgcgttagcgtattaaacataaaaccacccgctttgcgggtggagttcaaag

SEQ ID NO: 705 - DNA, 1812 bp, Xenorhabdus sp.; identical to SEQ ID NO: 704
  CDS (2)..(673)

SEQ ID NO: 706 - DNA, 2058 bp, Xenorhabdus sp.
  CDS (429)..(1427)
tgaaagattgggttgctacgcgtcgctcaccagactttgtaaacattatggttttcgttatctcagaaaaaaggattctaggaaaggtttattattctgtagacacaacgcagacataattgctgttcagtaattcatttcaaaatgtcactcttaatccaatcttatcaacgtataaactcttctaagcagtaagtggtcgtatagctctggagtttaaatgcagatatcaatcgtaatcgtgtattgatgcgataggttttttatcgttatttatcattgcgttgtgttgacttcaacttcttggttttttctacttattaaaatatacatttgaaaaagtaaggtttgaacaataaaatggtgtgggtcattaaccccactttttacgtagagcaatcaataaatattgggatcaggaagcagttatgcacaatgaagatgaaaaaaatgcagagaaacaatcattgattgtgctttccggtgagcaaaaaaatcagggaatgggcatgtcaatatcggtatctggtaatcaggtatatgacaatccggctattgcctatcttgtcagtttgggatcaaaacgaagccgacagacaatgaaatcattcctgaatattgtggcaaaaatgttggggtatcagaatgtgcgggattgttcatggagtgatttgcggcgacatcatatacaggctgtaatggaaatgctctctgattccggaaaagctccagcaacaattaatacttatctttcagctctgaaaggtgttgctttagaagcatggacaatgaaacaacttgatactgatagttttcagcacatcaaacaagtacggtctgtcaggggaaatcgtttaccgaaagggcgggcgcttgagcgacatgaaattaaaaatttattttatgcctgtgaagatgatatcagtacaaaaggtttacgtgatgcggctattattggcgttttggtggggtgcggtctgcgccgatcagaaattgtttcattagatatgaaaagtattatttatcgcgagcaggcattaagggtaatgggaaaaggtaataaagaacgtttatcttatatgccggaaggaacatggagacgattaaatcgttggatagatgaagttcgcggtgatcatgccggtccattatttactcgtatccggcgtcatgatgatgtgacagatagtcgtctctcagatcaggctatttatcatatattggaaaatcgcagaattgaaagtggggtagaaaaatttgccccgcatgatctacgtagaacttttgcgtcagccatgctggataatggcgaagatattgtcaccgtcaaagatgcgatggggcactcaagtatcacaacaactcaaaaatatgatcgacgtggagataagcgtttgaaaaatgcagccagaaatttgaatttctgacgggtgatgaaaatgtaaaattagctacattttatgaactattatcacagagtaatggagacacagcctactctaaaaactgtgtctcttgttgtaaagctgtagcttctaagagtctaattttatattcaaatattatttttaaatgtaataatttgctggccatcctctatttttatttcaactcgcagagttctagactcatttccatattcatcgtgaaattttaaatttgctgtattttctttttcaggcgtttccttccataattctttcgtatttgcgtcgaaccataattcactgaagctaatcaaacccttagcctcatcttttgtcgtagtaatttctgcttgtggtctagttgtatatgttgttgttctcatcccatacccaatgggctcttcatatttataagtagaatctataatatctccggccgttcttccatcttgaaaatctccccaaagaaaccagatatgaaggttagtataatacttaaggtgggccattttatggtactcgggactttccttgtttttatcctcccgtgtatcccatataggtatatcatgtattaagtatttaatcctgtaataatgattggtttgactccatggaaaataaaaaaccc

SEQ ID NO: 707 - DNA, 2612 bp, Xenorhabdus sp.
  CDS (213)..(1103)
tgtgctctaaagtaatgactgctgatattcttgaggataatgttcaaataccgaacgaacttcgtgactctgaaatgctgtcataagattgctaccttatctgttaattcgtatattgggcctgcctcatacaaccctatcttaattagaatggtcggaacattatgaaaaaaatatttatttgtatcgtacttgttttaacctcaatatctatgcagtccgtagctgaagagagaagctatagtttaccaggaaatgatggtaaagagattacttactatttgatacagaaaaatagtataaactctgaagatcttcttgtcctgattcaaggttctgattgtggtagtgttatcaataataagaaaatgataaaaaattttggtgcggcttttcctactaacgatatccttctggtagaaaaaacagggcttgatagcagttttggaaaaaatggtgttgaagttagtgattcagaatgtccaccagcctatattcagaacgattcccccttaaaacgagttaaagattatattgctgtattaaacaaattaaaaagcaagtatcgtcatattattctgctgggtggaagtgaaggtgctattgttaccaatctgatagtttcagaaagaaatgcagattttattactgcggcaattgccatgaatggcggtggacgtttctttattgatgatgttattcgtagcatcaggcatcaaactccggcagaaatgtttgataaagaagttgatagttttaaaacatttgcaaaagaagcaaaaaaacagaatatgccagtaggcatgaatgtcagtggtcatggggcaaattggtggtatgagtcattgtcaattgataatcagaactcgatccaatccagtaaagtaccgttattggttatccagactatgggtgataataatgtggatgcagctggggcgagaaaaatgatggctgatattaataatcccaaggtttctttcaaggcctatgatggtttggaccattattttattgataaagatggaaactatcatgcagccatgattattaacgatattcaaaactggtatcagttacaaaataaccgccattcttcatagtcctgaatgctataagcagcgcgaaaagcgctgcttgcctcaattttatatgtatgttaagaccagtttttccagaatgtcttttgatttccgccagagtaaagagcctccttcattatcgaaaacagtgtgttctgcatgagggaaccgtgttgataaaatctcaccaaagtctggtgagtgaccggtgctggcatcctgcttcccataccataaatgtaccgggcaggtaatatcttcaggatcaaaaggccattgcccaaatgtaagcagtagatcctgagtatacctttctgccccttgggaaaaaccttcatttaaacactgacgataagcctgtagaaaattgggctgggagtacaaagacaaatccactgctgaactgtgagccataataaaattcattagccagtcggcagtgatattctgagaaacccactgttttaacatttccggttcagcatttctttgcttcaccatattaacaacatcctgatttaacagttgctgcgtagcgggataattaaactgatcctgcccagctacaattgccagccctgtcgctttacagatttttgccagtgtcagtgcgaataccgctccctgagaaaaacccaaaaccatgcacttttgtaaccagcagtgcttcagtatctcagcaacatcctgggcaaaactcactaaagtcttatgggaatgtagagatgaattccccagcccagggcgatccggcactattaatctgatattcaatctttccagctcttgtttcccgaaacccagtgagccactcattccagcaccggtgcagaaaataagtggtttaccggtgattggtccccactcgtaccaataaagcgtacgagaatcaggaagagataagttaccggttcttattgcgggatttacattatatgttgtcatttttccctcaaaataaattaccaattgctatttcggagtaacttaactcttcccttccatcatcctttaatgaactgagttacagatatccgatacagtgacgtagtagctgtaatatataactggtcacctttaatgccacccaaagtgcagtttgatacacgttctggcacttcaatcttatctattttcgtaccaaatttatcgaaaatgataacgccgttttcacaactacaataaatattacctaatttatcaatacaaaaaccatccggaaatcccggagagatagtagcgaaatgtttacctatccccaacactttatcccgtaccggatagatacgtagttcatgtctgccatgtttcggaaaatcgacgatagacatatcggcaatgtacagatatttttcatcaggagaaaatgctaaaccgtttggtcgttgagtatcactggttgcgatagaaatactgttatcagcaggatcataacaatagacgtagcacccgataatctggctttcggacttatagccttcattatcgttaataattccgtagggcggatcagtaaaccaaattgtcccg

SEQ ID NO: 708 - DNA, 2612 bp, Xenorhabdus sp.
  CDS (628)..(1464)
cgggacaatttggtttactgatccgccctacggaattattaacgataatgaaggctataagtccgaaagccagattatcgggtgctacgtctattgttatgatcctgctgataacagtatttctatcgcaaccagtgatactcaacgaccaaacggtttagcattttctcctgatgaaaaatatctgtacattgccgatatgtctatcgtcgattttccgaaacatggcagacatgaactacgtatctatccggtacgggataaagtgttggggataggtaaacatttcgctactatctctccgggatttccggatggtttttgtattgataaattaggtaatatttattgtagttgtgaaaacggcgttatcattttcgataaatttggtacgaaaatagataagattgaagtgccagaacgtgtatcaaactgcactttgggtggcattaaaggtgaccagttatatattacagctactacgtcactgtatcggatatctgtaactcagttcattaaaggatgatggaagggaagagttaagttactccgaaatagcaattggtaatttattttgagggaaaaatgacaacatataatgtaaatcccgcaataagaaccggtaacttatctcttcctgattctcgtacgctttattggtacgagtggggaccaatcaccggtaaaccacttattttctgcaccggtgctggaatgagtggctcactgggtttcgggaaacaagagctggaaagattgaatatcagattaatagtgccggatcgccctgggctggggaattcatctctacattcccataagactttagtgagttttgcccaggatgttgctgagatactgaagcactgctggttacaaaagtgcatggttttgggtttttctcagggagcggtattcgcactgacactggcaaaaatctgtaaagcgacagggctggcaattgtagctgggcaggatcagtttaattatcccgctacgcagcaactgttaaatcaggatgttgttaatatggtgaagcaaagaaatgctgaaccggaaatgttaaaacagtgggtttctcagaatatcactgccgactggctaatgaattttattatggctcacagttcagcagtggatttgtctttgtactcccagcccaattttctacaggcttatcgtcagtgtttaaatgaaggtttttcccaaggggcagaaaggtatactcaggatctactgcttacatttgggcaatggccttttgatcctgaagatattacctgcccggtacatttatggtatgggaagcaggatgccagcaccggtcactcaccagactttggtgagattttatcaacacggttccctcatgcagaacacactgttttcgataatgaaggaggctctttactctggcggaaatcaaaagacattctggaaaaactggtcttaacatacatataaaattgaggcaagcagcgcttttcgcgctgcttatagcattcaggactatgaagaatggcggttattttgtaactgataccagttttgaatatcgttaataatcatggctgcatgatagtttccatctttatcaataaaataatggtccaaaccatcataggccttgaaagaaaccttgggattattaatatcagccatcatttttctcgccccagctgcatccacattattatcacccatagtctggataaccaataacggtactttactggattggatcgagttctgattatcaattgacaatgactcataccaccaatttgccccatgaccactgacattcatgcctactggcatattctgtttttttgcttcttttgcaaatgttttaaaactatcaacttctttatcaaacatttctgccggagtttgatgcctgatgctacgaataacatcatcaataaagaaacgtccaccgccattcatggcaattgccgcagtaataaaatctgcatttctttctgaaactatcagattggtaacaatagcaccttcacttccacccagcagaataatatgacgatacttgctttttaatttgtttaatacagcaatataatctttaactcgttttaagggggaatcgttctgaatataggctggtggacattctgaatcactaacttcaacaccattttttccaaaactgctatcaagccctgttttttctaccagaaggatatcgttagtaggaaaagccgcaccaaaattttttatcattttcttattattgataacactaccacaatcagaaccttgaatcaggacaagaagatcttcagagtttatactatttttctgtatcaaatagtaagtaatctctttaccatcatttcctggtaaactatagcttctctcttcagctacggactgcatagatattgaggttaaaacaagtacgatacaaataaatatttttttcataatgttccgaccattctaattaagatagggttgtatgaggcaggcccaatatacgaattaacagataaggtagcaatcttatgacagcatttcagagtcacgaagttcgttcggtatttgaacattatcctcaagaatatcagcagtcattactttagagcaca

SEQ ID NO: 709 - DNA, 2612 bp, Xenorhabdus sp.; identical to SEQ ID NO: 708
  CDS (2)..(526)

SEQ ID NO: 710 - DNA, 1602 bp, Xenorhabdus sp.
  CDS (2)..(1600)
tcctgtggttgatttaccggtgacggttgtagatctgtccgggcaaaatgagatcccggatgatcatcagcagtcgccactacaacgggcactggcttactgtcagaataacctggaaacgccatttacattgagccagcccggtttagcccgctttctgttgatcaaattaggagagcaacggcatattctgcatttttgccttcaccatctgatttgtgacaatgattctgtcgccttaattctcaataacattgcgactgcatacgcaggagaagcgttattcagtgatgatgcaggagctgatatcctcgagtacgctgatttcgcaatttggcaggacgagttactgcgtggtgattacttggatggtgatgaagcttactggctgaatgaattgtccggagtagatggccgattggagtttgctattggtaatcctgtcacctcaaagagtgagcagggcggtatggttcgacgtttgctggaatcgcatttagctaatactttcaatcactgtgcttctggtctgggtatttcaccggcacttgcttactttactgtatacgctgcgctgctataccgattgacgggacaacaaacgattgtgttcggcgttcctacgtctttgcgggatgatgcacgtctcgagaaaacaataggttactttattaatgtgttacccattaaagtgaccttccacccgaaaatcagttttgccgatattgccactcaactgagtgaccagctttacaccggtatacagcatcagcaattcccttacagctctattgtgcgcagtgtcagccatgcgcagcagaccccacaaaccccgttattcaatgtgatgtacaactattttgtcggtcagacagattggatgttacccggtactcgggcttatctacatgagttaacgccggtcgggggaaaattcccattgactctgtttgtggtaaatcacattgataccgtggagctatgttttgaatatcaatataaccatgtagcggcagactattctgacgtattaatcaacagctatcagcagttgtgtaccgcgatgattctcaatgctgatcaggaagtattggctcagtctttgctgagcgaggatgattatcaacgtcaggtactggcattcaatcagacagatactctctttcaggaagacttctgtcagcattttttgcgccaattaagtacagaacctgagttaacagcagttgaatatttaactggctcacatgatgaaagtataagttatgaaaaactatattttctgagccagaaagtcgctgatgagttgcgccggcatattccgtcagaaacggcgcagcaggcccgggttgtgattttctccggcgctacccctttggctctggccactattattgcctgtttaatggaaggcattgtctggatacctgtcgatagccatttacctcttaaccgatttctgatgattattgaagatgcctgccctgacgctgttgtgattgaggaaagtggtgtagacgacaaaaacgcgtctttggttgcggagatatcgcgtttcaatactccggttattgagctgacgcgcgaatgggaagcggcaag

SEQ ID NO: 711 - DNA, 2232 bp, Xenorhabdus sp.; identical to SEQ ID NO: 311
  CDS (857)..(1825)

SEQ ID NO: 712 - DNA, 2232 bp, Xenorhabdus sp.
  CDS (1589)..(1822)
tgtgctctaaaatgtgtttttgctaaggataagcgcagatctgtaatgtcaattttcgtcgtcagactaaagccacacttaacactatggcgataatacgcaaagtgctctccacgattccacgtgttaagatctatttttgtgtaattcatctttttcccttctaatcaagtatgttaataataaaattaattagaagggaattatctctgtctggattgatgacatctaatgactcctttattttatgttttgaacggtagtcacattatcatttaagcgaaaaaataccaatcgttaaacgccggaggtctcatagtaatacggtctttattactatccctccgggacaaacaaaacctaatcagagctatctccctggctggagcgcagtattaaaagtaaatttattttttaatttcaaaaagatagtaatttccattctctgtggaataattcaaattatagatatttttaatagataacccagcttgttttaccataaactcaaagtcggattgataccgtcttctccctaacaaaagggtatctatgtataaatcaaatgaggttgcttcatgtggttctttaattatatcgataagatataaaactgaatcatcacgcattgctgtatggcaattcttcaaaatatcgatagcttgatcatctggccagtcatccaatacattttttatgctataagcatcatagccggatggaatctcagaaaagaaatcaccattaataaaagtaatttcttctgattcttttctggtgaaattatattgatccataacatgacactgaatatgtggatggtgagtttttatgtttttcacgaaactacccacaccacctccgatatcaataaatgtcttaatatcatctaaaggaatgtgatcaataatatggttatttgttttattcgtcatttctcccattaagttatcaaaagttaatttaatatctttattgttttcatgattgagatagtcaaaaaatgactcgtgatgggtaagttcgaaagcggattttttattcggtttttttaaagacgaactgtattgtgaccaagtattccagaatacgggatctaattcgaactttatatacagtgtttcaaagctattctgatcattgagtgatgcccattgttcagtaagataaaatttatcctcttgttttgttaagatgttaagttttttcatataattcaataggctgtgaaatctatcctgatagacattgcatagcctagcaagttgttccactgttttacccttctctgtacttaaatataatggtgctttactgtcaacaaaggcaaataatgcatttgatttacgataggcagtaattatatccaatggcattatcattctccttatttatctccattaattagtgtgtcatactctaaaacctcaggttaacttgagatcaagtcttttttatcttatttttgaatatcataaaaatatgtaactcaatgtgtgtttttattgaggttataccacgctataaaaaatagagaaccacttgttgatggtttaaattataaacagagtgaataatgaaattattatttgaacaggttaatgttttttccgataaaaaattacagggtaacccactggctgtagttgttggtgcagataacctgactgaacagcaaatggctcagtttgctaagtggaccaatctgagtgaaaccactttcttacttaaaccacttcatcctgatgcagattacagagtcagaatttttactcctgcgggcgaactgccttttgctgggcatccaacactaggttcttgttatgtatggcagaaggccaatagtcagaaagataaacgggttccgccgaagaacccccaaaagtgacgattctgagtaccgttacaccgtagcgaggattttatagactgtagcacgcgctatttttaattgtctcgatatgtttgttgctccgataccttgttcatgaagatggcgaacttgagctttgtctattgtgggtttacggccaaatttaacccctttagctttagcctccagacggccttcgtttgttcgctccagtattcgttggcgttctgcctgagcaaccgcagataaaatggtgaccaccatcttgcccattgtcccttctgtgctgatcccatcatccagaaaacgtatggcgactcccctctcatcaaattctttgatcagctgactttagagca

SEQ ID NO: 713 - DNA, 2300 bp, Xenorhabdus sp.
  CDS (1161)..(2300)
tagaatggttgtcgcatttttccggtggttttactggcattgtcgcaactctggataccggaaaagcaggcccgacactggcattccgggttgatatggatgcacttgatttgaatgaagatcagactcatgttcatcgccctcatgctgaagatttttcttcctgtaatgcgcatatgatgcatgcctgtggtcatgatggtcacacagctatcgggctgggactcgcgcgtatattgaaacaatatgaaaattggctcacaggaaaaatcaaactgatatttcagccggcagaagaagggacaagaggggcaaaatcaatggtcgaagccggggttgttgatgatgttgatttttttatcgccattcatattggtctcggtatacctatgggggaattagtttgtggtaatgatagttttctggcaacgaccaaaattgatgtcacttatcgcggggctgcttctcatgcgggcggaaagccggaagaaggaaaaaacgctttgttggctgcggcgcaggctactgtaggattgcatgcaatttctcctcacagcaaaggtatttcgcgcattaatgttggtgtattacaggctggtactggtcgtaatgtgattcctgattatgcattaatgaaagtggaaacccgtggtgaaacgaatgaaatcaacgaatttatctacggtcatgccctcggtgttatcgaaggcgcagcaaaaatgcagaatgtggagtatgaaatcgagctaatgggggcagcgcaaagtagtaaacccagtccggcatgggtcgattttatttatcagcaggctcaacagcatgtccctgaactttcatctgttgttaaaagcggtcgtcaatcggtgggctcagaagatgcaacttattttatggagcgggtgaaagcaaacggaggtctggcttcttaccttattttcggtactgaacttagtgcaggccatcatcatgggcagtttgattttaatgaagatgtactggcaattgcagtgaagacactggcaacaatcaccattcacctacctgattttgacgctcagcgtcaccaataacgcttattaggcttgtctgttcagggcaaacctgcatccagccataaccgcatacaacataacaatgtcagtaaatgcagaggaaaaactatgaatcaggcctctctatctgtaaataagagtccgggatatattttgggatggattgaaaaagtaggaaataaaattccgaatccttttgttttatttatctatctgattgccgtgttaatgattgcgaccgctattttatcctggtttgatttggcagtaaaaaacccgatagatggagaaatggtcagggttaaaaatttactcagtgctgagggaatacaatggattttgcctaatattgtaaaaaatttcagtagttttacccctctcggagctattctggcgctggtcattggagccgggctggctgacaaagtcggtttgttaagagctctgatgtataaaatggcgacgggtatcaataaacgttatgccagttatatggtgttgtttatcgccttttttagccatatttcgtcggatgcggcacttgttgtgatgcccccgttgggagcactgatgtttattgctgttgggcgacatccagtggcaggattactggcagcaattgcgggggtaggatcaggatttacggcaaatctcctgattgtcacaaccgatgttctgctatctggcattagcacggaagcggctaaaatgtttgatcctaatttgcatgtcagtgtcattgataattggtattttatggcaatatccgtgattgtactgacgattgcgggagcaattctgacggataagtttattgagccgcgtttacctgcctgggaagggaataacgaggaaaaactagaaaaactcacgccacaacaaaatcgcgggttattaatgaccgggctgtcggccctgatttttatcggtattgttgggttgatggtagttcctgaaaatgcgcttttgcgggatcctctgacgggttcagtccttccgtcaccttttataaaagggattgtgccgctgattattctgtttttctttgtcgtttcgattacatatggtgtttttaccaaacaaataaaaacacctaacgatattccggagttgctcgttgacccgatgaaaagcatggcgggtttcattgtgatggttttccctttggctcagtttgttgctttctttaattggagccatatgggtaaatttatggccattggtattactggcctgctggaaacactg

SEQ ID NO: 714 - DNA, 2300 bp, Xenorhabdus sp.; identical to SEQ ID NO: 713
  CDS (3)..(1070)

SEQ ID NO: 715 - DNA, 2977 bp, Xenorhabdus sp.
  CDS (716)..(1228)
acttcaccaatagctggtggtactcgcatagaaaatcatcagtcaagagggtcattcttaggtgatgtaatagtaaaatcgaatatcaataagagtatgagcttgcaagacatcattaagcaggttagtcagtcaatttatcgagccatagaaaattcaaatattcatatgtctgtggtgattgaagcagtgggagaaaaggcaagagaaaatatttttaatgtcctgttcaattatatggatgcacaaagcatgtatgatttcatcgatatatctaaagatgaaaaattatcattaccaaatcttgatgttgaactgatagaaactgatgtaattccttttgaatcactcgggatgaatttattatatatgccggaaagtatcgggtgtgagctgaattacaatccagagttgtatacagaagaagtcattgagagtttagcaaaacattatgaacgactgctcaatgtcatcgtgtctggtcaggaaaaagagagtatcagccagttttatggataaaatcttatcgtgaacgacgagagaagagtggcttcagggatgaagcctatcatcgcgataaaatctgaattctgtttggtgtgttgcctttaattgaaataatgttattttctacgaccttttaaaaagtaagatattaaattggtgtgcagatatgtatgaggaacttagcccaaaggggaaagcaaaatataatcaaattcttgatgccgttcaggctgttatttgccgggatggtatttatgagtgtaatcatcgggcggtggcatcagaagcaggagttccgcttggaacaacaacatattattttaaaacactggatgatatgttaagcgcggcgctaggaaaatacttcaataacttcattgagttgtcacacaactggtttcaacagtcgctgtttgaagatccggccgaaaatctgactgagttcatctcatggacattcgcagattattcacgcttaaagtcagaatatgagctttacgttgcggctatctcccggccatctttaagaccacttgccgttaactggatgcaggcaacaaaagatatcatttctcaatacatcactaacgatgaatcaaaagccaaagcgctcaccgctgttttagatgctttcttccttcagtctctattaaccggagatattaatttcagcaaaaaagagtacatcaggccatttatcagcaaaattttgtcagattgagtatgtatctgctcaatgaatttcaggatacgcagcgacgggcagggaagcaataaattcgccggaaaggaatttactccaccaaaaacaaccttctgtttataactctactgtacgtgagtttttatcttccacagtgttcagctcggttgtgtgaataattgtacttatgtacaattatcgttttcgtgcagcatagagaagattagataaggttatgagtagatttgagcaaaataaaataccggcatttgccctgtttttgttggcgttaatgactgcttttgatgtgatggcaatcgatatgtatttgccagcatttaatgcgataaaagaaagtttaaatacagatcttgttaaggtagaaacttcattatccctgtttttagtggggttagctatcgggcagggaatgttaggtcccgtgattgatcattatggccgaagaacacctttattattaggtattcttattttttcactggcatctttactcacttcaaccactgatgacattgtgcttttcaatataggcaggattgttcaagggttatcaggagctgttactttacttgtccctctgtcactcatctgtgatacatgcgatgcacatacttgggcacggatctttacaattttgatgcaaatcgttgttattgggacaataattactccgccattgggtagtatccttctttctgtttttggctggagagcgatattcctgatgttatttgctttatcgtttttcacacttattgctgcatatcgttttattccggaatctctgccgaaagagaacagggaaaagggtagcctgtcaaagcaattatattcatatattaaagttactaaaaattcatatttccttatgaatgtattgtcttcaagtttcgttatgggaacactgtttgcctatataaattcatcagcatttatttttctgaatcactttgggttcacgcctaaagtatacagttatttctttgcagccaatgcggttggtatggtcttcttcggtttcattaatatgaaattactgaaattctataaagctgctgttgtactgaaatggtctctcttggcgaacctgttttttgtcatgctattgctgatttcggtaactacaggattaacatcaatatacttcgtcattccattgctatttatgtcagtagcaacactcagcttattattcgggaatggaatatccgttacgatgaacagcgtctcaagagctgaaacaggaactgcatcagctgtattggggatgattcagtatctgtttggtggatttgcaggtttattagtgggtttattaaataatggaaccctgtcagggattgctctcactatgttcatttgttcaaccggggcattagtgacatatcaaatggcaaagcagccgaagggtgaaaatgatactgcggaagctttggtgaagtaatccgtaatactaaaaaacattgctgaaaaatagagtaagagttggttaatgattttattcataaccaactcttaaaatctccagattttgaaggtaatgattctctacagagattccttttttgaaaaaaaaccagtagaagagtcgtaattttgtagtatttaacaggttattattaattctgaaaatacatatttaataggtatccagtacatcatcaatattgactggttccacaaaaaataaccctcaataaaataattgagtgtagtaagctctttttcatggttcctttagagcac

SEQ ID NO: 716 - DNA, 2977 bp, Xenorhabdus sp.; identical to SEQ ID NO: 715
  CDS (1)..(519)

SEQ ID NO: 717 - DNA, 2977 bp, Xenorhabdus sp.; identical to SEQ ID NO: 715
  CDS (1521)..(2630)

SEQ ID NO: 718 - DNA, 676 bp, Xenorhabdus sp.
  CDS (332)..(676)
gtgctctaaagaaagggccgtggaaaattgaaacacacaacgtcgcgggttataggttgcctttttgtacgcaaaacaagcaatctgagccgacgttattaacttaaccacactggatattcaagtaggggactgattatagactaaacagagcaaagagtcagcatgtaaatggaatctattgtctgtcattgagttaaacatgtatacccgaaaactatagggtcttctgaatagtggttgtaaacagatgtggtaataaatagatagtgatacactggcctttgctttaattatttgctttaactaccgtgacgagataacaagtacaatgcgagttttaggtatagaaacgtcctgcgatgaaactggaatcgcaatttatgatgacaaatccggcctgctagccaatcaattgtacagtcaggtaaaactacatgccgattatggtggagttgtgcctgagctggcatcccgtgatcatatccgtaaaacagttcctcttattcaggcggcgctgaaagaagcgggtctgacaagtaaagatattgatgctgtagcctacaccgcaggccccggtttaatgggagcgttgatgggtggagccactattggccggtcactggcttttgcatgggatgtccccgctattcctggtcaccatatggaagggcat

SEQ ID NO: 719 - DNA, 2162 bp, Xenorhabdus sp.
  CDS (2012)..(2161)
ttgatattctgttccaattaattaatttttaaattaaaataattaatgttttaaaacgatcataatatattgaatgctgaaaaaacagccaggtatagttagtgataattatattaaaataaaagaatggattagtttaatttaataaataaaaaataatttgaattatattaatatcaatctacacttaatataattaaggtgtgattttttcatgaaaaaatattaaaattagattgaggggtgaaacaatgaataccttatattgatcttaattataatcctatagtataaaaataaatcctttctgagaaaagaaaaaatgtttctttttttagaggaaggttctattttttatctaaaaattaggagtattgtcatgactgaacctaaagttattgaaaacgtatatgtatctaaattagaggtgcttcctcctgaatatatagataacgccaatactgttaaactctatttttatactttcgatggaaaaaaacgtactgattatgggccctattatttttctcgtagggatgcactggaaggaacagagatgtatatagctctattgatggctttattatctaagaaaaaagttaatttgaaagttaatccttcatatgcatatcttattggtattattatagatgactctcctgtgtgaatattagatagtctggagaaatgtaatccgggttaatttaaataatataagacaaggtttatattatgaaaaataaaaatgaaattacatcaaaaaaagagatagatgtttttcctgagccaaatatttcagagtataaagacgataacattaataataaatgtgagtcagtttatgaaaaaaaagcacctcaaatttttagtaaaatatcccataatatttcatataaattaagggctaaagatggctctctgttagcaatggatagaaagggaattatatccggaaaacgatacgttttttttgcaaaagatataccttttcatgcaaatgatgtggttattataaagttttatggagatccaagcgaaggtggtcagttagtaactggttataaggaaaataaatatgataaatattttctttatgctaatggacccgaaacatcatggaattggatttattgggataaagcaggtgaaagctctaaagagctattaataaggatgcgagtagaatatgctgggcaatcgatagtgggtgacctgtataaacttatttgggataataatggaacagacatgttcctttgcagagcagatgacgagtggggatatgtatcttctaaagattatactctttttacctttgaatcttgttttattgatcaaaatgatatatttgaaaaactaaaaaatacctggcccactgctgaaatttatttccatatgaaaaaacaaaactatgaagcaattagtaatataacaattaatgagatatataatgagtctggattagataaatataaaattagagactattcatttactagtgaagacttttgctatgtatacaaatcagaagcatcaaagcatgcatacaataaagaattaacgcacgggtatgctgttggaatcatgtattttactcaaaacgataatactattggcgcggttaacgtttttatcgattcttcactggatgtttatattttcaatccagaatttcgttctataataaaagttaaagactgggattatccaccttcgaaaataataatgtaaacataacttaaaaaaccaaattctttgtcatttttatttgaacgattaaatacatattatgtagataatttcaaaaaattttcagggaaatttcataatggattatttcataattattaacataatcagggcgagatctcacatttttcataaggttatttaggtcaaataaaagtcaatatacggacttttataagcatttctctccttaaaacgttaagatcacgctattccataaacagtgtgcttaataatgaatatttttaattttatcagaaaaatagatgacccacgttctgacatcaataaaaaacatgaattgatggatgtcatttttttggccttttctgctgtgttatgtggcgcttctggctggaaatcgattcaagaatttggtgagttacaaatagagtggcttaaacaatatacct

SEQ ID NO: 720 - DNA, 2162 bp, Xenorhabdus sp.; identical to SEQ ID NO: 719
  CDS (1003)..(1731)

SEQ ID NO: 721 - DNA, 2665 bp, Xenorhabdus sp.
  CDS (1949)..(2659)
tctaaagtgcttccgggaatgaataagaggccagtctttgactggaaaaacacgtttccttttttcttcgacgtatcttgaaatctataatatcgatgacaaagaataaaataactttagcttatcgcattattgagcaggctttctcaaagtataaaccagcttgtttctgttatttttcagtgttaattgcctgttttgtaaactcactgttgcaccgtaggtcaggatatcaataataacccgatcccatttgttgagcttttcattaacacagaatatgtcggatttagtcaacttgttgacgattaaaacattatcctttaattcacctacccccataaagttgttacacattgttccggaaacaaacatgtttttaccaaatgtgatggacagctttgtatcttctttattggatacattctcaccattaacgctgactaacgcaaatttatggtgctgcaaatctttggcagttacatttcctgtggcacttacccctgtggattgacatgctgtaagtaacaaggtggcgaccgctaacggaatcgctctgttcattttatctcctgatgtttacgacttcatccaacgagattcgggcagggttcaccagaagttaattgttggatactttgtaacgttgtttcactgatactggttaatgcttcttctgtcaaaaatgcctgatgacctgtgaataagacattatggcaggaggataaacggcgaaagatatcatcttgaataacgtcatttgatttatcttcaaaaaataaatcgcgttcgttctcatatacatccatacctaatgcgccaattttctgttgtttcaatgcgttgattgcagcaacagaatcaatcaatgcgccccggctggtgttgatgatcattacaccatctttcattttactgaacgcaatttcatccagtaagtgatggttttccggagtcattggacaatgtagtgagatcacatcagattcggcatacagagtatccaaatccacatatctcacaccaagttctaatgcttccttatttgggtaaggatcatgtgctaataagtgcataccgaaacctttcaggatttttaaggtagcaaggccaattttcccggtaccgataatacctgcggtacggttatacatattgaacccagtcaggccttcaagggagaagttggcatcgcgggtacgctgataagcacgatggatacgtctgttcaggcatagcattaacccgactgtatgttcagcaacggattccggtgaataggccggtacgcgaacaacctgaatgccgagttctttagctgcatctaaatcaacattattaaaaccggcacaacgtaatgccagaattttgatgttcatttctgccagttcttgcaggacttcacgtccgccatcatcattaacgaaaatacagacagcatcagctccaacagcatttttagcggtttgtgggctaaggggaaaatcaaagaactcgatatgataatcaaggccaagtttttggttgagtaattcaaaatgtttacgatcgtattgctttgtactgtaaacagcaactttcataactttatctccggtactttattgactgtgtggtgcttaatttcattcgagctacttattgagctttccagttcatagagtatacctgttgtttttcaagcctcctccttgatgattaagcaaatttgttctcttgccactactatctggcttgaaatacattaggtatatagtttttgggctatgttttcgtccttgccatggtgatgcaacttgaaattcatcggtataataaaccgactcatagttttccatgagattatcataacaggaagttatattcagactgaaaaagaagagttcgacaataaatgatcaggatattaaaagcgttcgcagtcatggtaatactactggtgttattagtgttgacaggatggttcactctttctcactggttaccattggttgccagccattggttaccacagggaatgaagctttctttgactcagcccaaatggacaaataacagattacagcttgatagcctaaccgtgcaggtgcaaaaatgtgaactcataaagttatctggtttatctgccggatatttgccaaagcaacgggcagaaggcaagtattgggatattcatattgctaatgtttatagccagagtgaatgcttgccacaattaccgataacgcaaaagcagccagctcccgtatccgttgatgagatcttatcttccattcctgcaattaaattaattattgaccatgttgctctttctccgtggcaggaatttgccggaacgcttcagtttgattcatcttctcaccagcaaacgctctcttatcaggggagtcagttaaaattatcggctgatattacagataaaaaatacctgaacgttcaccaattttttgcaaaattagcccaccagactattagtctgaatggtggtttttcattgccattggatatcaacaagttgccggaacagggcagaataacggggcagttgtctgtcaggcagtttcctgaacctttggtgatgttactggaatggcaagggcagaatggaaaattcactatcactcaggaacctagccaattagacaaaaacgacctttaggggact

SEQ ID NO: 722 - DNA, 2665 bp, Xenorhabdus sp.
  CDS (2102)..(2536)
agtcccctaaaggtcgtttttgtctaattggctaggttcctgagtgatagtgaattttccattctgcccttgccattccagtaacatcaccaaaggttcaggaaactgcctgacagacaactgccccgttattctgccctgttccggcaacttgttgatatccaatggcaatgaaaaaccaccattcagactaatagtctggtgggctaattttgcaaaaaattggtgaacgttcaggtattttttatctgtaatatcagccgataattttaactgactcccctgataagagagcgtttgctggtgagaagatgaatcaaactgaagcgttccggcaaattcctgccacggagaaagagcaacatggtcaataattaatttaattgcaggaatggaagataagatctcatcaacggatacgggagctggctgcttttgcgttatcggtaattgtggcaagcattcactctggctataaacattagcaatatgaatatcccaatacttgccttctgcccgttgctttggcaaatatccggcagataaaccagataactttatgagttcacatttttgcacctgcacggttaggctatcaagctgtaatctgttatttgtccatttgggctgagtcaaagaaagcttcattccctgtggtaaccaatggctggcaaccaatggtaaccagtgagaaagagtgaaccatcctgtcaacactaataacaccagtagtattaccatgactgcgaacgcttttaatatcctgatcatttattgtcgaactcttctttttcagtctgaatataacttcctgttatgataatctcatggaaaactatgagtcggtttattataccgatgaatttcaagttgcatcaccatggcaaggacgaaaacatagcccaaaaactatatacctaatgtatttcaagccagatagtagtggcaagagaacaaatttgcttaatcatcaaggaggaggcttgaaaaacaacaggtatactctatgaactggaaagctcaataagtagctcgaatgaaattaagcaccacacagtcaataaagtaccggagataaagttatgaaagttgctgtttacagtacaaagcaatacgatcgtaaacattttgaattactcaaccaaaaacttggccttgattatcatatcgagttctttgattttccccttagcccacaaaccgctaaaaatgctgttggagctgatgctgtctgtattttcgttaatgatgatggcggacgtgaagtcctgcaagaactggcagaaatgaacatcaaaattctggcattacgttgtgccggttttaataatgttgatttagatgcagctaaagaactcggcattcaggttgttcgcgtaccggcctattcaccggaatccgttgctgaacatacagtcgggttaatgctatgcctgaacagacgtatccatcgtgcttatcagcgtacccgcgatgccaacttctcccttgaaggcctgactgggttcaatatgtataaccgtaccgcaggtattatcggtaccgggaaaattggccttgctaccttaaaaatcctgaaaggtttcggtatgcacttattagcacatgatccttacccaaataaggaagcattagaacttggtgtgagatatgtggatttggatactctgtatgccgaatctgatgtgatctcactacattgtccaatgactccggaaaaccatcacttactggatgaaattgcgttcagtaaaatgaaagatggtgtaatgatcatcaacaccagccggggcgcattgattgattctgttgctgcaatcaacgcattgaaacaacagaaaattggcgcattaggtatggatgtatatgagaacgaacgcgatttattttttgaagataaatcaaatgacgttattcaagatgatatctttcgccgtttatcctcctgccataatgtcttattcacaggtcatcaggcatttttgacagaagaagcattaaccagtatcagtgaaacaacgttacaaagtatccaacaattaacttctggtgaaccctgcccgaatctcgttggatgaagtcgtaaacatcaggagataaaatgaacagagcgattccgttagcggtcgccaccttgttacttacagcatgtcaatccacaggggtaagtgccacaggaaatgtaactgccaaagatttgcagcaccataaatttgcgttagtcagcgttaatggtgagaatgtatccaataaagaagatacaaagctgtccatcacatttggtaaaaacatgtttgtttccggaacaatgtgtaacaactttatgggggtaggtgaattaaaggataatgttttaatcgtcaacaagttgactaaatccgacatattctgtgttaatgaaaagctcaacaaatgggatcgggttattattgatatcctgacctacggtgcaacagtgagtttacaaaacaggcaattaacactgaaaaataacagaaacaagctggtttatactttgagaaagcctgctcaataatgcgataagctaaagttattttattctttgtcatcgatattatagatttcaagatacgtcgaagaaaaaaggaaacgtgtttttccagtcaaagactggcctcttattcattcccggaagcactttaga

SEQ ID NO: 723 - DNA, 2665 bp, Xenorhabdus sp.; identical to SEQ ID NO: 722
  CDS (1083)..(2078)

SEQ ID NO: 724 - DNA, 1932 bp, Xenorhabdus sp.
  CDS (310)..(1365)
acaaaactgcagtttattttttatgttaataaaaataaataataaattttgatagttttattactttaaatgttacacggccatttaataaattatcgtaaggtgataattttcatctttacctaatgaatgagcgcagccaacaaagaggaaacttgaaagacgaaaggtattaataaagatgaaatgttgttcagatagtgagagacgatagtaaaatgaaagttgcgcagtaacagattaaaaaaagtagcatatcatgaatttgttctgtatatttatacagtatttttgtcgtggagagttcagatgcgcaaaattattcatatcgatatggactgcttttttgctgccattgaaatgcgggataatccgtcactccgcgatatcccgatagctgttggtggtagcgctgacaggcggggtgtcatcagtactgcaaattatcctgcccgccgttacggtgtacatagtgctatgtctacctcaatggcaatgaagttgtgcccccaactgaaagtcctttcagggcgtatggcctactataaagaagtgtctcaacatatccgccagatttttgcccgctataccgatctgatagaacccttgtcgctggatgaagcctatctggatgttaccgattgccagtattgccaaggctcagcaacattaattgtcaaagaaattcgacaggtgatttttgatgaattgcagctaacggcttcagcgggaattgcccccgttaaatttctggcaaaaatagcttctgatatcaataaacccaacggccagtatttgatttcacccacacaggttgacgattttgtgcaatctctgccattacgtaaaattcccggagtggggaaagtcaccgccgggcgcttgtctgatatggggttagtactttgttccgatgtacaagactatgacaagttagcgttaataaaaaaaatgggtaaatttggacttgtgctctggcagcgctgtcatggtattgatgagcgccagataaaacctgatcgtttacgtaagtctgttggggtagaaaaaacgctggcaaaggatatccatgactggcgtgattgtgttgagttgattgaacagctttatcccgagctggaaaaacgactgggaaaggtcaaaccagatcttcgcattgctcgtcagggtattaaattaaaatttgatgattttcagctaaccacacaggagcatacgcatccgttactggataaacaggatctgctgaaggttgcccaacaggcttgggagacacgtcgggaaggcagaggagttaggttagttggcctgcatgtgacattacaaagcccacaactggaacgacagctattgcttgagttgtaatgtggtttgttagtgatttttgttttacgaaaaagatactgttaaatagtgtgtggaatatgaagaaggaatattcccctgtctgtggacctgtctcttgatcatatttcataggtcaagagacttggacagtaaataaccgtcaaggatggtttgtaacatgaaccatccttcccacagcctttcccatcctactcggccatttcgtttagagtcataccagcccgccagtttgcccaaattaatataggcccaataaatgcttggggctgtcttagggagttttttcttctcttgctttgtccacaataacttccacgctaacgggcttaataacgtttcacaactttgtttctccgcctctgatttattgagtcccacatagcgtaactgatgaacacgaaccgcaataaacgccaggatcaccaccattttttccagattctctttacattgcatccgtagcgcttcgacccgtgtcccgccacttttccacgctttgtgaaactcttcaatgagccaacgtttttcatagtaatccagaatacggggggcatcttcttttac

SEQ ID NO: 725 - DNA, 1932 bp, Xenorhabdus sp.
  CDS (1)..(459)
gtaaaagaagatgccccccgtattctggattactatgaaaaacgttggctcattgaagagtttcacaaagcgtggaaaagtggcgggacacgggtcgaagcgctacggatgcaatgtaaagagaatctggaaaaaatggtggtgatcctggcgtttattgcggttcgtgttcatcagttacgctatgtgggactcaataaatcagaggcggagaaacaaagttgtgaaacgttattaagcccgttagcgtggaagttattgtggacaaagcaagagaagaaaaaactccctaagacagccccaagcatttattgggcctatattaatttgggcaaactggcgggctggtatgactctaaacgaaatggccgagtaggatgggaaaggctgtgggaaggatggttcatgttacaaaccatccttgacggttatttactgtccaagtctcttgacctatgaaatatgatcaagagacaggtccacagacaggggaatattccttcttcatattccacacactatttaacagtatctttttcgtaaaacaaaaatcactaacaaaccacattacaactcaagcaatagctgtcgttccagttgtgggctttgtaatgtcacatgcaggccaactaacctaactcctctgccttcccgacgtgtctcccaagcctgttgggcaaccttcagcagatcctgtttatccagtaacggatgcgtatgctcctgtgtggttagctgaaaatcatcaaattttaatttaataccctgacgagcaatgcgaagatctggtttgacctttcccagtcgtttttccagctcgggataaagctgttcaatcaactcaacacaatcacgccagtcatggatatcctttgccagcgttttttctaccccaacagacttacgtaaacgatcaggttttatctggcgctcatcaataccatgacagcgctgccagagcacaagtccaaatttacccattttttttattaacgctaacttgtcatagtcttgtacatcggaacaaagtactaaccccatatcagacaagcgcccggcggtgactttccccactccgggaattttacgtaatggcagagattgcacaaaatcgtcaacctgtgtgggtgaaatcaaatactggccgttgggtttattgatatcagaagctatttttgccagaaatttaacgggggcaattcccgctgaagccgttagctgcaattcatcaaaaatcacctgtcgaatttctttgacaattaatgttgctgagccttggcaatactggcaatcggtaacatccagataggcttcatccagcgacaagggttctatcagatcggtatagcgggcaaaaatctggcggatatgttgagacacttctttatagtaggccatacgccctgaaaggactttcagttgggggcacaacttcattgccattgaggtagacatagcactatgtacaccgtaacggcgggcaggataatttgcagtactgatgacaccccgcctgtcagcgctaccaccaacagctatcgggatatcgcggagtgacggattatcccgcatttcaatggcagcaaaaaagcagtccatatcgatatgaataattttgcgcatctgaactctccacgacaaaaatactgtataaatatacagaacaaattcatgatatgctactttttttaatctgttactgcgcaactttcattttactatcgtctctcactatctgaacaacatttcatctttattaatacctttcgtctttcaagtttcctctttgttggctgcgctcattcattaggtaaagatgaaaattatcaccttacgataatttattaaatggccgtgtaacatttaaagtaataaaactatcaaaatttattatttatttttattaacataaaaaataaactgcagttttgt

SEQ ID NO: 726 - DNA, 1956 bp, Xenorhabdus sp.
  CDS (1592)..(1942)
atttggtgcccaagtcgttgccagtttctgctaaattaggggctgctgcctttattatgacagtgatatttggtgttagtgcgggagtcattgcggcactgaatcaaaatacaaaatgggattacacggtaatggggtttgccatgacaggggttgttattcccagttttgtcgttgctcccttattggttctgatatttgcaattacactaaaatggttgccgggaggcggctggaatggcggggcacctaaatatatgctcttgccaatggttgcattatccctttcttatattgccagtatttcccgtatcactcgcggatccatgattgaagttctgcattccaactttatccgaacagcaagagccaaggggctgccattacgtaagattattttccgtcatgcactgaaaccagccttacttcctgtcatttcctatatgggtcccgcctttgtcggcattattactggctcgatggttattgaaactatcttcggtttgcccggtctggggcaattgtttgttaatggcgctttaaaccgtgactactcactggtgctcagcctgacgattctggtgggtgggctgaccattatgttcaacgctatcgttgatgtgttgtatgccgtcatcgatccgaaaatccgttactaagactggagcacgcaatgttactgaataagaaaaatagcgaagctctggaaaatttttctgagcagctggaaattgaaggccgcagtttgtggcaggatgcacgtcgtcgttttattcataataaagcagcaattacaagtttatgtatattgtttgtcatcacattgtttgtcattttagcgccgatgttgtctcagtatacttacgatgatactgactggaacatgatgaccatgccccctgattttgaatcccaccactattttggtacagattcatcaggccgtgatttgttagtccgtgttgctattggtgggcgtatttcacttatggttgggatagccgcggctttgattgccgtgatattcggcacattatatggtgctatgtcaggctatcttggtggcaaagtcgatatggtcatgatgcgtctgctggaaattctgaactcctttccgtttatgtttttcgtcatcctgttagtgactttctttggacaaaacattctgctgatttttgttgcaataggcatggtgtcatggctggacatggcgcgtattgtccgggggcagacattgagcctcaaacgcaaggaattcattgaagctgcactggtgtgtggtgtatccagccgtaatatagttctgcgtcatattgtgccgaatgtgttgggtgttgtggtggtttatgcttcattattagtaccaagcatgatcctatttgaatctttcctgagctttcttggtttgggaacgcaagagccgctcagtagctggggggcattattaagcgatggtgccaactcaatggaggtggctccgtggttactcctgtttcctgcgggctttctggtgttaaccctgttctgttttaactttattggtgacggcctgcgagatgccctcgaccctaaagaccgttaaggagagcctatgaatagcgtagaaacgataaaacatgctaaaagcgctgaatcactattaacggtgaaagatttaaatgtggtattcagtacgcctgatggcaacgtaacagcagtaaataaactaaattttgacttacaggccggagaaactctgggtattgttggggaatccggttcaggtaaatctcagacagcctttgccttgatggggttactggccagtaatggtactgtcagtggttctgctgtttttaacggccgtgagattcttaatctgcaagaaaaagcactgaataaaatgcgggcggaagaaatctcaatgttcttccaagacccgatgactttcttaaccttatagcgcgtttagagcac

SEQ ID NO: 727 - DNA, 1956 bp, Xenorhabdus sp.; identical to SEQ ID NO: 726
  CDS (674)..(1582)

SEQ ID NO: 728 - DNA, 1956 bp, Xenorhabdus sp.; identical to SEQ ID NO: 726
  CDS (3)..(659)

SEQ ID NO: 729 - DNA, 1812 bp, Xenorhabdus sp.
  CDS (1728)..(1811)
aactggggccggaatttatcaagccggtaccggatgggtacttcctccacatttggtgctgcgctggttgtgactagcgcggcagcaattgtcgggttagttatcggcagccttgccggcattacacacgggctgaaatctgcgatcctgaatcacattcttgacaccctgctttccataccttcactgttattagccatcattgtcgttgcttttatgggagccagcctgcaacacgcaatgatcgccattgggctggcattactgccaagaattgtacgagcagcctataccgctgtgcatgatgaactggataaagaatatattatctctgcccgtctggatggcgcttcaaattatcatattttacgttatgctgtttttccaaacattaccgctgtgatagtgaacgagttaacccgtactttctcgattgccatccttgatatcgcggctctggggtttctcaaccttggcgcacaattgccctcacctgaatggggcgctatgctcggcggatcactggagcttatctacacggctccgtggactgtgatgctgccgggagcagccattatgctgagtgttctgctggtgaatttactgggcgatggcctgcaccgtgccattaatgcaggagtcgaataatgccactactcgatattcgtaacctcaccattgaattcatgacgtcagaaggccccgttaaagccgttgatcgattaagtatttcattaacagaaggtgaaatcctcgggctggctggtgaatccggttctggtaaaagccttatcgccaaggcaatttgtggggttgcaaaagataatattaccgttaccgcagaccgcttccggttcaatgatattgatttattacgcctgacgccgaggcaacgccgtaaagtcattggtcacaatatttcgatgatatttcaggaacctcagttatgtctcgacccgtcagaaagtattggtaagcaactcattcagtctattcccggctggacgtttaaaggccactggtggcaacgtttcaactggcgaaaacgtcgggctattgaattgctccaccgggtgggtattaaagatcatcacgacatcatgaactcttatccttatgaattaactgatggagagtgtcaaaaagtgatgattgccattgcgcttgccaatcagccaaggctgctgatcgctgatgagccaaccaatgcaatggagccaacaacgcaagcccagatattccgcctgctatcgagcctgaaccagaacaacaatatgacaattttgctgattagccatgacctgcaaatgatgagtaaattagtgaaacgcatcaacgtgttatattgcggacaaaccgtggaaagctctacaccggatgatctgctggttactcctcaccatccttatacacaggcactgatccggtctattcctgatttcggcagccctctgccccataaaagccgccttaatacactgccgggcgtcattccgtcactggaacatttgcctatcgggtgccgtctcgggcctcgttgcccttatgcccagaaaacctgtatcgaagcacctcggttacggggcagcaaaagtcataccttcgcctgtcacttccccctgaacatggaggaacaataaatggtcgagacactactggaagttaaaaacctgacgaaaactttccgttaccgtacaggcttgttccggcgccaccatcttgatgccgtgaagccggtcagttttaccttgcaaccccgaaaaacactggcattattggtgcaaacggctccggcaaatccacactggccaa

SEQ ID NO: 730 - DNA, 1812 bp, Xenorhabdus sp.; identical to SEQ ID NO: 729
  CDS (687)..(1640)

SEQ ID NO: 731 - DNA, 1812 bp, Xenorhabdus sp.; identical to SEQ ID NO: 729
  CDS (7)..(648)

SEQ ID NO: 732 - DNA, 2021 bp, Xenorhabdus sp.; identical to SEQ ID NO: 28
  CDS (3)..(1628)

SEQ ID NO: 733 - DNA, 2277 bp, Xenorhabdus sp.
  CDS (64)..(1323)
ggtataagaaagagattattaatattgttatgagcccatgccagataactcaacgcagttaagatgactttattagcactcggtataaatcacaaaacagcgcctgtttctttgcgtgaacgggtagccttttctcccgatacgatagggcttgcacttgataacctgctccagcagccgctggtgaggggcggggttgtgctgtcaacctgtaatcgcaccgaactgtatctcagtgttgaacaacaggacaacctgaaagagcaactcatcaattggttatgcgaatatcaccagttaagccacgatgaactcaacacgagcctttactggcatctggggagtgatgctgtcagccacttaatgagggttgccagcggactggattcactagtgcttggtgaacctcaaattttaggtcaggtgaaaaaagccttttctgaatcgcagagctaccaatccttatcaggcgaattagagcgcctgttccagaaatcattttctgttgccaaacgggtcagaactgaaacagaaattggggcgaatgcggtttctgtcgcttttgctgcctgtacgctcgcccggcagatctttgagtcgctttctcagttaaatattctgctggtgggagccggggaaacgattgagcttgtcgcccgtcatcttaaagagcaccgggttaaccatcttatgattgccaaccgcacgaaagagcgggcgtatacgctggcgaatgaggtgaatgcggaagtgatatccctgtcggaaattgatacccgactggcagaagcagatatcgtcatcagttctacagccagccctttaccgattattggtaaaggcatggtcgaacgggcactaaaattacgccgtaatcaacccatgctgctgattgatattgctgttccccgagatatcgagccggatgttgagaaattgagtgacgcctatttgtacagtgttgatgatttacaggccattattcagcagaatcttgcgcaacgtaaagcagcggctgtgattgctgaaggaattgtacaacaagagagcactcattttatggattggttgcgttcgcagggcgcagttaatacaattcgcgaatatcgggaacaggcagaaaaaatcagggctgagatgactgcaaaagcattaatgtccatacagcagggtgctgatgcagaacaggtcatcaaccagttaactcaccaattgacgaatcgtctgatccatacaccaactaaatcactccaaaaggctgccagtgacggcgatttagaacgcctgaatctcctgcgggacggccttgggctggatccataaccctattctaaataaggtctgatattacgaatgaagccttctattgtcgctaaactggaagcattgcaagaacgccatgaagaagtactggctcacctcggtgatgccgaagtgatcgctgatcaagagcgtttccgtgcattatcaaaggaatatgctcaacttaccgatgtaactagctgttttaaatcctggaaaacaacgcaggatgatttacagacagccgagatgatgcttgatgatcctgaaatgagggaaatggcgcaggaagaactcaaggacgcaaaaattcgtaatgaagagttggaacagcaactccagttattgctgttgccaaaagatccggatgatgagcgcaactgttttctggaagtgcgtgcgggaactggtggtgatgaagcggcaatatttgccggagatctgttccgcatgtatagccgttacgccgaatctcgtcgttggaaagtagagattatgagtgccaacgaaggggaacatggcggttacaaagaggttatcgcgaaagtttctggtgagcaggtttacgggcatttgaaatttgaatcaggcggtcatcgtgttcaacgtgtgccggaaacagaatctcagggtcgtatccatacttcggcctgtacagtagcggtactgccggaaattccggaagctgaattgccggaaatcagctcagcagacctgaaaattgataccttccgttcttccggtgcgggtggtcagcacgttaataccaccgattccgcgatccgaattacccatattcctaccggaattgtggtggaatgtcaggacgaacgttcgcaacataaaaataaagctaaagcattatctgtgctgggtgcccgtattcgtgctgctgaaatgcagaaacgtcaggaagctgaagcctctgaacacacgtaacctgcttggctctggtgaccgttcagatcgcaaccg

SEQ ID NO: 734 - DNA, 2277 bp, Xenorhabdus sp.; identical to SEQ ID NO: 733
  CDS (1354)..(2241)

SEQ ID NO: 735 - DNA, 1316 bp, Xenorhabdus sp.
  CDS (423)..(1316)
ccaattagtttttaatattgcaccaaatgttaatgattcagctccactgaagattgacgttatgctattgaaatcaaaagaagagttcatgtcggcagactttttttcgcttcagggcaacgcgaaagcagcgctgggtgataaattagtcaatgaggatcggttctttatcctccctaccgaacatgtccgtcatctactggaacagaatcagccagaaattcattacattggaattgttgccgaatacaggcaattagatggaaagaaatggcgtattgctcttccggtatcggtaccagcaaagcctccgttttacaaattctggcgttctgcacctgacaaactacaggtgtgcattaaagttactggctctggtttaactcctgacttaacttgtgctgcatgaactgaagaaaatcatgaataaatctgaaaaagtcatttggacagaagggatgttcttacgccctcatcacttccagcaggctgaaagctatctggaagcctatgtccgtgattgggggaaagcccaactaccttattattggggttttctgactctcgaactgaatcaggaatttctcaatcaggggaaaattatgctttcctctgcgagcggtatttttccggatggaactccattcagttttgatggtgctaacgcaccagaacctttacaactctctgaaaatcagaccgatattaatgtcatgttggcgcttccccactttcggcggggcagagaagaagtcattttcagtgagcagaaaaattcgctggcgcgtttcatcagttttgaaaccgaagtcaatgactttaatgccatgtcagtgggcagtgctattttacaattcggcaaaatgcgcctgcgcctaatggcggaatctgatttaacaccagaatggactgcattgaagattgttcacgtagtgaatagaaccagtgataataaaatatatcttgatcaacagttcattcctcccctgctcaactgttatgccagcccgcaagtagccgggtttgtaaccgatattcaggggttactggaacagcgccgccagcagataagccagcgtttattacagctggggcgacataatgactctgaaatcatggactttctcttactgtcccttgtcaatcgctacagtggtcaggtaaaccacgcaaacaatttatcattattgcacccggaaagattattcagcgaatggctgcaatttgccactgaactggcgacattctcccaaagtcgtgttcctgatgaaaatcttcctctctatgatcatgacaatcctttagggcacatggaa

SEQ ID NO: 736 - DNA, 1350 bp, Xenorhabdus sp.
  CDS (3)..(317)
gcgctatttcctcaccgaagaacaacaacgggctggaacttatctacattgatgacaaggtgaacaaggacggcagtatcacaattgaaaccttccaccgtcagcatagccacttaccggcacgctttcagaaccagcggataaaggcccttgtgaacggggaaaaagtttactatcaggacggtgaaccgtgcgatattcctgaaggctgtcgcttggatgtccgtgtccagatgctggaaaatgcggtgtggaatgtgaagcagaaagaggccaaggttacgactgatagtgagcaggctgagcaggtggagtaggggaatgattaacccgcagaaagttgcgggttatctttgagactattattttatttcgtcgagaagagaataacgtgactcaattttaacgttaacataaaagtcaccggaattatcaccaaaatcaccagggaaatcgaaaaacaagagtattaactcaccatcggtagggactgttttgtgaagcacgccattactaatttcgtaggatttatctccaatttttgcaattagactatatcgcgcttcaggcgatatacctacgagcccttgaggtgcagcccacggatttggtcgattgtcagaggcatattttacccatcccgaagcaataacagagataacatcgcctttttgaagtacaagtcctgtcggttgaccttgctcaaggttagcaggaacatttccagaccaatcatacatagtattacctccaaattatattttgaaagcgatagaagaattaagattgtgattatttagtgtcaggcatttgcacccgaacagaaacaaatctgccatcgggaatatcgattaaatcaccatcagcgtaaccttcgcgtatatttctggcgaaagctggggcatctgagtgttcacggtggtaggtcattaatttgatagagccatcaggtagaacttcatggttgacccaaaccattggtagatcgttctgacaacgtgggatgtcgatgttatttacagttccatcatgactgaatcctttaacacctttaattaaccccaattctgtttaagctgtcactggaatatcttcttcttctgagtagaaaactttcagtgatggtttcttctttttatgacaataagcaattaaccccgttaaaacagtcaacagaaacccttttatacttcgatgacgagaatgttctatttgacagatatttttcaattgcccattaaccgtctcgataataaaacgccttgataacattatcttatcccaatcttccagcacactcgctttaatattactccgctttttcgtgatgaaagtgacaccgttttgtgc

SEQ ID NO: 737 - DNA, 1350 bp, Xenorhabdus sp.
  CDS (13)..(276)
gcacaaaacggtgtcactttcatcacgaaaaagcggagtaatattaaagcgagtgtgctggaagattgggataagataatgttatcaaggcgttttattatcgagacggttaatgggcaattgaaaaatatctgtcaaatagaacattctcgtcatcgaagtataaaagggtttctgttgactgttttaacggggttaattgcttattgtcataaaaagaagaaaccatcactgaaagttttctactcagaagaagaagatattccagtgacagcttaaacagaattggggttaattaaaggtgttaaaggattcagtcatgatggaactgtaaataacatcgacatcccacgttgtcagaacgatctaccaatggtttgggtcaaccatgaagttctacctgatggctctatcaaattaatgacctaccaccgtgaacactcagatgccccagctttcgccagaaatatacgcgaaggttacgctgatggtgatttaatcgatattcccgatggcagatttgtttctgttcgggtgcaaatgcctgacactaaataatcacaatcttaattcttctatcgctttcaaaatataatttggaggtaatactatgtatgattggtctggaaatgttcctgctaaccttgagcaaggtcaaccgacaggacttgtacttcaaaaaggcgatgttatctctgttattgcttcgggatgggtaaaatatgcctctgacaatcgaccaaatccgtgggctgcacctcaagggctcgtaggtatatcgcctgaagcgcgatatagtctaattgcaaaaattggagataaatcctacgaaattagtaatggcgtgcttcacaaaacagtccctaccgatggtgagttaatactcttgtttttcgatttccctggtgattttggtgataattccggtgacttttatgttaacgttaaaattgagtcacgttattctcttctcgacgaaataaaataatagtctcaaagataacccgcaactttctgcgggttaatcattcccctactccacctgctcagcctgctcactatcagtcgtaaccttggcctctttctgcttcacattccacaccgcattttccagcatctggacacggacatccaagcgacagccttcaggaatatcgcacggttcaccgtcctgatagtaaactttttccccgttcacaagggcctttatccgctggttctgaaagcgtgccggtaagtggctatgctgacggtggaaggtttcaattgtgatactgccgtccttgttcaccttgtcatcaatgtagataagttccagcccgttgttgttcttcggtgaggaaatagcgc

SEQ ID NO: 738 - DNA, 529 bp, Xenorhabdus sp.
  CDS (3)..(527)
tgctcgttccatgtgctctaaaggaaccggccgatatcggcgatggcgaaactctgctcgtcaatacggacggcacctacgaatacagcaaggtttccagcttcgagggcgcgcgcggcaagcgcgtctatatttccgtcgcgacgccgcccgtcttcacgctcgacaattaccgcacggttctgacctcggaaggcatcggccagtccttcgtcaactcactcaccgtggccgtcccggcaaccgtcatccccatcctgattgccgcctttgccgcctatgcgctgtcatggatgagcttttccggccgcaatctgctgattgccatggtggtgggcctgatcgtcgtgccgttgcagatgtcgctcatcccgctgctgcggctctataatgaaatcggcaccatcttcggcgtgccgtccaagacctatgccggcatctggctggcgcacaccgccttcggcctgccgctcgccatctatctgctgcgcaactatatttccggcctgccgaaagagatcatcgaaag

SEQ ID NO: 739 - DNA, 1616 bp, Xenorhabdus sp.
  CDS (3)..(458)
taaagatgccgaacggcggtgcagttgccaacattactctggccacgtccgagagctggcgtgataagcaaaccggtgagatgagagagaagaccgaatggcaccgtgtggtcatgttcggcaaactggcagaagtagctggtgaatacctgcgtaaaggttctcaggtctacatcgaaggcgcgttgcagactcgcaaatggcaggatcaaagtggtcaggatcgttacaccactgaagtcgtggttaacccaattggcggcacaatgcagatgctaggcggccgtggtggcgcatcacaggatgctccggcacaaggcggctggggccagccacaacagccacaggcaactcagcagttcagtggcggcggtgcgccatcatctcgtccggcacagtctccggctccacagagcaatgagccaccaatggattttgatgatgatatcccgttctaaaaaataccacagactataatgtaaattatcttcttgaaagccccgttaatcggggcttttcctttttaaggactgtaaaatatttcttgcaggtttttagttatcagctacgtttataaaatgtaaagaatggtacctatatgactagcctaatcaccaagcatattgtgagtgagacaggagagagactaaaacttcttgtcgatggttcttctggtgtcccgctgttttatcctaacttgtatagtacttctcaaatccgtggagccgctaagtctgtagcgaccattcaaagttacattacttcaatgaaagtcctttactcgtgggcagctgagtattcagtcgatattgaagatcgatggaaacgagctgaatggctgaaagtatgggaaattgattctttaagagattactgttctttaccattgcggtcgccctcggaacagaatgagaaaatcgtaaatataaaacaaagccgtctaacgactgccaccaatgtgaattctccaaccaaatatgttcgcatgacctttatagctgattatttgaaatggctcgctgaaattatcactacaaatcccagtaagaatatgaagattgaaatagatgcgatgtataaaaatatcaaatctcatcgccctaaaaagaaaggaaggtcagaaatttcacgagaagataaagggctggattctcacttgctgaaggaggtcatggaagtatcaaagcctgaacacgataataacccttatcaaggctattcgttacaagttcgaaatgccgcaattatagctttgctacattatttaggtattcggagaggtgagctacttaatctgagaattgatgatatagattttgtcgcaaatgaaattcgaattgtcagacgtgctgacagctttgtagatcaccgcgtttaccagcccttagtaaaaacagaagagcgtattttaccgataagtgacagattagccgagatattgagtggatatgttatgaaatatcgttcagctttttctcgtgcccgtaaccatatgtctgagtatgaggtattggataagatcaaagctatacctaatgtagtggcgatgatgggaccgctagacaaggtaaggagccatatgccagtgactctaaaggatctggatgctattggcg

SEQ ID NO: 740 - DNA, 1616 bp, Xenorhabdus sp.; identical to SEQ ID NO: 739
  CDS (599)..(1615)

SEQ ID NO: 741 - DNA, 2045 bp, Xenorhabdus sp.; identical to SEQ ID NO: 29
  CDS (324)..(530)

SEQ ID NO: 742 - DNA, 2266 bp, Xenorhabdus sp.
  CDS (1)..(387)
ggctggctggcaacaggggatattgccaatctggatgaaaaaggcttcctgcatattgttgatcggaaaaaagatatgattctggtttccggtttcaatgtctatccgaatgaagtggaagatgttgtttcatcgcacccaaaagtgttggagtcagcggcaatcggtgttccgaacgaaaactcaggggaaacggttaaaatctttgttgtgcgtaaagatcctagtttaactgaggatgaacttaaaacacattgccgccgttatttaaccgcctataaagtgcctaaaattatcgaattccgtgatgaattaccgaaatcgaatgtaggtaaaattcttcgtaaagaactgcgtaaagaagaaatagaaaaagcagaaaaatagcgtagagagtatacaaaaaggcaatgttaattgcctattacatcaacaacgccggtttttaccggcgttgttgtatcttgctgatcggtgatggttatcgattctaaaatttctaaaatatagaataaactgcttcgttcttgagatacttttttaagatcaggagtaggacttataaacagatatggcattaacttccttgaattgactgaataatcattatttgcctaatcagtagattactcatgtcatgcctgtttcctttctgcattagccgtaatagtttcagactaatcatacgtagtattacctcaaaatgatattctgaaagtcatagaagaattaagattgtgattttgccatgtttggcatttgtgctcggacagaaacaaatctatctttgggtaaaacttcgtggttaccccaaatcaagataacctgttattacacaatgggatttttatttttccatatgacaggttaaaaccaccgtctttagacggtgactttgactttaatgttttgacctacgcgcgtttacgaggtgcgtggttcgacgactttcagtcgtcagcaccgaagtgcgctaacccacctacttcagtaggtggtagttaagtccactatctatgttgccccgtgtaccgtctctaaccctttatacatcataaaggtcattgtgcttgagataatcttttcaaagttgtggtaagtggaaactatgtctaatactatagaatgcagaaatggctacctaattaaaaggtgtgtactttatctttcaagttgcctctttgttagctgcgttcattcactccagtcgcatagttatctatgttcccgtgatgagccctcttaccgcgcgatgcatcttgaaatctattgtatatagaggtttttgttgtttgtacaaatctatgtgcacttttattttttagcattcaattattaacaacaaattgtatttaaaggatattttattgtttagttgtaattatcagttgattacctccaatgcccagttacagttcatctgtgatcgggccaaacaacatgcaaaaattgcgctggatacagaatttgtacgcacaaggacatattatccccaattaggcttgattcaactgtttgatggggaagagctttctctgattgatccccttgaaatttctcaatggcagcctttgcgcgaattactgactgatccgaatgtcgtaaaattcattcatgctggcagtgaagatttggaagttttctggaatagctttcagtgcatgccgactccgatcatagatactcaggtattggcggcgtttattgggcatcctttgtcgtgcgggtttgcaacactggtttcagaatatttgcatgtagaactggataaaagtgaatcgcgtaccgattggctggctcgtccgctcagtgaaaagcaatgtgaatatgcagcggcggatgtttattatctcttgcctctggctgatattctgatgacagctacagagcaggcgggttatatagacgcagcaaaagatgaaagcgaactgattgtacagcgtcgcaaagagatcttaatgccggagtctgcatacaaagatatcagcaatgccaaccaactacgcccgaggcaattagcctgtttaaaaaaactggctgcatggcgtttgaatcaggctcgtgagcgggatttggctgttaattttgttattcgtgaagaaaatttgtggcaggtggcgcgttatatgccaacttcactgggcgagttggatgctctggggttaagtgggcaggaaattcgttgtcatgggcgtcggttactggcaatggtagcagaatgccgggatctttcagatgacgaatgccccgaattaattaaaaactt

SEQ ID NO: 743 - DNA, 2266 bp, Xenorhabdus sp.; identical to SEQ ID NO: 742
  CDS (1380)..(2264)

SEQ ID NO: 744 - DNA, 2900 bp, Xenorhabdus sp.
  CDS (2779)..(2898)
aataaagtgatccgccacatcgcgacaggaaccgcggctgtccatgatagccagttttttgaagctgttttggacaggtcaaatacccgtcgggacatttatgcggataaagggtatgccagccagaagcgtgaacgtgtgctgaaggagcagggctatcgtgtgcatattcagagaaaagcggcacgtaataagcccttatcacactgccaaaaaggccgaaataagaaaatagcgaaaactcgggcacgcgtagaacatatctttggctcactctctcagatgggtgaaaaaattattcggacgataggccagctgcgagccaattttgcgatgacgatgaaggcaacctgctatgatttgcaacgtttggtttatttcggaaaatcgggtattcatgctttttaatttcgagatgtgatgaaaaagtgatgcgtttgtttttttcccctgaacaagcaagaaaaagtcatacacaataaggtcagttattggtgagttcaaaattgatcttattttttgtattgagagtttttagaggttcccaatataaaaacactattttattccaatccaaaatttggaatttagtttctatatttttaattaaaattttttctgttatttaatttattgagtaaataataaattaattttatttttatctgataatgtatcagctatatgcacagagttcatatcgtctaaaaatgaggtcatactcaagacataaatattttacattcaatttttgaaaataaagttgtatttatagtcattattttttacgctaaaatagttatgcttgatttctgctgataattatattttattgataatcttttaagctattttgtttgcgctgtaaaaataacaaaaatagacagttaagactttcattgcactatttatggatgaaattaatactgctttttaagaagaatattattgattaaaatttgtaaaggaaggttatctttaaattaaaaacagatcaacatacatacaataataagtggttatattttaaaggtgattgaataggcgttatatttaatcttaagtaatcctttaagtgagtaaaataaaaattatatgacgattataaaacttttcataattatgaggtatttcttattgttttctatttatcttttgaagtgacgttcaagagagttctaattttttaataaatatccaaatatattgacaacgataacttcatgtcaccttttcatgtaatgactgctataactattttagtttaggtcatgatttatgtattgtaaaaataggtttccgatgtaattcagccatcggtatcaacacgcaatggggcataaacgtgttagaccacacggtctgaacgggtcaccgcgtattgacagactctccctgacctcaaaaaattccgtcgtgctcctgacattattttttgtcccgggaaatgaattacccattgacctgatgatttctgttgattagcgtagtcagacttatccatgatccggtcgcttgtgaggatcacctttgggcagcgacaacaacactcccgtagcctgcaagggagtacaccacggtgtggtacatctgcgcccctttggaagcagatatcgtcagtctgatggcgatgaaggtcgcttaatctcatccatgatggccaaccggccagtcacccaacggggaacgcatttcccattgggtcaggtgttctccgttgtttttatcaggagaataccatgcaacaaaatactaccccggccacagtgcacactgtgtctccggctgaacgctccccttttgctgacatttttccgcacaccggttcactggaactgatgttgctggagcacacgttcattaaagcggctgccgggctgtgtgacgatgaccggtgtgaccgatggcagtaccggaaggtgtcagaccgcatcgcctatatcgtgccgatgcggccggattcttctggagtcaaggtgaatacgacggactttaaaggtgaagtctccgccgatgcctttggactgatggtgaccctgagcgtattgggttatctgactgatctgatgaagctggacggatatgctgagcggctttgcaccctgcgtgaatatgcgcggcaacaccctcaggctcagtgtatccgggcggctctgggcttaaagggagcacgtgatgccagataatgaattgatgctgctggacagtctggccctgtcggtcgtgtttcccgataaaaccccgctggaacggttgtttctggggtccctgctggcaaatactgcctcacagttgtgtggagaatatcatcctgaccaatggcgcatatcggaacgtgtctgattccctgacttatattatacccaccacggcaaaaacttattcggtttatctgccggaaacgacactgacggccacgctgtctgcggatgcgtttggtctggctgtcaccgcgattgtgtttgcccgtatcgccgagctggatgagccggatgccgatgcattccggttctgcgaactgcgggaatacgcgctgcaccacccggaaaccgggctgctgcgtgcggtactggcgatgcagcccaaagaggacatcatcagctcgtcatttatccataacaaccctcatcaccactgacgttatcagtcgatgaggctgttaactctcatttttagcgcctgaccggggagccgacaacaccttcccgtattgggcgggtgttgtctttttttaacgtcaaatcaaggaacaacaccatgaacgccatttttttgcccgtgccggagaatactgctcaggtattaccggaagacatttttaccgtgcaggtcaccggcctgatgcagcatcctcaccgaccgcaatcgctgcaagaggaaatcctgaccgtgtgtgaaac

SEQ ID NO: 745 - DNA, 2900 bp, Xenorhabdus sp.; identical to SEQ ID NO: 744
  CDS (2336)..(2638)

SEQ ID NO: 746 - DNA, 2900 bp, Xenorhabdus sp.; identical to SEQ ID NO: 744
  CDS (1740)..(2186)

SEQ ID NO: 747 - DNA, 2900 bp, Xenorhabdus sp.; identical to SEQ ID NO: 744
  CDS (1)..(408)

SEQ ID NO: 748 - DNA, 1604 bp, Xenorhabdus sp.; identical to SEQ ID NO: 30
  CDS (2)..(970)

SEQ ID NO: 749 - DNA, 2900 bp, Xenorhabdus sp.
  CDS (1056)..(2633)
tgctctaaaggatgtagtattgcagaaaatgcacgaaaaacgcgttgagaaagcattggttgttgatgataacttccatttgctcggcatgatcacagtgaaagattttcagaaagcagaacgtaaaccaaacgcttgtaaagatgagcagggtcgtctgcgtgtaggtgctgctgttggtgccggtgctggtaatgaagagcgtgttgatgcgctggtagcggctggtgtagacgtgttgctgattgattcatcccacggtcattctgaaggtgttttgcagcgtatccgcgaaacccgcgctaaataccctaatctgcaaatcattggtggtaacgtagcaaccggtgaaggcgctaaagcgctggtagaagcaggtgtgaatgccgttaaagtcggtatcggccctggttctatctgtactacccgtatcgtgaccggtgttggtgtaccacaaattaccgcgattgctgacgcagtagaagcactggaaggaacagggatcccggttattgctgacggtggtatccgcttctctggtgacatcgctaaagcgattgccgcaggtgctgcatgtgtgatggtgggttcaatgctggcaggtacagaagaatctccgggtgaaatcgaactctatcagggccgctcattcaaatcctatcgtggaatgggttctctgggagcaatgtccaaaggttcttctgatcgctacttccagactgataatgcggcagataaattagtaccggaaggtatcgaagggcgtgttgcttataaaggactgctgaaaaacatcgttcaccaacaaatgggtggattacgctcctgtatgggtctgacaggctgcgctacgattgatgaactgagaactaaagcagaattcgttcgtatcagtggcgctggtattcaggaaagccacgttcatgacgtgactatcacgaaagaatcaccaaattaccgtttaggtctgtaatttacttacacagtggctcgcaatagcgggtcactgatttttttactttttaattgccacttgttttgggaattcacctctaatgacaactaatatccatcagcatcgcattctgatccttgattttggctcgcaatatacacaacttattgcccgccgtatccgtgaaatcggtgtttattgtgaactctggacatggaatgtcactgaagaacaaatccgtgcatttaaccctagtggtatcattctttctggtggcccggaaagcacaactgagaacaacagtccacgtgcgccagaatatgtgttcaacgcgggtgtgccggtattgggtgtctgctatggcatgcaaaccatgtctatgcaattgggtggcgaagtttctacctctaatgagcgtgagtttggctatgctcaggttgagctgaaaggtgatagcgaactgttccgcggtattcaggatgcactgaatgaatcaggtacaccggtactggatgtgtggatgagccatggcgataaagttactgccattccggaaggcttcactaccgtagccagcactgacagttgcccatttgccattatggcgaatgaagataaacgttggtacggtgtacagttccacccggaagtgactcacactcatcagggtctgaacatcctgaaacgctttgtgctggatatttgccagtgtgaagccctgtggacacctgcatctatcattgatgatatcgtagagcgcctgcgtgcgcagatcggtgatgataaagttatccttgctctgtctggtggagtcgattcttcagtaacagcgctgctgctgaaccgcgcaattggcaaacgtctgacctgcgtatttgtagacaatggcctgcttcgtctgaatgaagcggatcaggtgatggagatgttcgagggtaaattcgacctgaacatcattcatgttaaagctgaagatcgcttcctttccgcattggcgggaattaatgatcctgaagctaaacgtaaaaccatcggtcacgtatttattgatgtgtttgacgaagaagcttcaaaacaaactcaggttaaatggctggcacagggcacgatttacccggatgttatcgaatcagcagcatcagcgacaggtaacgcacatgtaatcaaatctcaccacaacgtgggtggtttacctgaagatatggctctgggtctggttgagcctctgaaagagctgttcaaagacgaagttcgccgcatcggtctggaactgggtctgccatatgacatgctgtaccgccacccattcccgggcccgggtcttggtgtacgtgtactgggtgaagtgaagaaagaatactgtgacttgctgcgtcgtgctgatgccatctttattgaagagttgcataaagccgatctgtataacaaagtcagtcaggcatttaccgtattcctgccagttcgttctgtcggcgtaatgggtgatggacgtaaatatgactgggttgtctccctgcgtgcagtagaaaccatcgactttatgaccgcgcactgggcacacctgccatatgatttccttggccgtgtatcaaaccgtatcatcaatgaagtcagtgggatatcgcgcgtagtctatgacataagcggtaaaccaccagcgacaattgagtgggaatgatataaagccttcccaagcctcaccaaatcatcatgatttttaaattaaggccctgatttcagggtcttttcatcccaaaaccttaccgtatcagcatgcgattattgacggtatcagaaagataaaaaggatgcgtctatgctgacagacactaagttaaaaaacctcaaacctaccgataaattatacaatatttctgaccgtgacggactctagccttagactacccctatagtacaggacgggattgcctttggcggtgtatta

SEQ ID NO: 750 - DNA, 2900 bp, Xenorhabdus sp.; identical to SEQ ID NO: 749
  CDS (2)..(973)

SEQ ID NO: 751 - DNA, 2036 bp, Xenorhabdus sp.
  CDS (1625)..(1783)
tgtgctctaaagtgtcagttttaatgataatcataaaatgagcatctgaacgaaaaggccattgactcaatccattatgcccgtataatccacgtcagcatcaacgcattgcattaatgatgtttcttatttcacatctcaatgcgcccttagctcagctggatagagcaacggccttctaagccgtaggtcacaggttcgaatcctgtagggcgtaccatttaaaatcaatatgttacgccaatctcagacccgcttgatttttcccttgtgtcgtatttgtgtcgttatcttcaaaaagcacatcaattttgcaagcatgttcacttaaatggttgggtgctaaatgtgcatatcttctaaccatttcgatagattcccacccccccatttcttgaagtgctgaaagtggaacccctgattgtatcaaccagcttgcccatgtgtggcgtaggtcgtgaaaacggaagtcttctattcctgcttttttaaggccgatattccaggcactattatcatcaaccctcatttttctcactgctggggttaatgttccgtctggtcggtgcttggctttagtatgcacaaagacccaccttgagtgcttgcctatctgatcccgtaacacccggcatgcggtatcattcagagctacacctatcgctttcccggctttggcgttctctggatttatccatgccacttttctttgcatatcgacctgctgccactccagatcgatgatgttagaacgccgaagtcctgttgctaacgcaaagataacaatcggcttgatactttcaggcatacactcaatgagccttgccgcttcatcttttgtcagccatcttatgcgcttacttactggcttcttcgttttgataacaggcgctgacttaatccagttccattcattagcggctgcccttaacaaagatctgatgaaggataggtgctggctttttgttgcctgactcacaggaatggcctcatacaccggaggcttttccccttttttcagcgctgcatctcttttactctcccagatttgataatgtttacgattcttcatatttgaaactgcatcataaatttcatctgccgttattgttgaaacatcccggcctgaaaagtgttgtaggaaaaactcaatcttcgttttgtcgtcatcaagtgaccttttatgctctttttccctaagccagcgaatgcaacactcttcaaatgtacgagttggcagatcatcaagttggtcaaccctccaagcctcagctcttaattggtcatacaactcctgcgcttgctttttgtccctcgtgccaagagatttcctaactctctttcctgacggtgtaaagaaatgacagtgccatattccgtttctttgggtgattgacatgatttacctccataacgatcacccttgctcgctccatgagtttgcatcgggcttttaatataagcaagaacagcggacttagtcgttttatatcctttgccgatccgtttaccggttgagccggacggaagtaaagttgcccgtgcccatgccgttaccgctgagtgggaagccgggaacatctttttgcctcataaagacatcgcgccgtggatcaccgaaacggtggatgaaattactaccttccccgtaggggcgcatgatgatgttgtggatgccatgactcaggctctgcgcgatttataccagaagaaacggggtttcagtatgaacccggacatcgttaatcaggccctgcgcccttcacgcactatgcgtcggtaaatatcactatggcaagaaaacaaaaacgtcaggcgataaagcctcggcggggattggcattgtctcaaaccctggcagaaaagctggagtcagggcagtacatcctcacttatgaagaagtcaaaagtatttatggtccggcaaaaacactaggcgcacccaaagcagtggcgctggcaatggacagcgctctcagtgcctcaggcgcgtacacgcttattcaacatgcctgggagcacggctttagagcaca

SEQ ID NO: 752 - DNA, 2036 bp, Xenorhabdus sp.; identical to SEQ ID NO: 751
  CDS (1951)..(2034)

SEQ ID NO: 753 - DNA, 1670 bp, Xenorhabdus sp.
  CDS (304)..(597)
gatggtaatcatggtcagacatttgaaggagagtatgagcgcaggcaggatgatgcttcgaataagattactcgcgatgatcaaaaaaatcataatgagtatgataatgaccacaataagaaataacttcagctcatactgtctgagattgtcacgggtaataaaaaagtgaaatattttttgctatccccccttgaagtactgcctataagccccaacttgtagcttcatggtactggttctgttgggttctggtatcaatcctcttacctgatatggactttatttataggagatctatcaatgaaaattcgtccattacacgaccgtgttatcgtcaaacgtcaagaagttgaatctaaatctgctggtggaatcgttctgaccggttcagctgcgggcaaatctacccgtggtgaagttcttgctgttggccatggtcgcatcctggaaagcggtgatgttaaagctctggatgttaaagtgggtgatatcgttatttttaatgaaggttacggtgttaaagcagagaagatcgataacgaagaagtgttgatcatgtctgaaagcgatattctggcaattgttgaagcgtaattgaaaatcttacgctcagatcttcttaactgaacgaatttaaaggaaagatacaatggcagctaaagacgtaaaatttggtaatgatgctcgcagcaaaatgttgcgtggtgtgaatgtactggctgatgcagttaaagtgactctgggtcctaaaggccgtaatgttgttttggataaatcttttggtgcacctgtaattactaaagatggtgtttctgtagcacgtgaaatcgaattagaagataaattcgaaaacatgggtgcacagatggttaaagaagttgcttctaaagctaacgatgcggctggtgatggtacaactactgcaaccgttctggcccaagcaatcgtcaccgaaggtctgaaagcagttgctgctggcatgaacccaatggatctgaaacgtggtattgataaagcagttgtttccgctgttgaagaactgaaaaaactgtccgtaccttgctctgattccactgcaattgcacaggttggtacaatctctgcaaactccgacgaaactgttggtaaactgatcgcagaagcgatggataaagtcggtaaagaaggtgtaatcactgttgaagaaggtactggtctggaagacgaactggatgttgttgaaggtatgcagttcgaccgtggttacctgtctccttatttcatcaacaaaccagaatcaggttctgttgaactggaaaacccatacatcctgttggtagacaaaaaagtttccaacatccgtgaactgttgccagttctggaaggtgtagctaaagcaagcaaacctctgctcatcatcgctgaagatgttgaaggcgaagcgctggctactctggttgtgaacaacatgcgtggtatcgtgaaagttgctgcggttaaacaccaggtttcggtgatcgccgtaaagcaatgctgcaggatattgctatcctgactaacggtactgttatttctgaagagattggtctggagctggaaaaagcaactctggaagatctgggtcaggcaaaacgtgttgttatcaacaaagacaccactactatcattgatggcgtaagcgaagcaag

SEQ ID NO: 754 - DNA, 1670 bp, Xenorhabdus sp.; identical to SEQ ID NO: 753
  CDS (653)..(1537)

SEQ ID NO: 755 - DNA, 1670 bp, Xenorhabdus sp.; identical to SEQ ID NO: 753
  CDS (1513)..(1668)

SEQ ID NO: 756 - DNA, 1791 bp, Xenorhabdus sp.
  CDS (1)..(375)
  unsure (1)..(1791): unsure at all n locations
tctaaagagccgtggtcaattaacgcctttgccgcaaaagtcggtgaaattttatttgatgagcatgattatattgctgcgacacatcagtggctaaaatcacagcaatattatttgtggaatcagctttcagccttttctgaactgacagtctggccgccatcagccaattttttattttttcgttgtgaacaacccgtgattgatctgtggcatgccttactgaaacatcagttgctaatccgtcattgtaaaaattatgccggactagataaccgttactatcgaatagctgtacgcagtgagtgggaaaatcagcgcttaattacagccatgcatcaagtcttttcttcacggagcgctttaataaggtgataagtgataaagtctgcttccaatattattatttttctcatatgtatctcttcagaataaaaatgctatccggtaattcgcaagcgttatttatacgtcaatcaagtaatatttgactttatcgtcctggtttctaaaaacaaaacatttgcaaaaattttctggtgtatgaataatttgaacacttttttgttatggacgataaactatgaaaacatttttaaaagttggtgtattaagtagcgcagcattactccttgcagcttgtgatgccttagatcctgaaagcaataaaaacaaattctattatagcaacccaacaaacagtactatcacatttaaagttgacgataaggattacactattgaaccggggatcaacggaagtgtaaaactgtcaccgggagtacattatcttgataataataaaggtaataaatctacctttatagtactggagcacaataatggcggcatcctcaatccgaacaattatatgtattacaccttatcagaagtatatgcgttaaaggggcaggcagaccgtttcatgcctgcagaatatgaggttattattaacggacatgagcttgaaatgccattaagaagtagtaacgcagcagttattgatggcaatatctttaactgccaatttcctttaggcaaaccattcccggaagaaattaatctttatgataaaaaatcgcaggggaaaataacctcaaaatgttttgataaaccagagttattgcaatatttttcaacagaatatgatgaaaagttcactcctgagaccaaagctgatgaaaacaacgatactgtgaatacagtatttgattacactgtacctacaccgcaatttaaacacgctgatgtgcagaaagaagcagaaaaattggtttcattattgaatcagattaaatcttccgacaatccgaatatttacgataaactctgggaagaaattaaccaagtaaccattgatttatctacaatacatggcaaatattctgcaaatgatactgtagaagaaaataaatattatggtgagttttttaaccaaatcaatcagctacagcgatttggactattcattagatagttcaagccattaaaattaagggccagcgtccctgctgcaagtggcagggaattaatattgtattcccatgattttctgtaatccataaaataactcattatggttaattatcgaaataacccccattgttttacgaagataaaaaacaataaatcaaatttatatcatatggttacattaattgatgggctctgaacacccttcattttgtcatcacaactaaagagcttattaaattctttcttgactaaagataaataactntctctaattaaatagtaaataggaaaaatagttaataatcggtaaaaggg

SEQ ID NO: 757 - DNA, 1791 bp, Xenorhabdus sp.; identical to SEQ ID NO: 756
  CDS (926)..(1477)
  unsure (1)..(1791): unsure at all n locations

SEQ ID NO: 758 - DNA, 548 bp, Xenorhabdus sp.
  CDS (53)..(547)
gtgctctaaagtctcgaccgtatcggagacgtgcaaacgctgagggagaatggcaatgaaacggcttcttgttaccggtgcggcgggccagcttggccgcgtcatgcgtgaacgtctggcaccgatggcggagatattgcgtcttgccgatctctccccgctcgatgcggccggtccgaacgaggaatgcgtgcaatgcgaccttgccgatgcggatgccgtgaatgccatggttgccggttgcgacggcatcgttcatctgggtggcatatcggtggagaagcccttcgagcagattcttcagggcaatatcatcgggctttataatctctacgaggccgcccgcgcccacggccagccgcggatcgtctttgccagctccaaccatacgatcggttattatccccagaccgagcggctcggccccgatgttccggtgcgaccggacgggctttacggcgtctccaaatgtttcggcgagaacctcgcccgcatgtatttcgataaattcggacaggagacggcgctggtgcgcatcggcttctgca

SEQ ID NO: 759 - DNA, 548 bp, Xenorhabdus sp.
  CDS (444)..(548)
tgcagaagccgatgcgcaccagcgccgtctcctgtccgaatttatcgaaatacatgcgggcgaggttctcgccgaaacatttggagacgccgtaaagcccgtccggtcgcaccggaacatcggggccgagccgctcggtctggggataataaccgatcgtatggttggagctggcaaagacgatccgcggctggccgtgggcgcgggcggcctcgtagagattataaagcccgatgatattgccctgaagaatctgctcgaagggcttctccaccgatatgccacccagatgaacgatgccgtcgcaaccggcaaccatggcattcacggcatccgcatcggcaaggtcgcattgcacgcattcctcgttcggaccggccgcatcgagcggggagagatcggcaagacgcaatatctccgccatcggtgccagacgttcacgcatgacgcggccaagctggcccgccgcaccggtaacaagaagccgtttcattgccattctccctcagcgtttgcacgtctccgatacggtcgagactttagagcac

SEQ ID NO: 760 - DNA, 1702 bp, Xenorhabdus sp.
  CDS (875)..(1702)
gtgctctaaagaacgctcccgcattaatgcaattagcccgcagggacgtttcctgatattcctgcgctaaaacctgcatcagaccttctgcggcgaatttggaaacagagtaaactccccagccacttctgccttcacgccctacactggatctggtaaatactaaagaaccccggggggatttcaatagtagtgggatcagtacctgagtcagcataaatgtggcattgacattcacctgcatcacatcatgccaaagttggacgggctgttctgtgatgggcgcgacaaccaccaataaacctgcgttatgtaaacgccatacaaaagggggtaatgccgtgccagctaatctggatgagtcggtcattcagtgctccgtgacagttaaaagatccatcgtataaatagccgcaggtaagccgccttcattttcgatttgctgtttaaccacttccagttttgccgttgtgcgtccaagcaaaataacttgtgcaccatgccgggcataagttagtgcagcttcacggccaataccatcaccggcaccagtgactaaaatgattttttgttgcagcaggtcattctttggttggtaatctaacatctgattctcttctataaacagtttttaaatctggcgggtagataggtgtagcacatcacgtcttatcagaacaaaacttcgtgttttcgtcaaattgacaaaagtttatctgttttcttttttgtgaaaatagataaattacattaattattttttctgaagtagatttgacggaacagaagcaagataaactgttagagcactgtttcaggtttttggttaaaatgaaatatatattgttcatcattaatgaagaaaggtggatctgtggagtatgtttctctatacggactgttcttggcaaaagtagtgactatcgtcctggcagtcgtcgttctggtagtattttgtattggagttggtgtgcgtaagacaatgcacaaaggcgaattgcgcctgaccaatcttggtgaaacttataaggaaaaacaacgtcagatgcagcaggctcgaatgagtgaggcagagctgaaaatctggcagaaggagcagaaaaaacagcaaaaaagtgaggccaagcagaaaaaggctgaggcaaaaagcggcctgaagagcgaaccgaaaagcagcctttatgtgcttgacttcaagggcagtatggatgcccatgaagtcgattctctgcgtgaagagatcagcgcggttctggctgtcgctgataaaaatgatgaagttctggtacgtctggaaagcccaggtggtgtggtgcatggttacgggcttgctgcatctcagctggctcgtcttaaaaacaaaggtatcagactgacaatcgcggtagataaagtggcagcaagtggtggttatatgatggcatgtgtggctgatcgtattattgctgcgccttttgccatcattggctcaattggtgtggtcgcgcaattaccaaacatccatcggttactgaagaaaaatgatgttgatatcgaattgcatacagcaggcgaatataaacgtactctgaccatgttgggagaaaataccgaacagggacggcagaaattccgggaagaattgaatgaaacacataacttatttaaatcgttcattcatgatcatcgtcctgcactggaagtcgataaagtcgcgacaagt

SEQ ID NO: 761 - DNA, 2861 bp, Xenorhabdus sp.
  CDS (181)..(2778)
tttatgtataaaatatctcatatatttcaaagggtttggtgtttgagcgaaagtctgggataaaaattagttgatatcttgcgaatctatcgcaatataaaaagagatctattttatataccgcaacataacttcgtaattttcgccatctgaaaagaagataattaggtaaaggtaactatgggtaaagctcttgttatagtggagtccccggcaaaagccaaaacaatcaataaatatctgggtaatgactacgttgtgaaatccagcgtgggtcatatccgtgatttgccgaccagtggtacaacgagtcaaaagagttcgagctcatctaccgataagaataaaaagaaaactaaaaaagatgagaaaacagcgctggttaaccgaatgggagttgacccttaccatggctgggaagcgaattatcagatcttgcccggcaaagaaaaagtggtagcagagctgaaaacactggctgaaaaagcacagcatatttatctggcaacggaccttgatcgcgaaggggaagccattgcctggcatttgcgggaagtcattggcggagacgatacacgtttcagccgtgttgtttttaatgaaattaccaaaaatgcgattactcaggcttttgataagccgggtgagctgaatcttgaccgtgttaatgcacaacaggcgcgccgttttatggatcgcgtggttggttacatggtttcaccgttattgtggaaaaaggttgccagagggttgtcagctggccgtgttcaatccgtagctgtccgtcttgttgttgatcgtgaacgggaaattaaagccttcgttccggaagaatactggcagatatatgcggatctcatggctaaagggggcgttgagctccatatggaagttacccataaagagggtaaaccatttaagccagttaacgctcaacagactcaggccgccgtctctttacttgaaaaagccagttataagatcactgaccgtgaagatcgtccaacgtcaagtaagccgagtgcgccgtttattacttctacgctgcaacaggctgccagtacccggttaggctttggcgtaaagaaaaccatgatgatggctcagaaattatatgaagcaggccacattacttatatgcgtactgattctaccaatctgagtcaggatgctctgagcatggttcgcggttacatcagtgataactttggtgataaatatctgcctaaagaagtcaatatttacagcagcaaagagaattcgcaggaagcccatgaagctatccggccgtctaatgttgagattatggctgaagcactgaaagatatggaagctgatgcccagaaattgtatcagcttatctggcgccagtttattgcctgtcagatgactccggcaaaatacgattcaaccacactgactgttcaggccggcgatttcgaattgcgggcaaaaggccgtactttacgttttgatggctggacaaaagttatgcctgccttacgtaaaggggatgatgaccgtactttgcctatcgtggaagtagggacgggccttgatttacaaaaattgctcccaagccagcattttactaagccaccggcgcgctttagtgaggcgtcactggttaaggagctggaaaaacggggtattggccgcccatctacttatgcttcaatcatttccaccattcaggatcgtggttatgtgcgggttgaaaatcgccgcttctacgcggaaaaaatgggtgaaattgtcaacgatcgtttagaagaaaactttaacgagctgatgagttatgattttacggcaagaatggaagatcagctcgatcacgttgcaaacaatgaagcaaactggaaaggcgtgttggatgagtttttcaccaatttcagtgagcaactggatatcgccagcaaagatccggaagaaggcggaatgcgtccgaatccgatggtcattacttctattgaatgcccgacctgtagtcgcccgatggggatccgtaccgcaacgacaggtgtatttttaggttgttcaggttatgcattgtctccaaaagagcgttgcaagcaaaccattaacctgattccggaaaatgaaatactgaacattcttgaaggcgatgatgcggaaacgaatgcgctacgtgcccgccgtcgctgctctaaatgtggcacagcaatggacagctatttgattgatacccagcgtaaattgcatgtctgcggtaataatcctgcttgtgatggttacgaagtagagaacggcgaattccgtatcaaaggctatgacggtcctatcgttgaatgtgataaatgtggctcggaaatgcacctgaaaatggggcgtttcggcaaatatatgggatgtacaaacgaagggtgcaaaaatacccgcaagatcttgcgtagtggagaagttgcaccaccgaaggaagatccggtgccattacctgagttgccgtgcgaaaagtcagatgcttattttgttctgcgtgatggggctgccggtgtatttttggctgccagcacattcccgaaatcacgggaaacacgtgcacctttagttgaagagctcgctcagtttaaagaccgtttacctgagaaattgcgttatctggcggaagcaccgactgaagaccctgaagggaataaaacgattgtgcgttttagccgtaagacaaaacaacaatatgtctcttcagagaaaaatggtaaagcgacgggctggaccgcattttttgttgatggtacatggacggtcaaagaaaagtgatggttattataatgggttgctagccaatccattgaaatataatcaaacagaatttttattttttgattaaaatatgacttttt

SEQ ID NO: 762 - DNA, 2488 bp, Xenorhabdus sp.
  CDS (130)..(2487)
aattttagtcaataaacaatcccaactcactgcctcccagcagtgagtttttttctttatacatgtttaaagatttttgagtggttattcatcaaataatcacccgaaagaattcactacagccattatatgaaaaacggacttaccgctatgaaaaaaaataattccttaaaacctattgtcttgtggataacattattgtgtgggcttttacctgctactgtcgccatcgcggataacgggtatcaggaaaaggggcagttaaattcaccgaatagctggttatcagaagagtttaaacgccagtggggattatcggccattggtgcgcattatgcctatgcccgtggttataccgggaaagggatcactgtcggggtgctggatcaagccgtaacgcctcatgctgaattcgccaacaaactgagaagattaagcccggaagatcaggtcaattttgacgagctttttaatggacttttaattctgttcggcaatcatggtaaccatgtcgccggtactattgcggcaaatcgggacggcgaagagatgcatggagtcgcatttgatgccgacttggttactgcaaaatttttaggcagctatcagaatcgcacagaagcgatgatccagagtaacgcccggattattaacaatagttggggagtccctcctgaacgtaatcgggatgaaaacggtagaccgataaggcgacccgatggtacgtgggattatgttcaagttactatggacgaagtcagaaaacatggagagtcaattcgaaatacactggatcagttaagccgttcaccaatccctgaaacattcgacgataactccgctacagcaggtttattacgtgcagcacgccatggaaaactcgtggtttttgcagcaggaaattccaataactataacattacctggatagatgcgggtatgccgcttttctttcctgacgttttgaaaaactatcttagtgtcgccaacctgactcaggaaaaggggctggctctgtcatcaaccagctgtggatataccgccagctattgcttatctgcacccggcacagatatttacagtagtaccggtaaatttatttcaaaaacaggtactcacataaatgaaaattacctgaatgaagggaattttgatattgattcttcttatggtctcaagacgggtacatctatggcagcaccgcacgttgccggagccgcggctgtcctgatgcaacgctttccttatatgacgacagctcagatttctgatgtcctcaaaactacagcgacagatttgggtgaaaaaggtatcgacaaactctatggctggggcatgcttaacctgaaagatgccattgaaggcccgaaaatgtttattacaaaggacgatattcccgctgaattttacattaaggattcctataccgatacgcagtttgttgccaatatcgtcggcatgggggaaaaagtagaagcaggcacaacggtagaacgcgtctgcgacagcattgaatgtacctatgactactggagtaatgatatttccggtcacggcgggttaaccaaaaccggtaaagggatgctggaactgaccggtaaaaatagtacctatcaaggcccgacaatcgttgaccagggtcagttacagatcagtggctgcatcacgtctgaggtgacagtacataagggtgccacattcagcggaaacggtacggttggctctctcatcgctaagagcggttcttacattgcccccggtaatgtgggtcccatgaatactgaattaatcggaacactgaaagttaacaacgatgtgacttttgaagcaggctcaaattacctggttgaagtcgccagaaataccgctgggttgagtgaccgcatttatgctgacggtttagccaagttaaacggtggtaaggttgaagttaagttagaaaacagcagcaacctgctttcaaaacccgaagtccgcagcttgctgggtcagcaatacaatatcctacaggcccacaaaggtattaatggtcagtttactgccgcttcacctgactacctgttcattgggactcaactgagttaccagcctaatcgcgtcatgttagatatcaatcgtaacgccaccccatttgcccgcgtgacaaaaaccgccaatgagcgcgccatcgctaatgcggcggagaaattacatctgggccatccggtttatgaaagtatcctgatgtcagatacagcggcacaggcgggcaaagccttccagcaattgtcttccggccagatccacgctgatatcgcgtctgcacaaatcaatggcagccgttaccttcgtgataccctgaatacccgtttacgtcaggctgacactgggttagccagtcaggatatccaagctgaccaaaacggcgtctgggcacagatcagtagtaactggcaacggaccaacagtaacagtgaagccaacggctttagagcacatggctcgagca

SEQ ID NO: 763 - DNA, 3065 bp, Xenorhabdus sp.
  CDS (432)..(3062)
gttttccatttttcattatcatatttgatataggttttataattgtttatctgttaaaaaatattatgctttcattttgtttttgataaccaagtcaaacaataaatttgatggattttaatgatggtatgttaagatgaacatcaatcgatccttaattattaattgagtgccatgaaaaaaatacaacaaaacaatctaaaccttaaaaacataaaagtaacaacctcgctccatttaaagccgcaagaaaaatagccttataatatttgttaaagctcatattaaaaatataaggtcatttatccttctgaaaaaataattaaaacaaactcatttgatggattaatcttttatataaaaagattaataaaatatgttttaaattatttcatatacaaaggtgacatatgaagaatgccgctcaaattgtggatgaggctttaaatcaagggattactctgtttgtggctgataaccgattacaatatgaaaccagccgagataatatcccggaggaattattaaatgagtggaaatactataggcaagatttgatcgatttcctgcaacaactcaatgcaaaagaagaaacacaaacatatcaattgcaggatattcaacgaaatcgcaatgctgagcattatccactttcatttgctcagcaacgtttgtggtttatcgatcaacttactgatggcagtcctcaatacaactgccccggctatctgagattacgggaaaagctcaatgtaaatgcctttaaggcggcggtaaaaacattactcgaacgtcatgaagcattacgcacctgctttaaggttatagataacgaaccacggcaggttttggtgacttcctatgatttacctatcactcagcatgatttgacgatgctttctgaaaatgagaaagaacaccatattcaacaactcagcaaagaagaggataaccaggtttttaatcttagtgctgatctaatgttacgtattcggctaataaaacgagctgaaaatgattatgtcgttctctataccattcaccatattgcttgtgatagctggtcaatagaaatctttatctatgaacttatcacattatataaggcttactctcagggaatgaccaacccgttaccagaactaaaaatccaatatagtgattatgctcaatggcaacgaaactggctgcaaggggatattctggaaaaacaactggattactggaataaccagttatcaggtattcctccgttgcaccgttttccactggataatccacggccagcacaacagggtttcaaagggcttcttaaagagcaacatatctcaaaagatctggcacaggagatcaaagcgttatgtcaccaacatgaagtcacattatttatgtttctggagacggcttttgctgtcttactgagccgttacagtaatgaaaaagatattctggtcggaacaccacttgcaggaagaactcatcatgacattgaacctctgattggtttttttgttaactcactggtgatcagaaccgatttatctggccagcctacattcagtgaattattaaagcgaaatagccgcactattatcgatgcttatgaacatcaggatctgccatttcaaatgttggtagagaaaatcagtccgggaaggaatctaaattataaccctgtgttccaaattgcgtttacgctggaaaatacccagcgggatgggacattagtgcgggataataatattgagaccgaagaacgtctacttttgaaaacccggtttgatttagaaattcatatttatgaagaagagggtggcgggttatcccttttatgggtttatgacagtagtctgtttaacgatattactcttgaaagattgcttgccaattatgaaacgctgcttactaatattatcagcgtggtgaaaccacgtaccggctcagatctgatatataaagaaccttccgttcatgatattccactgctagctgaagctgaaatacatactttatcccaatggaatgggagacaggaatataatcagaatagtggctgttttcatgagttatttgagaaacaagctgcccgatatcctgaaaaaaccgccattgtttttggcagtgattcattgagttatcaggaactgaaccaacaggctaaccagctggcacactatctgatagcacaaaagattaaaccagaaacattagttgcactctgtattccccgttcaatacgcgcattagttgcactactgggtgtcattaaagcgggtggtgcatatgtgccgttagatcctgattatccggtatcccgtctccaatatatgctggaacacagtgaagcagaattcattctgacagaaacgagtctgatagaaaaactcccgattagtcagcagaaagttgtctgtttggataccgaggcaatacagtcacaattgcagcaaatgcctatcgacaatattactgaacgcccattctcgctgacggaaaataatctggcttacgttatttatacatccggctctaccggaaaaccgaaaggcgttatgttggagcataaaggatgggtcaatctggcactgtcacaagcgaaattatttggagttgatacgcatagccggggattacagttcgcgtcatggagctttgatgccatgatcttagaaatatctatgacactggcgtatggcgcaacactttacttaatctcagaagcccagcagcattctcctgaatgtctggacgaaatcgttgaaacacaccaaatcacccatgctgtattacctcctgctttactgccttacctgaactttaacaaatggtgttctgtttcaaccttgcttttagcgggagaagctgtacctccacaactctctgttcactggtcacagaataggaagctgtttaacgtatatggcccgacagagtgtacagccatcgtaacttcaagcttattaactgatgaaaaaattacaatcgggaaaccgttgccgaatattcaaatgcgtatccttgatccatcaggtaatcaggtgcctattggtgctgcgcgctaatta

SEQ ID NO: 764 - DNA, 1597 bp, Xenorhabdus sp.
  CDS (704)..(1591)
gaatttttttattactgactgccctgttttttatatcaataatgataaaaatgacagtcagtacccagtctgatgatgttgacagctatacacaggagagagatgcagaattacccgacgaaggtaataacggtatcgcgctgctttgggttgtattgggcctgctactcctgccgatatccacccgaatggtcattgataatgccaccgtcatcgcacggatttatggtatcagcgacttggtgattgggttaactattcttgcggtgggaacaagcctgccagaactcgccacctctattgccgcagccattaaaggtgaaaatgatatggcaatgggaaatattattggttctaatgttttcaacatgacccttgtgttaggtgtttccggcctattttcacccagcgttatttcatcctacgccttttcccgggatttttggatcatgatggcggcgagtgtactattcacgatattctgtgtgagaagaaaacatcggtttaaccggctgagtggtgcgctattattcagctgctttatcgcctattttgttgcactttttgtgatgcatggtgattaatatccggtgactaatgtatggtggctgatgtttgataagcacgatttgatgatcaatgtctggtgatcaatgttctgagtaattaccggttgtaatgggaataagtgggagtagaaatgcctaagatcgattttcagcaagcaggtaaaagagtattacatatcgaactcgaaggattggcggaattagagcaatacattaatgacgatttcagcaaagcctgcgagcttatgtttggatgtgaaggtaaagtcattgtgatggggatggggaaatccggccatatcgggcggaaaatcgcagccacatttgccagtaccggaacgccttcattctttgtccaccccggcgaagccagtcatggtgatcttggcatggtaacgccaaaagatatcgtactggctatctccaattccggcgaatcgaatgaaatcctcgcacttattccggtacttaagcggcagaaagttgctctcatttgtatgacaaataattgtaacagcaacatgggcaaagctgcggatgttcatctgtgcattaaaacgccacaggaagcctgtcctcttgggttagctcccaccaccagcacaacagcaacgcttgttatgggagatgcactggcgcttgccctgctggaagcccgcggctttaccaccaaagattttgctctttctcaccccggcggggcacttgggcgtaaactgttgttgctgaccagcgaattaatgactacaggcgatgatattccgcgcgttccccgcacagccacccttcgtgaaggcctgatagaaattacccgaaaaaaactgggcatgacggttatctgtggtgatgatatgcagatcgacggtattttcactgacggggatctacgccgcgtgtttgatatggggattgatttaaataatgccaaaatttctgacgtcatgaccaccggtgggatccgtatcaaaccgaatactctggcagttgatgccctgaatctgatgcaatcacgccatctttagagcaca

SEQ ID NO: 765 - DNA, 1597 bp, Xenorhabdus sp.; identical to SEQ ID NO: 764
  CDS (3)..(584)

SEQ ID NO: 766 - DNA, 1768 bp, Xenorhabdus sp.
  CDS (399)..(1766)
gttttgcattatgttgttatccttggatatttttactttttactgctgcgcactatttttaaagacaacctataaataaggctgatttttaccgacggcagggtaactgaaaaaatcctcattatcttaaatgaaagttaaataaatattacattcatgtgaggtgttttttgtgagatttattcaaaatgaaactttatttaactaaatcttcaaacccattgagtaagatgatttcatgatatctgtcacaatcaattcacaaagtgattccaatcagactggaaccgtctaaatttgtaccaatctcatccgaccacttagcgaatagctaagccatattgaaaacaataataatgtgtgagtcgtcaaattattcgatggagactgtaatgagcaattaccctcacttatttaccccactggatttaggctttactaccttaaagaaccgcgtcctgatgggttcgatgcatacagggcttgaagaacatcctgacggaacccgaaggctggctcaattctatgccgaacgagctgctggaggggttgcccttattgtcacagggggtatttctcccaatccacaaggcgtagtttcggcaggtgcaagtgtgctgaacagtgaagatgagttacctcaccataagttcattacagatgcagtacatcaggccggtggcaaaattgctctccagatcctgcataccgggcgttatagctatcaaaaaaaactggttgctccttctgctcttcaggctccgattaatccatttatccctaaagaaatgactgaagaggatatacaacaaaccatcagtgactttgcgcgctgtgctcaactggcgcagcaagccgggtatgatggtgttgaaatcatggggtcagaaggctatctcattaatcagtttctggttgcccgcactaaccatcggcaggatcaatggggaggcagtttcgaaaatcgcatgcgttttgccatagaaattgtcaaagctgtgcgcgctatcgtcggggaacagttcatcattatttatcgcctttccatgctggatttagtggaagaaggttccgactggcaggaaatcgagcaactggctcaggccattgaacaggctggagcctccatcatcaataccggtattggctggcatgaagcccgtatcccgacaatcgccacaatggtgcccagagccggatttagctgggtgaccaaaaaactgatggggaaagtaaaaatccctttgattacgactaaccgtatcaatgacccccatgttgcagaacagatactcagcgagggctgtgccgatatggtttctatggcgcgtccttttctcgccgatgcggaatttatgctaaaagcagaacaaaatcgggcagatgaaatcaacacctgtattggctgtaatcaggcgtgtctggacagaatatttgttggcaaactgacttcatgtctggtcaatccacgcgcctgccatgaaacagaatttattgctgaacccgtgacttctcctaaaactattgccgtagtcggagccgggccggcgggtttatccttcgctaccacagccgccagccgcgggcatcatgtcacattatttgagcgtgaaaataaaattggcgggcaatttaatattgctaagcagatcccgggtaaagaagagttccatgaaacactgcgctattttgaacgccagttggcactgaatggtgttgacgtcagacttatcacactgcaacagcagaacaacttgcttcgtttgat

SEQ ID NO: 767 - DNA, 1791 bp, Xenorhabdus sp.
  CDS (915)..(1790)
aaagttgagtgggaacctcaggttgctggtaaagcgttatcccgtcttgtgttaagtgatagccttatcctgattcataccggcaatgggatgttacaggcattgaatgaaagcgatggctctatcgcctggtctatcaatatggatacgccgccattgtctgtccgtggcgaatcagcacccgctgtggcatatggtgctgcggttgtcggtggtgataatggccgtgttagtgctgttctgctttcacaggggcaacttatatggcaacagcgtatctctcaggttactggtgcaacggaaattgatcgtctgaatgatgttgatatgacaccggtcatttctgataatgtcatttatgccattgcctataatggcaatctggttgcaatggatatgcgctctggtcagataatctggaaacgtgatcttggttccgtcaatgatatggttgtgactgacaacaatatttttgttgtagatcaggatgatcgtattttatccctgcgtaaaagtgatggggtaaccatttggtcccagaacgatttgttgcaccgtaatctgactgcaccggaaatgtataacggctatctggttgtgggtgatggagaaggttatctgcactggctgaatatggaagatggtcagtttatggctcagcataaggttgatagctcaggcttattaagccgtccggttatcgccagtgataaactgatggtgcaggcaaggaatggtaaagtttacctgtatacacgctgatatacagtaaatattttaatgcgttttatccgaacacggctcctgtaatgacaggagccgtgtcgtctttttagtatcttgcagttatgagaagaagattttgttgtgaacgaacttcaagcgcctctttttttgcgggatatcgatttacatttagtcatgaggcatcaaaaatgatacctgtcgttgcgctggttgggcgccccaatgttggaaagtctactttatttaaccgtttaacccgtaccagagatgcattggtcgcggatttccccggtttaacccgcgaccgtaaatatggacgtgcggaagttgaagggaaagaatttattatcgttgataccggtggtattgacggaacagaagagggcgtagaaacacatatggctacgcaatctttgatggcaatcgaagaagcagatattgtcctgtttatggttgatgccagatccgggctgatgcctgcggatcacgcgattgcaaagcatttgcgcagccgtgaaaagtcgacgtttttagtcgcgaataagactgacggtatcgatattgatacatctgttgctgaattttattctctgggattgggggatatacattctattgctgcttctcatggacgtggcgtaacacaattgattgagcatgcactgttgcctttctatgcagacgaggaaggtgcagagaaaattgaattaacggaagaagaagctaacgctgcttactgggctgagttagaacaggctgaacaagacgccgtcgaagaagctgagcaggaagatgatttcgatccgacaacactgccattgaagttagcaatcgtcgggcgtccaaatgtgggtaagtccacactgactaaccgtattttgggtgaagagcgtgttgttgtcttcgatatgccgggtacaactcgtgacagcatctatattccgatggagcgtgatggtcgtgaatatgtgctgattgacacagcgggagttcgtaagcgtggcaaggtgacagaaacggtagagaaattctccgttctccccc

SEQ ID NO: 768 - DNA, 1791 bp, Xenorhabdus sp.; identical to SEQ ID NO: 767
  CDS (1)..(762)

SEQ ID NO: 769 - DNA, 3066 bp, Xenorhabdus sp.
  CDS (1845)..(2801)
aaaaatcccccttcataataacatttttgaatgtacttctgttattcccaaaaaaataattaatgcattaggagttaaggaaccatcgttaatataaattaatttgataatgattaatgaggctggtattaccagcctcttattcaataaagtatcaggtcaggtagctctgtggattgtttgggtattcttcaatagtttttctcttgaaatccttttttatcattgatataggatacagttgtcgccctaaatataagtatcaatagtaaaatatttattttcatatcattgcttctacaagttcaatgtttatatattgtatttaatatgttaataaattgattccattaaactgttatattaaatatataaaaaattgttactgttatatgttaaatatccatgctttactcattcgtactttttcattggtttttcttataacaaatagaatgaggtaactatgttcgggttaactgcccttgaacttgcaaggatacaattcgcatttaccgtttcttttcatattatctttcccgctattacgataggtttagccagttttcttgctttgttagaaggcttatggctgaaaacacgtaatacagactacaaaacgctataccatttctgggcaaaaatctttggcattaattttggtatgggcgtggtttccggtttagtcatggcctatcaattcggcactaactggagttttttctctgattttgccggaagcatcactggcccgttattagtttatgaagtgcttaccgcgtttttccttgaggccgggtttcttggcgttatgctattcggctggaatcgggtgggtgaaaaactccattttttcgccacctgcatggtggcactcggtacaattatctctacattttggatactggcttccaatagctggatgcagacgccacaaggccatgaaattattgataatcagattgtccccgtagattggctggccgttatcttcaacccttcttttccttatcgtttgctgcatatgggaacagcagcatttctcgcttcagcattttttattgctgcctccgctgcctggcatttgctgaaaggccatgattcgtcagccatgaaaaaaatgctctcaatggcgatgtggctgattctgatcattgctccattacaggcatttatcggtgatttacatggcctgaataccctgaaacatcagcctgccaaagttgctgcgatggaaggccattgggaaaatcatcccggcgaagccacgccactgattatattcggtattcccgatcaggaagcagaagagactcgttatgctgtcaaaattccctaccttgccagcattatcttgacacacagcattgataaacgggttccggcattgaaagagtttccaccagaagatcgtcttaatgtttttatggtgttttggtcattccgggttatggtcggactgggattattaatgattctggcaggagtctggggattgtggctgcgctataaaaaacggttgtaccagagccgtacgtttctccgctttatgctcctgatggcaccttctggcctgattgccatactagccggatggttcaccacggaaatcggccgtcaaccgcgggttgtctacggactgatgcgtacgaaagatgcggtctctgctcatggtgaattccatatgagtatcagcctgcttatcttctttgttgtctacggcgctgatttcggtgctggttatgcttatatgatgaaacttatccgtaaagggcccaataaggagttaacaaatgggtgttgaccttgctctaatctggttcctgattatcatcttcagtaccatgatgtatatcgtgatggacggctttgatcttggtattggtatcttatatcccatggttaaggggcaggcagatcgtgatttaatgatgaattctgttgcccccgtctgggatggtaacgaaacctgtctggtattgggtggcgcaggtttatttggcgcttttcctctggcctatgcggtgattctggatgcgctagcaatcccattaactcttatgttattagggctgatattccgcggcgtagcgttcgagttccgtttcaagtcagcgccgaaacatcagccgatttgggataaggcatttattgccggttcaatcattgcgacttttatacagggtgtcgtcgtcggtgctgttattgaaggctttcctgtagaaaatcgtacctatattggcgggagtttcgactggctttcaccctttccattattttgcggttttggtctgcttatcgcttatgggctactgggatgtggctggctggtgatgaaaaccgaagggcatttgcagcaaaaaatgctcaggcttctgcgtccattaactttattaatgctgatagtcatcactatcgtcagtgtctggacaccgctttctcagccagctattgctgagcgctggtttagtctgcctaacctgtttttctttctgcctgtgccattactggtcttatggtcaggctggaaactgctggttgcgaaccaaaagagcggtcattacacgccgtttttggcagcactattactcgtattcatggggttcagcgggttagggatcagcatctggccaaatatcattcccccttttatcagctatgaagaggctgcatctccccctgagtctctgggttttatgcttgtcggtgcactatttatcatcccaataatattgacttatacctattggagttattatgtcttccgaggaaaaatcacccatgaacaaggctaccattaacacagaacattcacattctccgctatggaaacgattgggctggatgataactatttggtgttgtagtgtattaacgctttatgccgtttcgactttattccgtttcttaatgacagcggcgggaatgaaagtgaagtaattattcattttctgcctgattttattagaacataatcaatagcaatatttttatattagatatttgatttagttattcgggttctttctacaaatatttaacggcttcataattgctacataagag

SEQ ID NO: 770 - DNA, 3066 bp, Xenorhabdus sp.; identical to SEQ ID NO: 769
  CDS (467)..(1804)

SEQ ID NO: 771 - DNA, 1683 bp, Xenorhabdus sp.
  CDS (3)..(827)
gcgctgaaaatctgaaaaaccgcatccttcgtcatgtttcagcagcatttgcagaagacccgctgcgggtattacgtctggctcgctttgcagcccggtttgcacatttagatttttccatcgcaacggaaacacaggcgctgatcactgaaatgacagcgagtggtgaattgtcatccctaactcctgagcgagtctggcgggaaacggaaaaagcactcgcatcgcaatccccacaagtttattttcaggttttacgcaattgtggcgctctggctgttctttttccggaactcaatagactgtttgatgcccctctcaagtacacagatatagatatgggcgttcattctctgaacgtcctgaaaatgtctacttatctgagcatagatactgatattcggtttgcttcactgtgcactcacattgaaagtgaacagattaaacagctatgtgaacggttacgtattcctaattttgtacgggatcttgccggtatcgtggctcaatattccggttgggtacatacggctcaacaactatcgccagaaaaagtgctggcgctgttcaatgccattgatgtatggcgcaaaccgcagcgtcttgagcagttaattatctgtagtaaagccgatatctgtgcctctaccggctcgaaaacaccgctctatccctctgaaaactatttacgcggagcttttactgtggccgctcaagtcagtgttcagcaaatcattgcccgtggctttcagggagcagagattcgcacagaattagagcggcaacgccagctagccatcgccgactgggaacaaagccagcattagcgggctctacgttcaatcacgacacccacactggttgcctgtgccacagcgccgggcttgctgactttaattctgacccacggcgagtgaaactgattcagtaaaatatcagccacttcttccgccactcgttcaacgagagcaaatcgctggttttctacatgccggatcacagtttcactaacctgagaataatccagacagtgctcaacattatcactggaagctgcgcgtttattgtcccagcccatttcgatatcgaacaccagtttttgcttgatcatctgttcccagtcatatacgccaatcgtagtaataacagttaattctttaataaatacgatatccatcacgctgtttccccgttttttagttcaccggataccacttccgactaaatgtgcgtattatccattgttatagtaaagaaaacgacccttattcattggacattggagatatcttatgagtgctatcgcgcttggtatgatcatcttcgcgtatctatgtggctctatatccagcgcgatattgatctgtcgtctggcaggattacccgatccgcgccagcatggttccggtaatccgggagcaacaaatgtactgcgtatcggcggaaaaggtgccgcattggcagtactgatctgcgatgtactgaaaggcatgatccctgtctggctggcatataagctcaacattcagcccttttatttaagcattatcgctatcgcagcctgtttagggcatatttacccggttttcttccatttcaaaggcggtaaaagtgttgctactgcattcggtgccatcgctgccattggctgggatcttatggggttaattgccggaacttggc

SEQ ID NO: 772 - DNA, 1683 bp, Xenorhabdus sp.; identical to SEQ ID NO: 771
  CDS (1293)..(1682)

SEQ ID NO: 773 - DNA, 1683 bp, Xenorhabdus sp.
  CDS (504)..(860)
gccaagttccggcaattaaccccataagatcccagccaatggcagcgatggcaccgaatgcagtagcaacacttttaccgcctttgaaatggaagaaaaccgggtaaatatgccctaaacaggctgcgatagcgataatgcttaaataaaagggctgaatgttgagcttatatgccagccagacagggatcatgcctttcagtacatcgcagatcagtactgccaatgcggcaccttttccgccgatacgcagtacatttgttgctcccggattaccggaaccatgctggcgcggatcgggtaatcctgccagacgacagatcaatatcgcgctggatatagagccacatagatacgcgaagatgatcataccaagcgcgatagcactcataagatatctccaatgtccaatgaataagggtcgttttctttactataacaatggataatacgcacatttagtcggaagtggtatccggtgaactaaaaaacggggaaacagcgtgatggatatcgtatttattaaagaattaactgttattactacgattggcgtatatgactgggaacagatgatcaagcaaaaactggtgttcgatatcgaaatgggctgggacaataaacgcgcagcttccagtgataatgttgagcactgtctggattattctcaggttagtgaaactgtgatccggcatgtagaaaaccagcgatttgctctcgttgaacgagtggcggaagaagtggctgatattttactgaatcagtttcactcgccgtgggtcagaattaaagtcagcaagcccggcgctgtggcacaggcaaccagtgtgggtgtcgtgattgaacgtagagcccgctaatgctggctttgttcccagtcggcgatggctagctggcgttgccgctctaattctgtgcgaatctctgctccctgaaagccacgggcaatgatttgctgaacactgacttgagcggccacagtaaaagctccgcgtaaatagttttcagagggatagagcggtgttttcgagccggtagaggcacagatatcggctttactacagataattaactgctcaagacgctgcggtttgcgccatacatcaatggcattgaacagcgccagcactttttctggcgatagttgttgagccgtatgtacccaaccggaatattgagccacgataccggcaagatcccgtacaaaattaggaatacgtaaccgttcacatagctgtttaatctgttcactttcaatgtgagtgcacagtgaagcaaaccgaatatcagtatctatgctcagataagtagacattttcaggacgttcagagaatgaacgcccatatctatatctgtgtacttgagaggggcatcaaacagtctattgagttccggaaaaagaacagccagagcgccacaattgcgtaaaacctgaaaataaacttgtggggattgcgatgcgagtgctttttccgtttcccgccagactcgctcaggagttagggatgacaattcaccactcgctgtcatttcagtgatcagcgcctgtgtttccgttgcgatggaaaaatctaaatgtgcaaaccgggctgcaaagcgagccagacgtaatacccgcagcgggtcttctgcaaatgctgctgaaacatgacgaaggatgcggtttttcagattttcagcgc

SEQ ID NO: 774 - DNA, 690 bp, Xenorhabdus sp.
  CDS (2)..(112)
tcaggtacgcagaatgacagcccatgttggttttccaacattacgccttatccggtttagtatgggttcattacagctaggggatttgtcccccggagaatggagagagatcgattttgtttagtccacatatcaccgttgcttgcatagtacatgccaaaaatcaatttttggttgttgaagaacttattgatggcaaacctcgctggaaccagcctgcgggtcaccttgaagcagatgaaacattactggaagcggctgaacgcgaattatgggaagagacaggaattcgtgctaaaccacaggcattattgaaattacatcagtgggtcgccccggatggaactcccttcatccgttttctgtttctggttgaactagagaaaacggtggataccgatcctcaggatagtgatatccactgctgtcactggttgagcgcagaagaaattattaacagcccacaactgcgttccccattagttgctgaaagtatccgtaattatttggaaaatcaggctcaccccttatcaatactggatagctatggttcgcctttcacaaaataatttcccattaaatgaaacgcaaatcacaagagcacgaagacgtttgatgcaccttgcctgtcaacatgctaaagtaccgcgtttatttttttccgcagtgagatatgcccactttagagcg

SEQ ID NO: 775 - DNA, 690 bp, Xenorhabdus sp.; identical to SEQ ID NO: 774
  CDS (117)..(569)

SEQ ID NO: 776 - DNA, 1716 bp, Xenorhabdus sp.
  CDS (503)..(1714)
aatggcgggcaaatctatagccgctggagatacagcgaacgcagccagtggagtgccagttttgcgccttcctttttttccgatggtaataaccggtttgcttatgccattaacggaatgcaacgcatctataccgctccttacctgaaactcgatgcgactttggaagtcggcacaacacataacagcaagcaaaataccccttatttcaatcccagaaatgattttaccctgcttccggcgctggaagcggatcacatcatttatcggcattatcagaccgtctggagccagcaactcacggcaggtatcggcgagtactggcagaaagattatggcggagggctgataactaaggtcagttatgggcaacgtattaagtggaatgatgttgtggatgcaggcgtgcggctcacgctggataaacgcccttatgacggtagacgcgaaaaaaacctgcaagctgcttttgatttaacgtatcggttctaaaggattttctatgacttttaacgtaattcgctattggttaatgatttcagctttgctggttagcctgtttatttctcagctcagtgtcatggcccatgccggaaaacctgatttcgttccaccggcggaacgccctttatcgatgaacgaacgcccctggcctcataacagttttgtcgtgctggcttatcatgatgttgaagatgatggtgctgatcagcgttttatgtccgtccgtaccagtgcgctgaatgatcaatttgcctggctgcacgccaatggttatcaacctattaccgttgatcagatcctcacggctaatcaggggggaacaccactaccgcctaaagccgtactactcacttttgatgacggttacagcagtttctatcaccgggtttttcctttactgaaagcctataactggcctgctattctggctcccgtcggtatttgggttgatgctcccgcagggaagccggtaaattttggtggcctgcaagtaccgcgagaacgttttaccacctgggcacaggttgccgaaatgtcccgttccggtctggtggaaattggctcacatacttatcagcatcattatggtgctcttggtaatccacaggggaataccgaacctgccgctgctacccgaatctatgaccgcaaaacaggcaaatatgaaactgaaaaggcattccgtcagcgtatggaacaggatgtcaggacaatcacgcagcggatcatttctgctacaggtaaaaagccgcgtgtctgggtctggccttacggcattgacagtggtgtcacgctggatatagcaaagcaatacggttataaactagctctgacactcgacaccggtctggcgaatgccaaaaatctggataatgttccgcggatattgctgacaaacaacccaaccctgaaagagttcgctgaacaggtgattcaggttcagaataaattcccactgcgtattgcccatattgatctggattatgtttatgatcctgatcctgttcagcaagcaagtaatctcgacaaactggttcagcgtgttgccgacctcggtattaacacggttttcctacaggcttttgcagatcctacaggcgatggcaccgtgcgtgaactctacttccctaatcgctggttaccaatgcgagccgatttatttaaccgggtttcctggcagatacacagccggttaaatattgatgtgctact

SEQ ID NO: 777 - DNA, 1716 bp, Xenorhabdus sp.; identical to SEQ ID NO: 776
  CDS (1)..(492)

SEQ ID NO: 778 - DNA, 3287 bp, Xenorhabdus sp.; identical to SEQ ID NO: 32
  CDS (2)..(511)

SEQ ID NO: 779 - DNA, 3287 bp, Xenorhabdus sp.; identical to SEQ ID NO: 32
  CDS (1960)..(2136)

SEQ ID NO: 780 - DNA, 3287 bp, Xenorhabdus sp.
  CDS (2139)..(2696)
ttaagggtcaaatacccgtcgggacatttatgcggataaagggtatgccagccagaagcgtgaacgtgtgctgaaggagcagggctatcgtgtgcatattcagagaaaagcggcacgtaataagcccttatcacactgccaaaaaggccgaaataagaaaatagcgaaaactcgggcacgcgtagaacatatctttggctcactctctcagatgggtgaaaaaattattcggacgataggccagctgcgagccaattttgcgatgacgatgaaggcaacctgctatgatttgcaacgtttggtttatttcggaaaatcgggtattcatgctttttaatttcgagatgtgatgaaaaagtgatgcgtttgtttttttcccctgaacaagcaagaaaaagtcatacacaataaggtcagttattggtgagttcaaaattgatcttattttttgtattgagagtttttagaggttcccatatgtatatggaactacccaaccgaggctgttttaatgaatttctatgcaacactcattcttgcactagccctctctatggatgcttttgctgctgccgtaagtaaaggagcaacccttcatcgtcctcatttacgtgaagcaattcgaacagggcttatctttggccttattgaagcctgtacgcctttaatcggttggtctctgggaatttatgccagtcagtacattatggagtgggaccattgggtggcattcacactattatttgtccttggctgccggatgattagagaaagtttcagacatgaccctgacgttgtcaccaagccaacagcaccacgccgtcatagctcagtaacattaatatttaccgctattgcaaccagtctggatgcgatggcaattggtattggccttgcttttttacaagttgatatattacccacagcaatgactataggaatcatgacgatgatcatggcgactttgggaatgttaattgggcgctatattgggccattattaggcaaacgggcagagcttattggtggattcgtattgattgctattggcttcaatatattattcgaacatcttaaattatttatgtatgcctgatatttattcataaatgaattccctgctcttattgcggggaactcatctaaagaaattaaatatgctggtaaacttttaacgtgaaatcagcttcacaatgaaacaatttcttagccactaaatggtttttaacatcctcagacgctctccaggcaaaaggagtcatctgtaataaattataagcctgttcaccatcaagctgcatttcataagccagagtttcctcagccactaattcgtacccttccagttgctcggtattttcaggatgtaaatggacatcctgataaatcaactctttcagctgatacaagtgacgtgggccgggcgttacagtgaggacaatcccccctgattttaccacccgaaataactcagcagctttgcagggagcataaatccgcaaaataccatcaagggaaccatctgcaaacggtagccgatgactggatgccacacaaaaatcaacatccggataacgtttggcaccatagcggacagcaattttcgccacatccaaaccatgaactgtgatgggtcgtttcagattcaaagcctgttgtaccgcagcagtgtaatacccttctcccagccaatatccaacaacactccagcctgttcaggtaaaaagcaatcaaatagctcaataactttttgctgtaatacctgatagtaacctgcctgtaaaaatgcccttctcgcctgcatcatctcagcactatcacccggctcttttgaacgcttatgctgaaccggtaacaaattcacataaccttcttttgcacaatcaaactgatgattgttttcacaacgccattggtgatgggaaaacagtaatggtgaatgacataaaggacattgataagacataacattccgataggagtaaagaataaatcaggcattcactataccatgtttcggtttggtatgttcttataaaaccgctttatatagtggagataaaatcatattgactattttacgactaaaattcattatggatttcacaataaattaacattggttggtaatcaaaaaaatgccatttgaagatttggaaactaagcgccttttattaaagaaattggctcataccgatgcgattcacatacaacaaaagtttcctcactgggatattgtaaaatacttagataagaaagcagtcccctggccatatcccgataatggtggcgacatttttgtcaataacgtcgccatacctgcaatccaagaacaaaaagcttatatctggtcactcagaataaaagctaagcctaatgagttcattggtgtcattgggttatataacacacaagataataatcgcggtttctggctctctctcgaatatcaagggcatgggtttatgcgcgaagcctgtgaaaaggttacgagttattggtttacagaattagaccggacagtactcagagtagccaaagctaaagtcaatgataaatcaagaaatatttcattatctgaaggtatgaaggtgatcagaactgataaaaaagaatatgtgtcaggggaatatgataatgaaatatgggaactgaccagagaagagtggcttaaccggcaaatatcacagcgttaaactaagagcagttaaccctgctctctttgctgagggaattgagcctgtaaaaaaggcagcaataataagccaatcatgacagcgcacacagatatagtaataaataacccagtccagtgataattctccaaaataatcgcaaaaggataaccaccaagtgccgcaccagtataggcaaagagacccacaaatcccgttgctgctccagctgaatctttatgtgaacactccgctgctgccataccaatcaataactgtgggccaaaaacgaagaaaccgatagagaaaaatcccaacgattgaaaaactaaatctgttacaggcatcaaccataaagcagctactgacaaaaaaataccaattgaaaatattaaattgatagggcctcgattgccgccaaataacttatcagaaccccagccggcaaccaaagatcccaccagacctccgacttcaaaaagtgatacgacaaagttggcgcacactaaatcataatgatgatattctgtcagataaaggtttccccaatcgtagataactgagcgaacaatgaaaacacgcacataactacaggaaaatgaccagatatgg

SEQ ID NO: 781 - DNA, 3287 bp, Xenorhabdus sp.; identical to SEQ ID NO: 780
  CDS (485)..(1096)

SEQ ID NO: 782 - DNA, 3021 bp, Xenorhabdus sp.; identical to SEQ ID NO: 33
  CDS (67)..(369)

SEQ ID NO: 783 - DNA, 3021 bp, Xenorhabdus sp.
  CDS (539)..(793)
ttcatttgaatttatcgaagggacaaactcacgacatggtgcatgcggaaagtttggtggcgcaatcaccgcccgcggattttgtcgttgctgacaagggatacgatagtcaggcattgagaccttatattgaagaacaaggtgcaacagcggttattccctaccgaaaaaatagccgaaattcggataaaaagtgggataaggatttatatcgttatcgtcatttagtcgaaaatgcatttgccagaatcaaacattttcgtgcaatcgccacaagatacgataaattagcgagaaattacgccagcacattagcactggcatttatcattatctggttacccatgtgggtcgagtaagtgatgaaaacaaaacgtcaacacgccctagttcaatgtggaaaaagaatctgggtgtagaggttactttacagaatcaggaatggaaagtgatgctggataatatgcatcagggtaaatttgaggtgattagaagggcatggattgctgattataatagcccaatgagttttctaaatatgtttatgtcagggcaggttaaaaatactgctttatatgagaatagtgattatgatacagccattaaaaaagcgagtgagactaatgatgtattatatcagcagaaagggctggatattataactaaagattcacctgtcattcctatctattattatgtcaattcaaaaatggttaagccttacgttgggggattttatgttaccccaatgggatatgtatccactaaagatctttatattatagagcattaaagaataagaaggttattcttatcagaattcaagctgcatctggctcagttgcagctttttttactgtgctattcatcatggaaatcattaattggctttttttaaaatgttatttttttcaaatgctattattaaataatagatgtgtacgccttatttaaaaaatacgtcaatatttctaattaatacttaactaccacctactgaagtaggtgggttagcgcacttcggtgctgacgactgaaagtcgtcgaaccacgcacctcgtaaacgcgcgtaggtcaaaacattaaagtcaaagtcaccgtctaaagacggtggttttaacctgtcatatggaaaaataaaaattacattgcagcaatagaggaaaatgacatgttaaataaaattattaatagaagaatggaaatattaatttattctatgactataatattttccagtattatttcatcctatgccgccgttattccacccggtatacaactgaatgaaaagcaggaggttattcgtaataatggagcaaaacctgcatcacttgatgttgataaagctgaagataatgtttcactgaatattatcaatgatttttttgaatgattagtcgggacgaataaaaacaataaaatcaaacccaaattggctgaaagctgggaaacacaagataacaaaacgtgggtgtttcatttaagaaaaggtattatgtggtctgatggcacacctatcactgcccatgatgttgttttcagctggcggagattgattgagccagctacagtttctccttatggtagctatcttgttgatgcttttgttgtcaatgcgcaagctattcttaaaggccagaagaaagcggaagaattgggtgttaaagcgctggacgatgcgacggttgaggttaaattggagaaaccggttggttattttttgcaaatgttagcctttccgattctgtacccgattagtgaaaaagtagtgacaaaatatggtgataaatgggtaaaacctgaatattttgtctctagtgggccatttaagctatctgagtggcatgttaatgaaaaggttgttggagtcagaaatcactattattgggatgataaaaatacagtaattaataaagtcacgtatctacctataacgtcaaataaatcagagttaaatcgttatttagccggagggcttgatataacatctacgatcccgttagaagattttgcttcattaaaacgaacaataggaaggcagattcatattacaccgcttctgagtacatattattatgattttaataataaaaaatatccgttcaatgatgccagaatcagacaggctttaaatttatctttggatcgggatattattgctaatagggttgttgctcagggccagttacctgcttataccatactgccaccggggattggtgggtttaaatttaaattacctgaatatgctgcgtggacacaggaacaacgaaataaaaaagcacgggaattattagctgaagcaggttttaataagaacaacccacttaaatttaacctggtttataatacctcagagcaacataaaaaaattgcaattgctgctgcttctatgtggaaaaagaatcttggtgttattgctaaattacaagccgaagaatggaaagtcatgcttgataatgaacatcagggtaagtttgatgttgtcaggggaggatggattggggattataataatcctgtatcctttttaaatatattcagtactaaccaaagtaataacacttcattttattcaaataaagagtttgataatttggtggaaaaagcgggagaaactaaggcgtgttgacgttttgttttcatcacttactcgacccacatgggtaaccagataatgataaatgccagtgctaatgtgctggcgtaatttctcgctaatttatcgtatcttgtggcgattgcacgaaaatgtttgattctggcaaatgcattttcgactaaatgacgataacgatataaatccttatcccactttttatccgaatttcggctattttttcggtagggaataaccgctgttgcaccttgttcttcaatataagttctcaatgcctgactatcgtatcccttgtcagcaacgacaaaatccgcgggcggtgattgcgccaccaaacttccgcatgcaccatgtcgtagtttgtcctcggataatcaaaagaacggcaggccgtaact

SEQ ID NO: 784 - DNA, 3021 bp, Xenorhabdus sp.; identical to SEQ ID NO: 783
  CDS (3)..(359)

SEQ ID NO: 785 - DNA, 2616 bp, Xenorhabdus sp.; identical to SEQ ID NO: 359
  CDS (938)..(1864)

SEQ ID NO: 786 - DNA, 1541 bp, Xenorhabdus sp.
  CDS (3)..(1214)
gaaattcggtagataaagttgatactgtatttatgctgataaatacaaatccctttgattttaataccaaaccccggtatgcttatatttatggtggatgttgcgccgtaaagaatgttttgtcattgatgtcacaagtgattgtcagtttttcactcgtgtgggttctttggattatttatggttatagtctttcttttgaagcggggaacccttttttcggtgggtttaagcaagttatgctgaaagatatatccatcactgatttaagtggtagtttctatcaattaatttatgtcgtttttcagggggcatttggctgtataactgtggctttaattgttggagccttgtgtgaaagagttcgtttttctgcgttactgattttcatagtattgtggtttactgcttcttatattcctatggttcatatggtgtggggtggtggctggctggctcaggatggagctctggattttgctggtggaacagttgtgcatattaatgcagctgttgcaggtttagttggtgcttacttactagggaagcgctcagggtttggcaaggaatcctttaaaccgcataacctgcctatgacttttattggcacggcgatcctttatattggttggtttggatttaatgttggctcggctggagcggtaaatgctattgcagcattggcacttgtgaatacaatggcagcaacggcaggagccgtgttgtcatgggttttctctgaatggatattccgcaataaaccctctcttttaggtgcatgctctggctgtattgccgggcttgttgccataacccccgcagctgcgactgttggcattgggggagctctggtgattggtgtaatcgctggtatcactggtttatggggtgttgttgtattaaaacgctggttgcgtgtcgatgatgtctgtgatgtttttggtgttcatggcgtatgcggcattattggttgtttattaacgagtatttttactgcgtctactttgggcgggaccgggttttcggaaggtatgacgatgctgaagcaggttggtgtacagtcggttagtatcttggtgtgtgttatctggtcagctgtagccgcttatctctcattcaagattgctgataaggcaatcgggttacgcatcagtattgaatcagaaagagaagggttagatattactgcacatggagaaagtgcctacaattgatgtgttgctttcccactaccgttttttaaacatacagctgtctacgacgtttccagagactaattagaggattaagcctctcaccggaggccagcctctggttggttccggttagctcttctttcccttgctaccgaaacactgatgaaatccattgatatacataattttaaattgatattttatgttaccgaatttatttattgattgttacacttatagtcgtattagtcatttttattggttggttatttagtttaatgattggtttactgtgcctgagcaataattttttaagtgtaattctttaaatatcatttttttaat

SEQ ID NO: 787 - DNA, 3699 bp, Xenorhabdus sp.
  CDS (1667)..(2203)
ttttcaattagccagcatggaaataaatgagaggtgagttaaagcgatacataacgatgccatcgacaggcccaatatcattaccctgattgatggaacggatcgttccctgttcatttacccctaacaactgatcagaaggccgaaagataatacgcaaaaattgcaataagcccaataacaccgcaaaaccaatcccatcaatcacaccaaccaacaaaacagcaacaagggtaaaaatggataatatgaaagcctgacgattacgtttccggtatgcccagatatttctcaacccgagtagtgaccatgtagaaaatatcaggacaatgcccaatgacgataatgggatatatgacagaaattccgtcataaaaaacaataccagcaatatcgcgattgcagaaattatcgataccatctgcgttttgccaccgaccgcatcattgactgcggtgcggctgctggccgcgctgacggcaaacccctgtgataatgacgaagcattattggcaatacccaatgcccgtaattctgaatctgcatctacctgataaccgtttttgctggcaaaactacgcgctgttatcataaaactgacaaagctgataacagcaaggttaatagaaggtacaactaaatcacggatactaccgaactcaaactcaggcattggcacaatcggcaatccatctttcatgtggcccacaatctgaatgtcatactgatttaactcaaattgccagcttacataggtggatattatcatcgccaacagtggagcaggccaacccggacgcaggaaacgaacacttagcaggacaaataaggtcatcgctgacatgcccattgtcggccagtgagattccagtaatttatgcggtaatgcaatcaactgttcaatcagttccgaaggcaaaccagaaattccgaatactttagtaatctgccccgccataatggtaatggcgactccattgataaaaccttttaaaatggggcgagacagaaaatctgcaaatgctcccagccgaaaatggcttgccagtatgcaccaaattcctgtcattaatgtcatgataatggcaagctgccagcgaacatccgcatttccaaaagccagaggagtgactgccgcagcaataacggcacacgttgccgcatcgggaccgatgatcaactggcgtgatgtcccgaacagagcataaacaaacataggtaaaatacaggcatacagaccaataattgcacttatacccattaattccgcataagcaatggcaacaggtaaagcgactgcggtaaccgataatcctgctcgtatatcatgactaaaatattctttccgataattacaaagactctccaagcccggcatccagcgatataaccttttccccagcatagttttcctcaacatggccttacgcaacggttttcacgattcatcacctagcaatcaatgagttatatagtcaatgatcttatacaatgtagaaatacagacctgtaaaagagatacattataatgctaggtcaaatcaaagcccacaatcctccccccttccctgacaatctttttctttaaaccattttattaagatctgatacactctggcattaattcagaaacctgccatcataggtattacagtgagctaattttatgaaacaacttctagattttttaccattagtcgttttttttgtcgtctacaaaatgtatgacattttctatgcttctggcgcattgatcgctgctacgggattagctgttgttatcacctatgcagtgtatcgcaaagttgaaaaatcatctttaattacatttgcaataacagctgtcttcggcacactgactttaaccttccatagcgatttattcattaaatggaaagtaaccgtcatttatgccatttttgcactggctttgcttatcagtcagtgggtgatgaaaaagccactaatccaaaaaatgttaggtaaagaactagagttacccgatgcagtctggaacaaactgaatacagcctgggcaattttctttatcgtctgcgcattagcaaatatttatatcgctttctggctctctatggatgtctggatgaactttaaagtattcgggctaacggcattaacactggtctttaccgtattgagtgtgatatatatctaccgccatctgccccgcgaacaagaataataacaatgattttcatatggatacctgccggattattggcaggtattgttgttttcaccaaataaagcaagtttttctaatgacacaacaacaatgcttaccaaacggagaattggttctccgtacactggctatgccagctgacactaacgccaatggggatatcttcggcggctggctaatgtcccaaatggatattggcggcgccattctggcaaaagaaattgcaatgggacgcgtagtcactgtcagcgttaatggcatcagttttctaaaaccggtcgcggtaggtgacgtcgtttgctgttatgcccgttgtctgaaaacagggaattcatccattaccattcatattgaagtctgggtgaaaaaagtagcgtctgaacccgtcgggcaacgttatcgagccactgatgctgttttcacctacgtcgccgttaatgaaaataatacttctcgcccgttaccggaagggaaaagaaatttcaaactggaaagcagtaattaaaaatagctactctctgggaaaataacccataataaattaaaggagtgcattgaatgcgctcctttttgttatttagatttaaatatagttgaatcactaattataaacaacgaacttatcattcgagatttaaccggtcgtatttttaaaaatctttttcttatctttataagaaaaaaactatttattttttaaatttaactattccaaatcatgactagctgttttatttactaaacgatacatcaatttttcatcctaaaattatcatccaatttcgactcaaaatgatgtaccaacaaaatgtagtaataaaccttaataaaaaaccttgataaaaatggttttattataaatgtgttaatacgtaacaggagacgcttcagcgcctcctgttatgataagaaattacgatactgaaacaccagtcagcttaaactctatggtagtcacgtatcctgtggccggttttttttcataccgccactttctcatcgcgtttctcacttcacggtcaaaaaggtttttaggctcagccgaaagaatttcaatatttttaacccgaccattttcatcaatatcgtattttacctgtacactcccttctatacctaattgccttgccctatctgaatatacaggatctattctgctcagtgcttttggcccgctctgaacttcagatttttcactggtaacaggatcagtggattttttcccatccacattatttgtcagcaaaggttcctgatcagtaataggtttcactgcctcttctgacattttctctgtcctgatttctttaggcttagactcctttttagcaattttcttctcttcccgtttcttttctaccggttttttttcaggcttaggctcaggcagagctattttcgcaatagattcaggctctggctctggaacgggtggttcaggttcaggctcggaaatagaagcaggcatagcgggttccatttccttaggagcg

SEQ ID NO: 788 - DNA, 3699 bp, Xenorhabdus sp.; identical to SEQ ID NO: 787
  CDS (2283)..(2711)

SEQ ID NO: 789 - DNA, 3699 bp, Xenorhabdus sp.
  CDS (2295)..(3692)
cgctcctaaggaaatggaacccgctatgcctgcttctatttccgagcctgaacctgaaccacccgttccagagccagagcctgaatctattgcgaaaatagctctgcctgagcctaagcctgaaaaaaaaccggtagaaaagaaacgggaagagaagaaaattgctaaaaaggagtctaagcctaaagaaatcaggacagagaaaatgtcagaagaggcagtgaaacctattactgatcaggaacctttgctgacaaataatgtggatgggaaaaaatccactgatcctgttaccagtgaaaaatctgaagttcagagcgggccaaaagcactgagcagaatagatcctgtatattcagatagggcaaggcaattaggtatagaagggagtgtacaggtaaaatacgatattgatgaaaatggtcgggttaaaaatattgaaattctttcggctgagcctaaaaacctttttgaccgtgaagtgagaaacgcgatgagaaagtggcggtatgaaaaaaaaccggccacaggatacgtgactaccatagagtttaagctgactggtgtttcagtatcgtaatttcttatcataacaggaggcgctgaagcgtctcctgttacgtattaacacatttataataaaaccatttttatcaaggttttttattaaggtttattactacattttgttggtacatcattttgagtcgaaattggatgataattttaggatgaaaaattgatgtatcgtttagtaaataaaacagctagtcatgatttggaatagttaaatttaaaaaataaatagtttttttcttataaagataagaaaaagatttttaaaaatacgaccggttaaatctcgaatgataagttcgttgtttataattagtgattcaactatatttaaatctaaataacaaaaaggagcgcattcaatgcactcctttaatttattatgggttattttcccagagagtagctatttttaattactgctttccagtttgaaatttcttttcccttccggtaacgggcgagaagtattattttcattaacggcgacgtaggtgaaaacagcatcagtggctcgataacgttgcccgacgggttcagacgctacttttttcacccagacttcaatatgaatggtaatggatgaattccctgttttcagacaacgggcataacagcaaacgacgtcacctaccgcgaccggttttagaaaactgatgccattaacgctgacagtgactacgcgtcccattgcaatttcttttgccagaatggcgccgccaatatccatttgggacattagccagccgccgaagatatccccattggcgttagtgtcagctggcatagccagtgtacggagaaccaattctccgtttggtaagcattgttgttgtgtcattagaaaaacttgctttatttggtgaaaacaacaatacctgccaataatccggcaggtatccatatgaaaatcattgttattattcttgttcgcggggcagatggcggtagatatatatcacactcaatacggtaaagaccagtgttaatgccgttagcccgaatactttaaagttcatccagacatccatagagagccagaaagcgatataaatatttgctaatgcgcagacgataaagaaaattgcccaggctgtattcagtttgttccagactgcatcgggtaactctagttctttacctaacattttttggattagtggctttttcatcacccactgactgataagcaaagccagtgcaaaaatggcataaatgacggttactttccatttaatgaataaatcgctatggaaggttaaagtcagtgtgccgaagacagctgttattgcaaatgtaattaaagatgatttttcaactttgcgatacactgcataggtgataacaacagctaatcccgtagcagcgatcaatgcgccagaagcatagaaaatgtcatacattttgtagacgacaaaaaaaacgactaatggtaaaaaatctagaagttgtttcataaaattagctcactgtaatacctatgatggcaggtttctgaattaatgccagagtgtatcagatcttaataaaatggtttaaagaaaaagattgtcagggaaggggggaggattgtgggctttgatttgacctagcattataatgtatctcttttacaggtctgtatttctacattgtataagatcattgactatataactcattgattgctaggtgatgaatcgtgaaaaccgttgcgtaaggccatgttgaggaaaactatgctggggaaaaggttatatcgctggatgccgggcttggagagtctttgtaattatcggaaagaatattttagtcatgatatacgagcaggattatcggttaccgcagtcgctttacctgttgccattgcttatgcggaattaatgggtataagtgcaattattggtctgtatgcctgtattttacctatgtttgtttatgctctgttcgggacatcacgccagttgatcatcggtcccgatgcggcaacgtgtgccgttattgctgcggcagtcactcctctggcttttggaaatgcggatgttcgctggcagcttgccattatcatgacattaatgacaggaatttggtgcatactggcaagccattttcggctgggagcatttgcagattttctgtctcgccccattttaaaaggttttatcaatggagtcgccattaccattatggcggggcagattactaaagtattcggaatttctggtttgccttcggaactgattgaacagttgattgcattaccgcataaattactggaatctcactggccgacaatgggcatgtcagcgatgaccttatttgtcctgctaagtgttcgtttcctgcgtccgggttggcctgctccactgttggcgatgataatatccacctatgtaagctggcaatttgagttaaatcagtatgacattcagattgtgggccacatgaaagatggattgccgattgtgccaatgcctgagtttgagttcggtagtatccgtgatttagttgtaccttctattaaccttgctgttatcagctttgtcagttttatgataacagcgcgtagttttgccagcaaaaacggttatcaggtagatgcagattcagaattacgggcattgggtattgccaataatgcttcgtcattatcacaggggtttgccgtcagcgcggccagcagccgcaccgcagtcaatgatgcggtcggtggcaaaacgcagatggtatcgataatttctgcaatcgcgatattgctggtattgttttttatgacggaatttctgtcatatatcccattatcgtcattgggcattgtcctgatattttctacatggtcactactcgggttgagaaatatctgggcataccggaaacgtaatcgtcaggctttcatattatccatttttacccttgttgctgttttgttggttggtgtgattgatgggattggttttgcggtgttattgggcttattgcaatttttgcgtattatctttcggccttctgatcagttgttaggggtaaatgaacagggaacgatccgttccatcaatcagggtaatgatattgggcctgtcgatggcatcgttatgtatcgctttaactcacctctcatttatttccatgctggctaattgaaaa

SEQ ID NO: 790 - DNA, 3699 bp, Xenorhabdus sp.; identical to SEQ ID NO: 789
  CDS (2)..(580)

SEQ ID NO: 791 - DNA, 2335 bp, Xenorhabdus sp.
  CDS (2083)..(2328)
aaatctggcgcaatatgttgattgtgtggttattgttgatgttatgtcgttttcaacctgtgtcagtatagcaaacgacaataatgcttatgtttatccttattcatggaaagacgagacggctattcaatatgctagaaatttaggggcactttctgccagcttcaacaggaaatgtgctgacagtcaattcagcctttcaccagcatctcttcaggcaattcctgaaggtactaaacttgttctaccatcacctaatggctcttcaatttcattcaaagcaaaagattatggtgtgacggtttttagcggttgcttcaggaacataactgcgtgtgcaagagcttgtgaggattttaagcgtattctcgttgtcccgagcggagagcgttggcctgatgggagtatccgtttttctattgaagattatgttgctgctggtggaattattgcgtctcttggcaatcggaaattatcccctgaagcatacgctgctgttgctgtctataaacaacaacggcagcatggtttagcatcactttataactgttcatctgcacttgagctgaaagaaagaggctttgaagccgatgttaatctatgccttgagattgatgtgagtgtaaatgctaatcgtctttatgataatttttatatggctgtataagtaatagaaaatgccataatttaattccataacagaagatgtatttggtttttattcattaatttttttatcaaagcagggagagaatctagcctttatgggcattcgctccttaattcttgccatattaacgctaatatcttcctcagttacctgataatcgttccataaatggtgataaacactgacactctctggccatctgtttactacggaaaaacctcgattcaagcattcctgatgtatagcttcatatcttttcttcaaaaataacagcttatctctaaaaaaaatcacatgtccttttcctagtaggtatttttctgatgtactcaaggtcacattaccttccctcctagctatttcattgggaattcgagttaactctctatgttcggcaagcaaatgttgatcacacaattcacttggctggataagatttattctggtcataatttttaatcacaaaatcgttaaatgttattttttttcaattagatagggtttggtaggtaaaagctttctgtagccgtaggccttagacgccttactatctcaccgagagagcacctttaaaagacttgctcatgatgaagaaatgtggatttttgaagcagatctcaaaaatggctcataaggcataaaagggggctgattccgaaaaccgacgcgtaaatattgacatttcgcttaccacggaagcatcacaataccttcccctatattttttcccatgccttttatggctattaatctgaaaaaggaaaatactcgtatgtatgatattcatgttgttctcagtaatactcccggtgctcttgcgttactcggttctttacttggtaaaaatggcgttagcctggaaggtggtggcgtttttacgattggcaatgaaagccacgcacattttttagttgaagatggagagctggcccgtcaggtcctgatggctgcgggtttagatgtacgtgatgtagttaagcctttaatcagaaaactaaatcaggaacggtctggtgaactgggtgaagtagctgatgctattgcacgagccggtatcaatataattacccaatatagtgaccacaataaccgcttaattcttcttactgagaagaacgaatttgctgcaaatgtcaccattaaatgggatgtatcccaggaatgaaaaataaaagccattaaggggttccgtggtcatttctgcaataacacccgctaagcgattttcaccctgacgaaaatcacctgttttccgtcagatcctgccgctggaaaaaattgaaggcataaacctgttattttttacgtgacaaacactgtcggaatgagacactgtacgacaagctcaattttaaggtttgtcgtacatgttgattggctatatgcgagtatcaagcaatgatgaacgtcagatgctaagaattttgacagatcggggtacagaatattgcgggcgtgtcgaatatcacgactatcagctttatttggccgtcaatgatatcgaccacacaaaaacaaaggcccgctccccccaaacaaacggcatctgtgaacgtttccataagagcattttgaacgagttttaccaaatcaccttcagaaagaaactgtacatgtcactcaatgagttgcaaacggatctggatgaatggactttagagcaca

SEQ ID NO: 792 - DNA, 2335 bp, Xenorhabdus sp.; identical to SEQ ID NO: 791
  CDS (1410)..(1835)

SEQ ID NO: 793 - DNA, 3466 bp, Xenorhabdus sp.
  CDS (1566)..(3464)
cacatacgtgttgtccaaccgtctgtacacaagcctgggagacgctgctgtcggtcgtttcagcgacggtgaagtcagtgttcaaatcaatgaaaatgtacgcggtggcgatgtattcatcatccagtccacttgtgcaccaaccaacgataacctgatggaattggtcgttatggtcgatgcgctgcgtcgcgcttctgccggacgtattactgcggtaattccttactttggttatgcccgtcaggatcgtcgtgttcgttcagcgcgtgtgcctatcactgccaaagtcgttgcggactttttgtccagcgttggtgtagaccgtgttctcacggttgacctgcacgccgagcagatccaaggcttctttgatgttccggttgataatgtatttggtagcccgatccttctggaagatatgctccagaaagggctggaaaacccgattgttgtttctccagatattggtggtgttgttcgcgcccgtgctattgctaagctgctgaatgatactgacatggctattattgataagcgccgcccacgtgcgaacgtttctcaagttatgcatatcattggtgatgttgcaggccgtgactgcattctggttgatgacatgatcgacacaggtggcacgctgtgtaaagccgctgaagcactgaaagagcgcggagcgaagcgggtgtttgcttatgcaactcacccaatcttctctggtaatgctgtagaaaacatcaagaactcagtgatagatgaatttattgtctgtgacacaattcctctgtctgatgaggtcaaggcgttgaacaaagttcgtactctgacactgtctggcatgcttgctgaagcaatccgccgtatcagcaatgaggagtcaatctctgccatgtttgaacactaagatataagccagtgcagattttgagcacaaacttatacaagtgattaaataaatcatcgctgaaaaaacccgttggtgcgcctgcaccagcgggtttttctgtttatttaacaatcagatgaaataattagatattggtttaattaacgaaaggaatatttacaaccaaaaaataataattaatatcaacaagttaatctgtcttatgatttatatccccggaaaactcgccatcgacatatccgaacagaaaaacagctagtacatcagtgcataacaaatcatctggtacgtccagtcctctatatacgtaacaatactggtgcacccgtgtggttgctgctaacctgtcgccgttttgaaaactgacgataaaaataccttaaaaaaacaacaattatgttagtaaatatttttcatcgaaaaagttaaaattatctgatgagataaatttcaggctcatttggactactcagacaggaaacaccattcaatccagaaaagttgttccccatagattgacctgaccagccagatatcaatcagacatattcaacctatcagcaccttcaaacttatgaagaggcgtcgcttaggctttgccattaaaaaaagccgatgttgctgataaataaaaactatttaagtaaggataatgctaatgaaaaaggcatttttattcacaccagcactgttagcactttcaatcagcaccatttctcatgcccatgcttatgacaatctttatgtttttggcgatagtttgagtgatactggaaatactaaaggtgtagaacgtttcacaacggatggtaaaactagccagctttataatgaatatcttgctaaaaaacttgcaaatatcgaattaaaaccttccagtgaaaaaggcggcaccaactattcacaagcaggatcgacagctcttaaagaatatagtgagcgtggtcttggaactaaggaacaggtaagccagtatttggcacagcataatcaacaggctgactctaatggaggctatattcactgggtaggagggaatgacctcgcagcagcattaatcgcggggagcaaaaatccgaaggacccttctgaatcgtatgacattgtcggaaaaagtgctacagaagcatcaaggcaaatcactcaattggtgaacgctggtgctggtctggtcatcgcaccaaccgtgcctgatgtgggtactacaccaagacttcttgaaacggtaattaaaacagggttagaagaaaacaatgttgatgaaaatacaatcaatggtgctctgcaaaaaatccaccaaggggtcaacaaatatgatattcctagcggtcaagcacgtgaatttgcacttcaaacacaattgttcagcacgctagcacaagaagcgcagaagatactaaaagaaaaagcagaaaaaacagaaaaagaaaccggtaaaaaaatagatgtgccatccgctgctgatattgagaaaaaacttaaatttgaatataacaaagccagtgaaggtgcaacaaaactcaccgatgcttataacaaattagtcgatgaaaaaatcagccagagcaatggcaatatcctgcgtgccgatatcaatggtctgctaaaggaagtgatcgacaatccttatagttatggtattcaaaatacattaggttatgcctgccctcagggacagtcagccagtgaatgtgtttctaaaatagacggaaaggataatcctgaattcaataatatcagagaatttttattctcagataatttccacccaactccactagcacacaaaattatgggccaatacatagaatccatctatattgccccatcacaggttatgaccctgaatcaggtcaaccgtgctccggttaaaggtacgcgtgcttcccttgatggtcatctgcaacaactgcgcagcggtggtaatgaacaggggaaaacgggtgtattcggtggctatagtggcggccgtaataccacctttaccttaggtggcgattatcagttaacagagcgtttgttactgggtgccctgtactcgaacgataatactgagcgttccccaacctctaacttctcctatcaaagtgatgcacatgttgccactgcctatggcttgtggaatgtatttaacaaagcgtggttaagtggtgatctccactatgcggacatcaattacgacagcttaacccgtagcgtcaaactgggtcaggcaactcgcagagaagtaggctcaactaccggtagacaatggggtgcacgccttactgcaaactgggatattccagtcaccaacatcgtaaccaccagcccgattgtgcagttcagctgggataaaggtgatgttaaaggctatcgcgaatccggtcatgaaagttctgccatgcacttcagtgaccagcgttacacctctaaaatcgctacgctgggctggcgtgtagatactcagttgggccgtttcaacccatatgcgtctgtgcagtttaatcaccagttcggcgatactcagtctaaaatgcgcagtgccattaactctacccaaacatccttagagcacac

SEQ ID NO: 794 - DNA, 3466 bp, Xenorhabdus sp.; identical to SEQ ID NO: 793
  CDS (2)..(904)

SEQ ID NO: 795 - DNA, 2971 bp, Xenorhabdus sp.; identical to SEQ ID NO: 34
  CDS (29)..(1057)

SEQ ID NO: 796 - DNA, 2971 bp, Xenorhabdus sp.; identical to SEQ ID NO: 34
  CDS (1424)..(1672)

SEQ ID NO: 797 - DNA, 2971 bp, Xenorhabdus sp.; identical to SEQ ID NO: 34
  CDS (1676)..(2473)

SEQ ID NO: 798 - DNA, 737 bp, Xenorhabdus sp.
  CDS (3)..(557)
taaagatccgatacgttccacaaaaattaaatcttgaccctactcttcctttgactgttaaacgtttcatgatgcttaaaccgggggttaaatcagccgatatcacccctgttttagaacgagtcaaagctgctcatttattgcagcaacccatgcaaaaactctcaggaggagaaactcaacgagttttgctcgccagagcattactcaatcatcctcaactgctggttctcgatgaaccgacacaaggtgtggatgtgaatggtcaattagcactttatgatttaattaatcaaatcagaacagaactaaattgcgctgtccttatggtatcgcatgacctgcacttggtgatggcgaaaacagacgaggttttatgccttaatcaacacatttgctgttcaggtaccccagaagtggtatccatgcatccggaatttattgccatgtttggtcaccgcggtgccgaacaactggcagtttatcgccatcatcataatcatcatcacgatttaagagggaaaattattttgaaaaagggtggagagcctcgctaatgatcgaattactatttccgggctggctggccggagttttattggcgattgccgctgggcctcttggctcttttgttgtctggcgcagaatgtcctattttggcgatacactggcccatgcttcactgcttggtgtggcattcggcttcctgttagatgtgaatccgttttatgcggtga

SEQ ID NO: 799 - DNA, 737 bp, Xenorhabdus sp.; identical to SEQ ID NO: 798
  CDS (647)..(736)

SEQ ID NO: 800 - DNA, 3157 bp, Xenorhabdus sp.
  CDS (2)..(940)
tcgtgctctaaagttgagttgggctgtatttgctgaagatgaatggcaaatgactaatgatttcaccttaacgagcggtattcgtatggataaggatgaaaaatttggcattcattggactcctcgtttatatggtgtatggcacctaaatgatcagtggacattaaaaggcggagttgcatcgggatatcgttccccagacttgcgccaggttgcctccgattggggacagggaacaggtggaaaatcgaaaaaaatcaatggatttatggagaagacagcagttattgttggtaatcctaatctaaaaccagagaaaagtttcaatcaagaaattagtataatctggaataatcaagacaatttaaatattggtttaactgtgtttaatacagattataaagataagatcacagaactacgccgttgtactgatccaactggtggaaaagataaagaatgtactattaataacgaggcttataagtttatcagtgatcgtattaacgtagataaggctaatctacgaggtatcgagactactatgaattgggatatagtggaaagcttatcattagctgcaaactacacatataccgaatcagagcaaaaaagcggcaaagagaagggagtagctttaaacaaagtaccaaagcatatggttaatgcaactttgaattggcaagtgcttcctgcaatggaaacatggacccgtgtaaattttagaggaaagtcaaccgagtatatatatcgcggtcaaccgaaatcaggtactccagcctatacttttgttgatctaggtatggcttatagtttgacaaaaaatcttcgtctgcatggaggcgtttataacctctttgataagagtgttactcaagaaatccacggctcaaccctcgatggccgccgttaccaagtcggcgttaactatgacttctaatgaacatttaatttattattaattaaagtcattataattaacgcttaaatcaatattaagtctgctctttatcagaattatgattaagagcagacttttcatttcataccattcataattaaatagccaataatttacttttatgctacaagtttatcaaatctctatcagtggataggctagcattaccttcatgaattctttcggtaagaagcagtttatgtaggctctttagtattgtaaaaaataatgaatttttagtgtgatgggtcttgctatttctggacttgaagtgcaaaatgccgcccactaaaaataactgatgtgtaattatgcctcagttattttttttggcattgagttatttttttacaacacgaagaggccggatattttccggatcgatactgaccataagcagcgactattaaaaaggctgctgtactgaggaacgtaattatggagcaattattcgcctttgcacttgtgccaatcggcgctagctgctgcaacgatgactatggggcatggtcctcagttaattcgttatctcccaccttttctttcttttctgtttatagacagatgcgaagtctacccagtaactatcgattaagtagttgtagtaatgcccagatcgaagttatgggaggtttcgctcatgtcgcataatcctactgctactctcggtactgttcaggcaagtgccagtaatcgtgttcagctgagaagaacactgaccttatttcaggtagtcatgatgggccttgcttatatgcagccgatgactatttttgacaccttcggtattgtttccaaattgacggatgggcatgttgcaacatcttatgctattgcgttgattgctattttatttacagctttgagctatgggaaactggtaaaaagattcccgtcagcgggttctgcctacacttacgtacaaaaatcaatgaatccccatcttgggtttatggtaggttggtcatctttgttggattatctgcttatgccgatgatcaacatcctgctggcaaaaatttaccttcaggctattttccccggcattgatccgtgggttttcgtagtgggtctggcggtgttaatgaccgttttcaacttgagtggcattaatgttgttgccaatcttaacggtcttattgttgtagtacagattgctgttatggtggtgttcgtcggtttgttaatgcacggcatatataacggtgaaggtgcaggcacattatggagtgcccgaccatttacatcagaagaagcacaattaattccaatgattacaggggcaacgatactctgcttctcattccttggttttgatggcattacgtctttgtctgaagaaacgcctaatgcgggcaaggtgatccctaaagcgattttccttactgcattaatcggtggtgttatctttattgcggtatcttatttcctacagctctatttccctgatgtatcccggtttcaaaacccggatgaatctcagccagaaattatgttgtttgtcgccggggcattattccaggctattattctggtcttctcctgtgtcacggtaatggcttccggtatggctgcgcatgcaggtgtggctcgattgctctatgtgatgggacgtgatggcgtactgccagagaaagtctttgcttatgtccatccaaaatggcgcacgccttcaatcaacgttattctggtcggaattgttgcactatcaagcggatttttagacttagtcacggcaacagcactgatcaatttcggagcattggttgcatttactttcgtgaatttgtcggtaattgctcaattctatgttcgtgaacgccgtaacacgacgctgaaagatactatcaatttcctgcttctgcctctgtttggtgcaggaacagtgggtgtactgtggatgaatctggaagccagctctatggagttaggtttgatttgggggggagtaggtctgctttatatgttcttcctgacccgtagtttccgtcagcctatgccacaattcagtgagcctgtataagatacactgctatataactcttccgaaacagcacccgtcaggtgctgtttttttatggataataaattaaaaagtcacaataatagattgagcttcatcctttgctaatttcgtcaccaatatatccatcgggctctgtataaggtaagaaaaccattagaatgatctttaga

SEQ ID NO: 801 - DNA, 3157 bp, Xenorhabdus sp.; identical to SEQ ID NO: 800
  CDS (1602)..(2984)

SEQ ID NO: 802 - DNA, 3624 bp, Xenorhabdus sp.
  CDS (1475)..(1762)
gctctacagaatagccggtgatgaatcacaccgggaaactttcatcctcagacggagggttaggtgtccggggatatctgcttccaaaagtgcgcagatgtaccgcattgtaatgctctcccttgcaggctacgggagttttgatttcgccgcttcacgctgatccttacagacgacagatcataagtaacagttaaataccctatccgttggactaagcgaggtcaaatttttattcgatattaaggtaagaaaaacggtacccttcttttttgcctgatgaacatcatttctcatctgctcaccctttaatagactctgtaagctatcccgggcgatggctcaacactaaacccgataatcagccagcgatcctcttgaagacagatttaactcaaacataaaaatgccatcctaataagcgtgacaacactcgcaaaattaaactattatgatagtcatgttgcgtactttaaattattaatagattatctttatgggtattactcacacttgaaattaaatactcaaaaaaggtaaccgcaccgtactacctatttatctgaatccacacttagatatacaaatcactacagataccaacttaatcaatattaagttggtatttcccgacatcggatactaataaacaatctgtcagtaataaagtttccctgatgaacataaaacaattcatttttactgagtttattcgtcatcaataaaaataaataggttatgataaatttaatgtcactggattcgacacggcaacatcactcaaacttagtgatgtcaatccatcatcaatagtcactccatacaaatatcccttctgaaagaatagcctggtgtggcttcgctaataattttatattgtaattattttattggtataataattaatatttttagtctgtcagatatttctgcgagtaattaagcacgtatcactcaataaggtcaacataaaaatggtcaaaaagtgcatgaaattgtacattctttgcatactgtcatattttttatattaaaaaaaattgccacaaactattcttataaagcgacatatcgaaaaatattatggaaagtaacgagttaatcctgtaatgtctgaagaaaaaatctaacaacattattattttcggaaatgaaaacatcaggaataaaaagaaaatctaatatcattagtaacattgagtacatgatgcgaaaaaacggtgagaataaatcttcactggctatgcgctcgggtgttacaagaaccacgctctataaaattcttgatggccaaataaacaaagtccaacattcaactatcacccggattgccgattttttcggggtcaggtgcgatgtgatagaacattgcgatatcgaagaactggatcgtatagacagcaccctctctgctgaaggtaacaaaaacccctccgcgatcccgcttattccccagtcagatgtgttagccagtatggaggatcgtattggtcagcttgtcatgaaatacccggttatctgggcctttgaggagggaacaaatctgattggactcacggtagaaactgaaattgataaaatttttttccctggtgatacattaatcattcagcgctatgccgcgcctgtaaaaaaccagccatcgctaatctatgcacccgaaaaaggattttatctccacgatgtgtctgatggcacaaaaaaagtgtcaatcatcaacgagcaattaattggcaccatcattgaagaacgcatttcgtaagcaaaggagcattagctgtgtcaggtaatcaaaaatataaactactgggtttcagtcgcgcttccgacgcgataagagccaatctcatgatcctgtctacgggaaaaagtatcagtatcccgctaaaagaactggaaagcagccaaatttcagaggatctcaacaggaatgaactcagggaaatctatcgccggatgtatggcggtgaggatacggtaaccgcctatgacctcacggatcggcatgaacgttcctggtttgcctatctggtcattgcgctttctctggccgttatttacattttttgtaccgtgacagggataaaacccatcggcatcccccacattaatatggtgatacctgcggccatctttttttatcccctcacattcatcctcgttgacatacttaatgaattttacggccttcgtctggccagaaaagccattcttttttcgtttattaccaatatcctgtttgttctcggcctgatgatcacggcaggcatgccgggccttaaagaatgggggttagcagacgcttatactgagattgtccagagtattacggctgtccttgtcgcctcttcagtggcttatattgtctcagagaatgtcaattcatggctgttatgtaaaatcaaagaactgaccaattcccgttatctttttattcgtatcatcaccagcacaaccatagcagccgcactggacagtgttattttttgtacgctggcattttataacacgcttgatactgacacgattaaaacaattattttttcccagtttattatcaaaatgacctacgccattgtcggtgttggacctatctatgcgacccggtccctattcagaaaatatataaactcataggagagaagcaatcatggatattcaaaaatcaatcacacatcttggaacaaaaaccgattatagacaaaattacgcgccggaattactggaaacgcttccgcgctcactggcgcgtgatgttatcaatatccatgctgattcattgccatttcagggttttgatctttggaccgcatgggagctttcctggctgaacagtaaaggaaaaccggtcgttgccatcggcgaatttaccatcccagcaaccagcccgggactgattgaatctaaatcatttaagctttatctcaacagtttcaaccagactaaatttgaaaccactgaggatgtgatccaggccatgaaaaaagacctgtctcagactgccggccaaaccgtggaagtgaaactgtatcctcatcttgatgggtacggccatgaaattgaccaattctcgggccagtcactggataatctggatatcgaaatagacgggtatgattttgatgcagccatactggcaaacgctgtctcggcggaagcggatagggtttctgaaacattacactcaaatctcttaaaatcaaactgtctggtcacaaaccagcctgactggggcagcgttgtgatccgttatgagggtgcaaaaattgatcatgaaaaactgctgcgctaccttatctcattcagaacacataacgaattccatgaacaatgcgtcgaacgcatttataacgatatcatgcagtattgcggaccagagaaattaaccgtatttgcccgttatactcgacgtggtggtttggatattaacccattcagaagtaattatgaaagtgctccactgacggcacggttaatccgccagtaagccatgctattcagagtgagacatgactgcctcactctgttcccctctgtcagaatagccatgatatcctgtctgaagagtaacacgagtcgcatcgatataccgcttatgccttgccaatattgagataatctcag

SEQ ID NO: 803 - DNA, 3624 bp, Xenorhabdus sp.; identical to SEQ ID NO: 802
  CDS (2116)..(2637)

SEQ ID NO: 804 - DNA, 3624 bp, Xenorhabdus sp.; identical to SEQ ID NO: 802
  CDS (2651)..(3487)

SEQ ID NO: 805 - DNA, 3058 bp, Xenorhabdus sp.
  CDS (699)..(1676)
aaatgaaatagcgccgcagcaatggaaatatgtaaacaaacagaaagtagtactggccaatgtatccaacgcataagagaattcttgagtagcagcatgattgtcaattttaggatagacattagtgtaaatgcaaatgactatcatattcaataaagattcaaaaacatctgtatcatgccacacatcatgttaaagcgattctgcgttttgaatgaacaagatcgaccggcgatgcttgtaagtccccatcttacgtagtgcataaatacgtgaataacggcgagactgactttccagccaacgacgacgacgttggatactttggcgaaggagacgccaccttcctacttcatttctgcttcttttcataaaataccctgataaatgttttcaaaacaaaatttttctcactataagtgagtaatgttattcttaatcgtcactgccggagatgtcaaccaattacaggtttaccttaatattcatattcagcatgtttcagcagtcgtaaataaataaattcaataaataacatcagcctgaactcaatctactcatcatatttagttgagcatgggtaatatttggattattttctgcctaatggatggtatttccttgatagtttcttaaaatttacagaaacttgcactcactacggtatcaaaatacttaaacaggattgattgccacttatgacaaccatttattctgtactttactggctggctattttcttatactggctgattatcgctggtattactatccgggtcctgatgaagcgccgaccagtgacatcagcaatgacctggttgcttattatttatattttccctttggtcggcattgttgcttatctgtcattcggtgagttacatctgggtaagcgtagagttgaacaggcaaaacaaatgcgctcttctgtggctgactggctttccgatctaaaaaaatcacaacatatttttgccaataaaaacagcgaagtcgctgagcctttgttccagctatgtgagcgtcggcagaaaatcaaaggtgtcagaggcaatcagatgcagctgataacatcttatgagcagtccctgaagtctcttatcaatgatatagaaactgccgaacatagtattgaaatggtgttttatatatggcaggcgggtggattggttgatcaggtgactgatgctttaatgagggcagcaaaacgtggtgtcaggtgtcgtatcatggtggattcagcaggaagctggcaatttttccgtagtccctaccctgatatgatgcgcaaaaccggtattgagtttgtagaatcgctgaaagtgaatatctttcgtctttttttgcgtcgcatggacttacgccagcatagaaaaattattcttattgataactatatttcatacaccggcagtatgaatatggtcgatcctcgttttttcaaacaaaatgccggtgtaagccaagggattgacatcatggtcagaatggaaggccggtcacaacgacactgggtattatttatgccttcgactgggaaatggaaacgggccagcgccaacttccgccacctcttgacactaatatcatgccctttgagcaggcatccgggcacacggcgcaggttattgcctctggccccggttttcctgatgagcttatccaacaatcactgatgacggccattttcgccgccagagaacaactcattcttaccactccctattttgttcccagtgatgatttaatgcatgcaatctgtaccgctgccatgcgaggtgttgatgtcagcattgttgtaccgagccagaacaactcattccttgttcgctgggcaagccgggcattttttaccgaattactggaagctggtgtaaaaatctatcaatttgaaggcgggctattgcatacaaaaagtgttttggtggatgggcaactcagtatggttggctctgttaatctggatatgcgcagcctatggctaaattttgaaattaccgttgtgatcgatgatgaactctttggcagtgatctaatgcttgtccaacaggattatattacccgttcagtgttacttgacagtgacgagtggcaaaagcgccctgtccggcaacgagtgcttgagcgcctgtgttattttttcagcccacttttgtgattttcggcacaaaaaaagagcaaaacataaatatctgactatttttcatagcctcgccaccactaacggggctatgattgcagtttgatagtattcaatcactaccatccatgttttaattcccttctgttatcagtttcggacactaccattatggaaaatcaaccaacatatccacattctcttcacttggatctcaataaccgaatgaccgaagacgaagcgctggaaaaagcctacgatatttttctggaacaagcggttgagaatctcgatcctgcggatagcttactgtttagcctacagttcgaagagcgcggtggcgcagagttatcagaaccctcagatatatggcttaaacatgttgattttgaaatagatcctaatttcttttcagaagtgattattggattagcggaatctgatgaagccgaaattgatgatatttttgcccgtatactaatttgccgggagaaagcgcatccgacatgtcggatattgtggaaagaatgatattaattaaatagaaacatacagcgatatctcttcccataagataatcatgtaattatttcttatagcggctgcatagtgaaatgcagccaaccaagatgataaaatttattaagtttaagaaaggagttttatcagtggggaattgtaacaaattaacaaacaccatacgtatacagccaatgaaaacaaagcgtagcagacagctctggcaattaatatccaaccaatgccgatcattactatttttataattcccatataccatttcccttttattgctttaaaagagcgcatcccacagataaccaagcacattcctatactgaaaaatacaaaatgaaaaagtgaagattcatacgttaattcatacatttattcatatca

SEQ ID NO: 806 - DNA, 3058 bp, Xenorhabdus sp.; identical to SEQ ID NO: 805
  CDS (1589)..(2158)

SEQ ID NO: 807 - DNA, 3058 bp, Xenorhabdus sp.; identical to SEQ ID NO: 805
  CDS (2339)..(2671)

SEQ ID NO: 808 - DNA, 3058 bp, Xenorhabdus sp.
  CDS (2873)..(3058)
tgatatgaataaatgtatgaattaacgtatgaatcttcactttttcattttgtatttttcagtataggaatgtgcttggttatctgtgggatgcgctcttttaaagcaataaaagggaaatggtatatgggaattataaaaatagtaatgatcggcattggttggatattaattgccagagctgtctgctacgctttgttttcattggctgtatacgtatggtgtttgttaatttgttacaattccccactgataaaactcctttcttaaacttaataaattttatcatcttggttggctgcatttcactatgcagccgctataagaaataattacatgattatcttatgggaagagatatcgctgtatgtttctatttaattaatatcattctttccacaatatccgacatgtcggatgcgctttctcccggcaaattagtatacgggcaaaaatatcatcaatttcggcttcatcagattccgctaatccaataatcacttctgaaaagaaattaggatctatttcaaaatcaacatgtttaagccatatatctgagggttctgataactctgcgccaccgcgctcttcgaactgtaggctaaacagtaagctatccgcaggatcgagattctcaaccgcttgttccagaaaaatatcgtaggctttttccagcgcttcgtcttcggtcattcggttattgagatccaagtgaagagaatgtggatatgttggttgattttccataatggtagtgtccgaaactgataacagaagggaattaaaacatggatggtagtgattgaatactatcaaactgcaatcatagccccgttagtggtggcgaggctatgaaaaatagtcagatatttatgttttgctctttttttgtgccgaaaatcacaaaagtgggctgaaaaaataacacaggcgctcaagcactcgttgccggacagggcgcttttgccactcgtcactgtcaagtaacactgaacgggtaatataatcctgttggacaagcattagatcactgccaaagagttcatcatcgatcacaacggtaatttcaaaatttagccataggctgcgcatatccagattaacagagccaaccatactgagttgcccatccaccaaaacactttttgtatgcaatagcccgccttcaaattgatagatttttacaccagcttccagtaattcggtaaaaaatgcccggcttgcccagcgaacaaggaatgagttgttctggctcggtacaacaatgctgacatcaacacctcgcatggcagcggtacagattgcatgcattaaatcatcactgggaacaaaatagggagtggtaagaatgagttgttctctggcggcgaaaatggccgtcatcagtgattgttggataagctcatcaggaaaaccggggccagaggcaataacctgcgccgtgtgcccggatgcctgctcaaagggcatgatattagtgtcaagaggtggcggaagttggcgctggcccgtttccatttcccagtcgaaggcataaataatacccagtgtcgttgtgaccggccttccattctgaccatgatgtcaatcccttggcttacaccggcattttgtttgaaaaaacgaggatcgaccatattcatactgccggtgtatgaaatatagttatcaataagaataatttttctatgctggcgtaagtccatgcgacgcaaaaaaagacgaaagatattcactttcagcgattctacaaactcaataccggttttgcgcatcatatcagggtagggactacggaaaaattgccagcttcctgctgaatccaccatgatacgacacctgacaccacgttttgctgccctcattaaagcatcagtcacctgatcaaccaatccacccgcctgccatatataaaacaccatttcaatactatgttcggcagtttctatatcattgataagagacttcagggactgctcataagatgttatcagctgcatctgattgcctctgacacctttgattttctgccgacgctcacatagctggaacaaaggctcagcgacttcgctgtttttattggcaaaaatatgttgtgatttttttagatcggaaagccagtcagccacagaagagcgcatttgttttgcctgttcaactctacgcttacccagatgtaactcaccgaatgacagataagcaacaatgccgaccaaagggaaaatataaataataagcaaccaggtcattgctgatgtcactggtcggcgcttcatcaggacccggatagtaataccagcgataatcagccagtataagaaaatagccagccagtaaagtacagaataaatggttgtcataagtggcaatcaatcctgtttaagtattttgataccgtagtgagtgcaagtttctgtaaattttaagaaactatcaaggaaataccatccattaggcagaaaataatccaaatattacccatgctcaactaaatatgatgagtagattgagttcaggctgatgttatttattgaatttatttatttacgactgctgaaacatgctgaatatgaatattaaggtaaacctgtaattggttgacatctccggcagtgacgattaagaataacattactcacttatagtgagaaaaattttgttttgaaaacatttatcagggtattttatgaaaagaagcagaaatgaagtaggaaggtggcgtctccttcgccaaagtatccaacgtcgtcgtcgttggctggaaagtcagtctcgccgttattcacgtatttatgcactacgtaagatggggacttacaagcatcgccggtcgatcttgttcattcaaaacgcagaatcgctttaacatgatgtgtggcatgatacagatgtttttgaatctttattgaatatgatagtcatttgcatttacactaatgtctatcctaaaattgacaatcatgctgctactcaagaattctcttatgcgttggatacattggccagtactactttctgtttgtttacatatttccattgctgcggcgctatttcattt

SEQ ID NO: 809 - DNA, 3211 bp, Xenorhabdus sp.
  CDS (2725)..(3210)
atggagcaaatgaagccgttgggcaaaatgaatatgcagataacccgccagcgtattgccattcatgtaactgccctgccagcttttctggattttctctgagtcttctttggtgtttgttttcttaatacattgaaaaaccgctggctgagtcgtaataaaatctgagtaatgaaactcatgcccacgtaacgtttctcccttcgcaattaaaggcgtatcgcacattgccgtggcttcgcagtaaccaaagcgtttcaggtgatcccccatccggctttcaccagaaatcagccctaccatgctatgcctcacaccatccgcatcaatcagggcatcaccgagatacatcaatcctccgcattctgcataaatgggaatacctttctggtgtgcctgacgtaattctgtatgcatggcgcagttggcaactaaagtacgggcataaatttcaggatatcctccccccagataaaccatctgacattcaggaagttggtgatcatgcagagggctgaaacgtttgattgatacaccggccttttccaataacaacaggttatccgggtaataaaagtgaaatgcttcgtcttctgccagtgccagtgttaaaccctgccctagagtaggatcaaccaaagaacttatatcgccttttggcagcgaagatagccgggttaaatccagcaacttatccaaatctatcgagtttgcaacctgctgggcaagacgggaccagcgttcagtaggctgatttcgctgttcttgtgctgggagcaaacctaaatgacgggaaggcagtgtcacttcaggcataacgggaagccgccccaaaacgggaataccgcagtaattttcaattgcctgttttaaaagctgaaaatgactatcccgattaacgcgattaatcagcacaccaccaatattcactgccggatcaaagagctgaaaccccatcactgttgcagcaatcgaggtggaaacagccttaccatccaccaccaaaattaccggacaacccagttgctttgccatcgctgcactgctgcaatagtcaggatctgtgccataaccatcatacagccccatcacgccttcaatgacggcaacatcgtaatcagctatagcttcgttaaataaaccattcaggataggtttcgggagcataaaagcatcaagattccgtgaagcaacccccgttaccgcacaatgccatccgccatccagataatcaggcccgattttgaacggttgtacccgtagttttcggtttatcaaggatcgcataatgcccaacgttaccgttgtcttaccacatccgctgcctgtacctgcgatgacaaaagcatatttctgttgcatgtgcttaccccaaaacatataaattctgatttgatattaaaatcagatttagtttttaagactttcttagttttaatcttgtattagtaataggatgttaaattcatgcattcctaatcattgacatatatcaaacaaaatgatttttaattaacccgccatataacaattaatgttccattgataattttaatgacaacctctaatgattatttatataaactccatttatctttaattaaattaacttcacgtaaaacaccttaatttaaaacgataacatctaatctgaaaaatattcattatcaaaaaatacaaaaattgatttgaatcaatttcagttgctcagcattgcagtaataattattaacatatttatatataccttttcagaatagtgagagtatcagcatgcggtgttccttaccccgcgtgtcacgcggggtaaggagtactcttcccattttgacaagctatttattgtgtatagtaaaaaacttgagataaagaaaaatataattccattatattttacatccatagaggtcatctcatgaataaaggatgtgtatggttagtcggtgcaggtcccggcgatgtgggtttaattacagtcaagggattacattgcattcaatctgcggatgtcattgttcatgatcgtctcgttaatcctgaacttattgctcaaatacccgagcactgcgaaattattaatgttggtaaagaacatgattatcaccctattccacaagaagcgattaacgaaattctggtaaaacacgctctggacggaaaacgagtcgtgcgcttgaaaggcggcgatccttatgttttcggtcgtggaggagaagaagcagaaattctggcacaacatggtattaaatttgaaattgttccggggatcagttcctcaattggcggattggcctatgcagggatcccggtcactcaccgcgattacgcatcgggttttcatattgtgaccgggcacacctcccaggaaaacaaacaacaaaactggaaaatacttgctcagctggaaggcactctgatcattttgatgggaatgacccgcctgacagatatctgtcagcaattagttcagcatggtaaacccgcgacaaccccagcggcagtggttatgtatgccagccatccgaaacaggaaagcgttatcggcacactggaaacactggcgacaaaggcagaagaaaaggaactgcatgctcctgctctgattgtgatcggtgatgtggttaatttaagtgaaatgctggccttctctccttcttatctgaatctttcttcgctttgccctgcactggaagattctattaacggagtaataccatgagtgaacatggcggcaatattatcggcattactcaacaatacggcctttcagccgatgcactcattgatttcagcgctaatattaatccactgggcgcaccggaacgcgttaaggagctgataaagaataacctgaccgatattgagaaatatccagatgtggaatatcgctatttacatcaggcaattgcgaaagcgcataaatgcgatgaggcaaaggttattgcaggcaacggtgcaacagagctgatttatgccattgtccgctatcttaatcccagactcgctttacttcttactccgggatttgccgaatatcgacgggctttgcagcaaataggaacaaagatcatcgactatccattaacagaagaaaccggatttcagcctgatttacgtctactggatatgcttgctgcgattaaacccgattgtttgtttattgctacacctaataaccccacagggttaatgccggataatcaagtgacac

SEQ ID NO: 810 - DNA, 3211 bp, Xenorhabdus sp.; identical to SEQ ID NO: 809
  CDS (1916)..(2719)

SEQ ID NO: 811 - DNA, 3211 bp, Xenorhabdus sp.
  CDS (1850)..(3211)
gtgtcacttgattatccggcattaaccctgtggggttattaggtgtagcaataaacaaacaatcgggtttaatcgcagcaagcatatccagtagacgtaaatcaggctgaaatccggtttcttctgttaatggatagtcgatgatctttgttcctatttgctgcaaagcccgtcgatattcggcaaatcccggagtaagaagtaaagcgagtctgggattaagatagcggacaatggcataaatcagctctgttgcaccgttgcctgcaataacctttgcctcatcgcatttatgcgctttcgcaattgcctgatgtaaatagcgatattccacatctggatatttctcaatatcggtcaggttattctttatcagctccttaacgcgttccggtgcgcccagtggattaatattagcgctgaaatcaatgagtgcatcggctgaaaggccgtattgttgagtaatgccgataatattgccgccatgttcactcatggtattactccgttaatagaatcttccagtgcagggcaaagcgaagaaagattcagataagaaggagagaaggccagcatttcacttaaattaaccacatcaccgatcacaatcagagcaggagcatgcagttccttttcttctgcctttgtcgccagtgtttccagtgtgccgataacgctttcctgtttcggatggctggcatacataaccactgccgctggggttgtcgcgggtttaccatgctgaactaattgctgacagatatctgtcaggcgggtcattcccatcaaaatgatcagagtgccttccagctgagcaagtattttccagttttgttgtttgttttcctgggaggtgtgcccggtcacaatatgaaaacccgatgcgtaatcgcggtgagtgaccgggatccctgcataggccaatccgccaattgaggaactgatccccggaacaatttcaaatttaataccatgttgtgccagaatttctgcttcttctcctccacgaccgaaaacataaggatcgccgcctttcaagcgcacgactcgttttccgtccagagcgtgttttaccagaatttcgttaatcgcttcttgtggaatagggtgataatcatgttctttaccaacattaataatttcgcagtgctcgggtatttgagcaataagttcaggattaacgagacgatcatgaacaatgacatccgcagattgaatgcaatgtaatcccttgactgtaattaaacccacatcgccgggacctgcaccgactaaccatacacatcctttattcatgagatgacctctatggatgtaaaatataatggaattatatttttctttatctcaagttttttactatacacaataaatagcttgtcaaaatgggaagagtactccttaccccgcgtgacacgcggggtaaggaacaccgcatgctgatactctcactattctgaaaaggtatatataaatatgttaataattattactgcaatgctgagcaactgaaattgattcaaatcaatttttgtattttttgataatgaatatttttcagattagatgttatcgttttaaattaaggtgttttacgtgaagttaatttaattaaagataaatggagtttatataaataatcattagaggttgtcattaaaattatcaatggaacattaattgttatatggcgggttaattaaaaatcattttgtttgatatatgtcaatgattaggaatgcatgaatttaacatcctattactaatacaagattaaaactaagaaagtcttaaaaactaaatctgattttaatatcaaatcagaatttatatgttttggggtaagcacatgcaacagaaatatgcttttgtcatcgcaggtacaggcagcggatgtggtaagacaacggtaacgttgggcattatgcgatccttgataaaccgaaaactacgggtacaaccgttcaaaatcgggcctgattatctggatggcggatggcattgtgcggtaacgggggttgcttcacggaatcttgatgcttttatgctcccgaaacctatcctgaatggtttatttaacgaagctatagctgattacgatgttgccgtcattgaaggcgtgatggggctgtatgatggttatggcacagatcctgactattgcagcagtgcagcgatggcaaagcaactgggttgtccggtaattttggtggtggatggtaaggctgtttccacctcgattgctgcaacagtgatggggtttcagctctttgatccggcagtgaatattggtggtgtgctgattaatcgcgttaatcgggatagtcattttcagcttttaaaacaggcaattgaaaattactgcggtattcccgttttggggcggcttcccgttatgcctgaagtgacactgccttcccgtcatttaggtttgctcccagcacaagaacagcgaaatcagcctactgaacgctggtcccgtcttgcccagcaggttgcaaactcgatagatttggataagttgctggatttaacccggctatcttcgctgccaaaaggcgatataagttctttggttgatcctactctagggcagggtttaacactggcactggcagaagacgaagcatttcacttttattacccggataacctgttgttattggaaaaggccggtgtatcaatcaaacgtttcagccctctgcatgatcaccaacttcctgaatgtcagatggtttatctggggggaggatatcctgaaatttatgcccgtactttagttgccaactgcgccatgcatacagaattacgtcaggcacaccagaaaggtattcccatttatgcagaatgcggaggattgatgtatctcggtgatgccctgattgatgcggatggtgtgaggcatagcatggtagggctgatttctggtgaaagccggatgggggatcacctgaaacgctttggttactgcgaagccacggcaatgtgcgatacgcctttaattgcgaagggagaaacgttacgtgggcatgagtttcattactcagattttattacgactcagccagcggtttttcaatgtattaagaaaacaaacaccaaagaagactcagagaaaatccagaaaagctggcagggcagttacatgaatggcaatacgctggcgggttatctgcatattcattttgcccaacggcttcatttgctccat

SEQ ID NO: 812 - DNA, 2126 bp, Xenorhabdus sp.
  CDS (3)..(644)
tttccattgttttgggcattgtggcaggagttgcactggcgatgctgcgtggtttctgggtaaacctgctggcggcggtattagggtttttccgtgctataccggttattatgctgattttctggacttacttcctgctaccggtggtgctgggaatagaaatacccgaaattacaacggttgtctgcgcactggctctgatcacctcttcttatctggctcacggtgttaaagcaggtattctggcaatcggagaaggccaatggcgagcagggttgtctttgggctttaatcgctgggaagtgttgtggcatatcgttttaccacaggctttgcgcatgatggtgccttcgtttattaaccagtggattgcattaatcaaagatacctcattggcttatattgtcggcgtggcagaactgtcatttctggcaacacaggttaataaccgcagtatggtttacccgatggaagtctttttatttgtcgcattagtgtatttcgtgatgtgtttatcactggaattgacagcgaactatgtggctcgtcgtttttctgtgaaatgtgagagaaaggggtttttcacgttttggtctaaaaaggaattaatgatggtttctaacgctaataatattaaatgttagccagatatttagcttgtttcatctgttaactctctatatccctgaaagttttttcagggagtcacagtctatcacttttacaaaataattatttgcatatgtctgaaaaacatactctatcatgagataggtgggattccgggcataaaaatattaattccaccttttcatgagcgacaagttgatgtgctgtattcggataaatacagaaaatagatccttgggagaagcgctttttttggacatcatgaatatcattatttactacttcacctgtccagatttcgccttcaccagaaagtattatgtaccattcatctccgttgctgtgattatggcacccaacttttttacctgcattgatagacgtagcataagcatttaagccttctttttttatcatatgcctgacagaaatacccactgcatcatctttgatggcgtcttcagtagaaaaactagcaaaatctatcacaattacatccttatatttaaaatgagatctttttactcttttttgattgagtattaaaacttaacatttattcatgtgtaaaaaaataaatttttttaattatcagaattatgtctcatttatattaaatgctttgctatttttacctacattggggggtgagtgttttgttcagaatgggtagaaatatatgccagtgctattggctattagatgaatgtttgattttatatttcataaatcttacttcaatattattgtatgttatggttgcagtaacgatgacgataaaatagatgcttaatgccagtaaattattgaggaaaatattcccggtagtcaagtttcgccttcctgcgatgagctgagttaactctatacccgttttttctggataataaacattattattgtgataattaatattactgccacatgaaccatataaagagagtaagatattttacctaaatgctgcatgtgtttattaaggaaaaaagaggaaataatacctctttgatatgccagggtgaaaatagtaaggcaataaataacagtgcagattatttgcttggattcatattgagaattgacaaaataaatgagaaacgccacacagagaatttctaaattatgaagaaccgggaagatatatatggagtaaattttacatctctatatgcataggtatgtgtaagcacaaacccactaagtacaaagaaaagcactacaataatataacaggtacgaaaaaaatgaagttcagtaaatgcaccaacaatatgtaaatgaccagtcacaacaattaaagcgccgattcctctgaccgcatccaaagattcaaatcgctttatcatatccatctcattaaatatgtaagttttaactatgtacaattaaaaataattatttttaaataaaattaatatgtttagtgacttcatagtatgtaaaaaggaaattaatcaccgctataaaaaagcgggcggagttatcttttatcttaa

SEQ ID NO: 813 - DNA, 2537 bp, Xenorhabdus sp.
  CDS (725)..(1045)
aatgtgctctaaagtttttcaagatgaaatgtagttgaaatcagagatctcataaaagaagagagaaagccgtactcctcgcctagaaaaaataccttgttttactcaaccgggtggactgttcaaccgccctcgataacgcaagctcaggacagactgaattccaaatataaggatgagtcggccttgtatagtagtaaccaagctgaatcgacaaagggcagtcataactattcaagtttatggggtgactaatggctaaaccgtggcgggatgtcatggcatctcaagaataccaatcgctgaatccccagcagcaagcggccgcccaagaacagtatttcaatgacgttgtcgcgccaagcgcggggaatcatgcagaagcggccaaaaaacagttctattctgcttacccaccattcgggataaacagggaagagaatgacagacagaacacgatattcgagaaagccaacatgtttgataattttgttatgggcgcggtaaaaggtgcagtggatatcgcaaacgccttgccttggtctgaaaagcccacagaggaagagcaagcgaagataaatgccatcaacagcaagatgaaagcaagggattcgactgcgcaggatacaggaagatcccgcacagcgtttcctgatggtgcagtctgcgccgttggtcatccccagccgggtaaatgcggccctgtgcgcaacggtggtgtgatatggcaaagaaacctcaatcggaactgggcggattaccgcccgaattacaaaccgacccgacagacacggttaattcaccagatatacagcctgcattacctgaagaatcagacaatgatacgcaggttgatggtcaggaaacccctgaatttgtcgtagtaaaaggccgcactgtccggcataacggcgtggattacccggaaaacacggttatctccatcttcggtggcgaggctgaacgcctgcttgagttgggcgttattatgcggctggatgacttaagagcgcagttattatccagtagttcacaggaggcctgatgccgattgactgggataaacatctgcttgcgcctttgcataagcagtttggcgagaaggtgaactggcggcctaagcagggaaaaccttacgatatcatgggcgtgtttgaccgcgcctatactcagcaggtggaatcccttgacggcgatagtggtatcaataccaccaaacccctgttaggcgtccgtgatgcggtgtttaaagtaccaccgaagcaaggggatcgggtctttatctatcgccttgagaccgaatttgtggtgaacgatgtccagccagacagccacggagggacgcatctgcaacttaaccgggtggtgaaaaaatgaatgctgctcaactacgcagtctggttgttcaggcgttgatcgggaaaacccatgcccaatcgcgcgtttattccccgcgtgactggtcaacccggagtgaggattatccctgcattctggtgcagaccccgtttgaccataagaaatcgttaggccgcaatgccccgcagtttcataccactaccaccgtcagagttaccggacgtctggaagcgtttgatgatgatttggaaggtggtgctgagcaggcagaactggcactggaagccctgcgcgagcaaatcgaacgggcggtcatcaatggctatgcattaacaaaagtggtacagcagttttccgaaatccggtcacagattgatattgatgccagtggcgaggggcatttcgctcagcttctgatggacattgatattgaatactatcagggaccagaggatttttacccgattgaggcgcattcactggatggcattgatgtgactatcgccatgccggaacacacccctgaaccccatatccgtattaatctggagtaattctatgtttgtcaaacctgttgccgggcggctggtacgctgtccggttaagggcgagcctttgcccgacgtcggcgcacacgtaccggatacgttattctggcatcgtcgcgtcagagacggtgacgttaaaatctgtcagccggtagaagaagttaaacttgccaaaaaaggcactcaggaggctgaataatggctattccgttttcccgtattcccaataatctcagaacgccgctgtttttcgtggaatttgataactcgatggcgaacagtgcgaccgcgacccagcgttcattgctcctcggtcagatgttggatgaatcctccgcaaaaccggctattccggtgcggatttcgtcagcagagcaagccgcctctcagttcgggcatggctccttgctgcatggcatgacgaccgcgtatctggcaaatgatgtcgcgacggaactgtgggtattgccgctgaaagacagtgagagccagatagcggcccgagggtcgattgaaattacctccatgccgacttattcgggggtggtttcgctgtatattgccggacagcgtgtgcagcttgcggtgatggcgaccgataaaccggcgcaggtggccgaatcgtgagcg

SEQ ID NO: 814 - DNA, 2537 bp, Xenorhabdus sp.; identical to SEQ ID NO: 813
  CDS (1150)..(1377)

SEQ ID NO: 815 - DNA, 2537 bp, Xenorhabdus sp.; identical to SEQ ID NO: 813
  CDS (1374)..(1913)

SEQ ID NO: 816 - DNA, 2537 bp, Xenorhabdus sp.; identical to SEQ ID NO: 813
  CDS (2106)..(2534)

SEQ ID NO: 817 - DNA, 3318 bp, Xenorhabdus sp.
  CDS (2010)..(3317)
gttcaggggcaagtttcaaaggaaaattaaaccgattgcaaaaagccggggggaacggtcgactaaaatcaatttggccgtagccagttacggcctgcctgttcattttgaattatccgagggacaaactcacgacatggtgcatgcggaaagtttggtggcgcaatcaccgcccgcggattttgtcgttgctgacaagggatacgatagtcaggcattgagaacttatattgaagaacaaggtgcaacagcggttattccctaccgaaaaaatagccgaaattcggataaaaagtgggataaggatttatatcgttatcgtcatttagtcgaaaatgcatttgccagaatcaaacattttcgtgcaatcgccacaagatacgataaattagcgagaaattacgccagcacattagcactggcatttatcattatctggttacccatgtgggtcgagtaagtgatgaaaacaaaacgtcaacacgccctaaagattatgggatagatcctaaaaaaattgcgaaagacttttctgaaggatatgccaacgccagtaatggcgcaacaaaactcacaagcctttataacagtataattgatgataaaatcagccaaagtaacggcaatatccttcgcgctgatatctacggcttattaaatgaagttatagataatccatttagttatggttttggtaataatctaggttattcctgtggtgtagatgtaagcgccacggaatgcaaatctggagataaagactttgatgatgttataaaaaaaatattctctgacaacttccacccatcacctctggcacacaaaattatgggccaatatatagtatccacccttatcgccccatcacaggttatgaccctgaatcaagtcaaccgtactccggttaaaggcacccgtgcttcccttgacggtcatctgcaacagctacgccataccggcaatgaacagggaaaatttggggttttcggtagctataccgataaccgtcatgattcctttacgttaggcagcgattaccaactggcggaaaactttttactgggcgctctgtactccaacaacaaatttgatcgttcctctgtttctaactttacttacgaaggcaatggacatgtggcaaccggttatgcactgtggaacctctttgataacgcatggctgagtggtgatattcactatgcccgtatcaattacgatagcctgacccgtagtatccagcttggtcaggcaaaccgaaaagaaacaggctcaactaccggtaaacaatggggtgcccgtcttaccgctaactgggatattcctgtcactgatatcgtcaccaccagcccgattgtgcagttcagctgggataaaggtgatgttaaaggttatcgcgaatccggtaataacagttctgccatgcatttcagtgaccaaaattacacctctaaagtcggaactctgggctggcgtgtagatacccagctgggtcgctttaacccatatgcgtctattcagtttaatcaccagttcggcgatacccagtacaaaatgcgcagtgcgatgaataagtccgacaaactatcgtttgttgtggatagtagcaaacagagtaaagactggcgtcaatatactataggtgcgaatgccaatctgttcggtaatatccatggttttgctttcgttacccgtaatgaaggcagctcacaggatccaaactacaatttcagtctgggtgttagctcccgcttctgatttgatgtcataaaaaataaccttaaaaaacaacaaacaaaataaagcgcaagggaaaataatctctcccttgcgcttttcttgtcccgtcacattttctctttctacatacatccgcatcacgttgattttccgtataagtaaccagaagtaatatcgtattgaaactataaaggaatataaggaatcaactcttaacccaacaatatctaggtattaagagctgagaggaaagcaatggctacattctctggagaactccaatgaaaaaagcacttttcggaatatcaactgcaacactacttttaaccagtttcatcacaaattcctatgcttatgacactacctatgtcttcggcgatagtctgagtgacggcggaaataacgggcgttatacaaccgatggaaaaaatagtgaactgtatgatgaatatgtgagccgccacattaccggtaaagacttaactccttccaataaaaacggaactaactacgctgaaggaggtgcaactgcattgccgatgccaaagcaccacgatacaacagaaaatcagctggagcgttatcttaaacaacatggaggaaaagccgatccaaatggtatctatattcattgggtcgggggtaatgacattactgctgctttactagcttataatattattttggatgattctaaaaaatcaaatgaaattgttaatgccagtgcaaatgctacatcaaaccaaatcaacactctagtgaaagccggagccgggctaatcatcgtaccaaccgttcctgatgtgggaacaacgcccaaaattatggaagcactaattgaaaaggaattagtcaccatgggcaaaactccggagcagattaaagaaatattagaaaagatccgtcaggaggttaataaacacgatattcccagcggtgaagcccgcgaaatggcgattgataaactcctcgaagaattggccaaaaagtctggaatagatgtaagtttactgaagtatgcttataacaaataccgccaaaaagcctccgagtttactgatagttataaccaacaagtagatgataaaatcagtcaaagtcatggcaatatcctgcgggctgatattaatgctctactacacgaagtcatggaaaacccctatgcctacggtattcagaatacattaggttacccttgccctcagggaatacttgctgataagtgttcttcacaagataaaaattttgataaagacaaaaaattcttattctctgatggcttccacccaaccccatatgttcatcatgtcgccggtcaatacattacctcaatctatactgcaccattccttgtggcatcactaactagtgtcaatcaactcccggttaaaggtgttcgttcattccttgatggccacttacagcagctccgcgatgccggtaatacaccgggaaaaatcggcgtatttggcggttatacacatagcggtaatgatacctttacgttgggtagtgactaccagctaacagataatctattactgggagcgctctattcttactacgaggatgaacgaactt

SEQ ID NO: 818 - DNA, 3318 bp, Xenorhabdus sp.; identical to SEQ ID NO: 817
  CDS (499)..(1755)

SEQ ID NO: 819 - DNA, 3318 bp, Xenorhabdus sp.; identical to SEQ ID NO: 817
  CDS (2)..(460)

SEQ ID NO: 820 - DNA, 3164 bp, Xenorhabdus sp.; identical to SEQ ID NO: 35
  CDS (1640)..(2026)

SEQ ID NO: 821 - DNA, 3164 bp, Xenorhabdus sp.; identical to SEQ ID NO: 35
  CDS (2230)..(2964)

SEQ ID NO: 822 - DNA, 3164 bp, Xenorhabdus sp.; identical to SEQ ID NO: 35
  CDS (2964)..(3164)

SEQ ID NO: 823 - DNA, 3522 bp, Xenorhabdus sp.
  CDS (3)..(221)
cactgcatctgattgaaagtgctatcgctgaaagctggatcacacgtaaaccaacaacagatggtttcgtcaccagccttgagttgtttgatgctgaaggtaaccaaatcgcccaattgtatggtcagcgtactgaaggtactcctgagcaggcacaatggcgcgatcaggttgccgctctgcctaaactgcaaccagaaaaggaaaattgtgtagcatgaaaaagtggcttctaacatttatgcttaccatctctgccagtgcgttctctgctgaacgtattgtcacaatcggtggtgatgtgtctgaaattgtttttgcactgggtgaagggcagcatgtcgtcgccagagacagtaccagtaaaaatcctcaggaaatactttcaattcctgatgtgggatatatgcgcatgctgagctcagaaggcgttctgtctatgcgtccaacactggtgatcgcaagcgaactggctcaaccttctctggcactcaagcaaatcgaagattccggtgtaaaagtcattaaagtgacaagcaaagcctcgttagaagccgttcctgaaaaaattaagaccgtcgctaaggcggtcaaacaggaaaaacgtggtgaagagctaatcactcaatatcagcaacagctggctacaatcaccacgtcagagatcccaacaaaagtcatgtttgtcatgagccacggcgggatcatgccaatggctgccggtcagaaaacagcggcagatcagattattcacgccattggtgctcaaaatgccatgcagggattcaatggataccgtcctctgtctcaggaaggtgttatcgccagccagcctgacttgctgctaatcagcaccgatgggctgaagactttgggtggaatggataaactgtggcaacttccggggctgagtttcacgcccgctggcaagaaaaaacaggtcgtcgtagtggatgaaatgggcctgcttggattcggtatcgagacccccgctgtcatgaaaaaagtccgtgaggctgcggagaaagtgcaatgagtcgttctcaatcccccagtcttggcttgatgttactgactgtattgctatttattctggcaatcagctcagccaacatgggggcattgcctctttcttttaaaacactgtgggagtcctctttggaggacccacactggcagatttggttaaacattcgccttccgcgcattttgctggctattctggttggaagtgcactggctatgtctggtgctgtcatgcaagggctattccgcaaccctcttgcagattccgggctattagggatcagcagtggtgcagcactaacggtggcactgactattgttgtgcccctttccttacctgcgggtattgcattatacgcccatatcattgctgcttttatcggcagtttactggtttcattcctgatattttcgctcaataaatataaccacggcaatatgtcaaaattgctgcttgccggtattgccatcaataccctgtgcgcatcgtttatcggtgtattgagctatatcagtgatgaccagcaattacggcaattcaccatttggatgatgggttcattaaaccagattgaatggccaacactgattattgcggcttctattattattccggtttgcctgctgacgctcagtcagtcacgaaaactgaatctccttcagttaggagacgaagaagcacactatttaggcattaatgttcaacggactaagtttcagttactactactgagtgccctactgattggctgcgctgtggcattgagcggggttatcggttttatcggccttgtcattcctcatcttgtcaggttgcgctttggtggagatcactcttggttactgccaatatccgcattgggtggttcatgcctgttattaactgcggatacattagccagaacgctggttgctcccgctgaaatgccggtcggccttatcacgggtttaatcggtgcgccttactttttatggttgattcttagaccatcaggaggccgcttgtaatggagccaataatgcaaaaaagtttgctcgaagctaaaaatctgaactatttcatcgggcaacgtcaaattatcaaggatgtgtccctttctcttaatcagagggaagttgttgcaattattgggcctaacggcgcaggtaaatccactttgttacggctattaacaggttatgtttcgccagccagtggtgagtgcttgttacagggcacttcccttgctgactgggagccgcaaaaactcgctcgtattcgcgcagtcatgcggcaatatagctcgctttcctttccttttagtgttgaagaaattattgcgatggggcgcgttcctcatgaaagcacccataagaaaacggctatcaatgaagcaattgcattgaccgaatgtgaagagctgaaacatcgtaattaccaacaactatccggaggagaacagcaacgggttcaattggccagaacactggctcagctctggcacccggagcctacaggatcttgcctgtttttggatgagccaacatcagcactggatctttaccaccagcagcacacattacggcttgttcataaccttacccggcagcgtcctctggctgtctgttgtgtattgcatgacctgaatctggctgcactctacgcagataaaattctcctgttacataaaggagaattagtcgcctcaggtacaccgcaagaggttctgcgtgatgatattcttaaacaatggtatcgggctgatttaggcgttatgcaacatcctgaaactcaccagccacagatttatctccgtcagtagtcgatttcctttcctagaggcaacttttgcaaatatcagcaaaaattgcctcaataatcacatcagagttgcaatctcagagaagaattactccatatccatcagccgttgctgacgtgccgatggcagataccagaatgtcgctatcaggcataaagcatagcccaacatttcacagccttcttccaccatatttttaactgttcgattaaaatgctcatccatcagctcctgccagagtgcccccataccaaacaagcgggaaaatactaatacgcatagcagcccgcaaatcatcattgaataactttgatgacgggtaaaatgcacaagcccaacaagcgttttagaaccctgcatgaccgcgtaactgatgcagagcaaagccagaggaatagcaaaccacgcccatgctccgtggaaaataacatcaaaatatacatccagctctctgattaacaggcaactaaaaaagccagcaatcaaaataagcgatgcccgtaatttcgaatttctctttgcttcataacacagcaaagttgcaattataatgagagaaagctcctgaaaaatttctgtaagtgattcttcctgtacattgttatgtaaataattaacatctcaaaataacaagccagttgttcccgctataaaaaatgcatataaaataaaaaacatcaattttttggccaaa

SEQ ID NO: 824 - DNA, 3522 bp, Xenorhabdus sp.; identical to SEQ ID NO: 823
  CDS (242)..(1036)

SEQ ID NO: 825 - DNA, 3522 bp, Xenorhabdus sp.; identical to SEQ ID NO: 823
  CDS (1033)..(2034)

SEQ ID NO: 826 - DNA, 3522 bp, Xenorhabdus sp.; identical to SEQ ID NO: 823
  CDS (2046)..(2828)

SEQ ID NO: 827 - DNA, 3522 bp, Xenorhabdus sp.
  CDS (503)..(607)
tttggccaaaaaattgatgttttttattttatatgcattttttatagcgggaacaactggcttgttattttgagatgttaattatttacataacaatgtacaggaagaatcacttacagaaatttttcaggagctttctctcattataattgcaactttgctgtgttatgaagcaaagagaaattcgaaattacgggcatcgcttattttgattgctggcttttttagttgcctgttaatcagagagctggatgtatattttgatgttattttccacggagcatgggcgtggtttgctattcctctggctttgctctgcatcagttacgcggtcatgcagggttctaaaacgcttgttgggcttgtgcattttacccgtcatcaaagttattcaatgatgatttgcgggctgctatgcgtattagtattttcccgcttgtttggtatgggggcactctggcaggagctgatggatgagcattttaatcgaacagttaaaaatatggtggaagaaggctgtgaaatgttgggctatgctttatgcctgatagcgacattctggtatctgccatcggcacgtcagcaacggctgatggatatggagtaattcttctctgagattgcaactctgatgtgattattgaggcaatttttgctgatatttgcaaaagttgcctctaggaaaggaaatcgactactgacggagataaatctgtggctggtgagtttcaggatgttgcataacgcctaaatcagcccgataccattgtttaagaatatcatcacgcagaacctcttgcggtgtacctgaggcgactaattctcctttatgtaacaggagaattttatctgcgtagagtgcagccagattcaggtcatgcaatacacaacagacagccagaggacgctgccgggtaaggttatgaacaagccgtaatgtgtgctgctggtggtaaagatccagtgctgatgttggctcatccaaaaacaggcaagatcctgtaggctccgggtgccagagctgagccagtgttctggccaattgaacccgttgctgttctcctccggatagttgttggtaattacgatgtttcagctcttcacattcggtcaatgcaattgcttcattgatagccgttttcttatgggtgctttcatgaggaacgcgccccatcgcaataatttcttcaacactaaaaggaaaggaaagcgagctatattgccgcatgactgcgcgaatacgagcgagtttttgcggctcccagtcagcaagggaagtgccctgtaacaagcactcaccactggctggcgaaacataacctgttaatagccgtaacaaagtggatttacctgcgccgttaggcccaataattgcaacaacttccctctgattaagagaaagggacacatccttgataatttgacgttgcccgatgaaatagttcagatttttagcttcgagcaaacttttttgcattattggctccattacaagcggcctcctgatggtctaagaatcaaccataaaaagtaaggcgcaccgattaaacccgtgataaggccgaccggcatttcagcgggagcaaccagcgttctggctaatgtatccgcagttaataacaggcatgaaccacccaatgcggatattggcagtaaccaagagtgatctccaccaaagcgcaacctgacaagatgaggaatgacaaggccgataaaaccgataaccccgctcaatgccacagcgcagccaatcagtagggcactcagtagtagtaactgaaacttagtccgttgaacattaatgcctaaatagtgtgcttcttcgtctcctaactgaaggagattcagttttcgtgactgactgagcgtcagcaggcaaaccggaataataatagaagccgcaataatcagtgttggccattcaatctggtttaatgaacccatcatccaaatggtgaattgccgtaattgctggtcatcactgatatagctcaatacaccgataaacgatgcgcacagggtattgatggcaataccggcaagcagcaattttgacatattgccgtggttatatttattgagcgaaaatatcaggaatgaaaccagtaaactgccgataaaagcagcaatgatatgggcgtataatgcaatacccgcaggtaaggaaaggggcacaacaatagtcagtgccaccgttagtgctgcaccactgctgatccctaatagcccggaatctgcaagagggttgcggaatagcccttgcatgacagcaccagacatagccagtgcacttccaaccagaatagccagcaaaatgcgcggaaggcgaatgtttaaccaaatctgccagtgtgggtcctccaaagaggactcccacagtgttttaaaagaaagaggcaatgcccccatgttggctgagctgattgccagaataaatagcaatacagtcagtaacatcaagccaagactgggggattgagaacgactcattgcactttctccgcagcctcacggacttttttcatgacagcgggggtctcgataccgaatccaagcaggcccatttcatccactacgacgacctgttttttcttgccagcgggcgtgaaactcagccccggaagttgccacagtttatccattccacccaaagtcttcagcccatcggtgctgattagcagcaagtcaggctggctggcgataacaccttcctgagacagaggacggtatccattgaatccctgcatggcattttgagcaccaatggcgtgaataatctgatctgccgctgttttctgaccggcagccattggcatgatcccgccgtggctcatgacaaacatgacttttgttgggatctctgacgtggtgattgtagccagctgttgctgatattgagtgattagctcttcaccacgtttttcctgtttgaccgccttagcgacggtcttaattttttcaggaacggcttctaacgaggctttgcttgtcactttaatgacttttacaccggaatcttcgatttgcttgagtgccagagaaggttgagccagttcgcttgcgatcaccagtgttggacgcatagacagaacgccttctgagctcagcatgcgcatatatcccacatcaggaattgaaagtatttcctgaggatttttactggtactgtctctggcgacgacatgctgcccttcacccagtgcaaaaacaatttcagacacatcaccaccgattgtgacaatacgttcagcagagaacgcactggcagagatggtaagcataaatgttagaagccactttttcatgctacacaattttccttttctggttgcagtttaggcagagcggcaacctgatcgcgccattgtgcctgctcaggagtaccttcagtacgctgaccatacaattgggcgatttggttaccttcagcatcaaacaactcaaggctggtgacgaaaccatctgttgttggtttacgtgtgatccagctttcagcgatagcactttcaatcagatgcagtg

SEQ ID NO: 828 - DNA, 3922 bp, Xenorhabdus sp.
  CDS (3106)..(3921)
taataaccagttttgcatggcttaaaacagtcactaatgttgctgggcgtactgtagaagtgcctgcaaaggtgaaccgtatcctattgggtgaaggccgtttattccattcagtcgcagtgttagaaggagataaacctctggcgcgtattgttggctggcagggtgatttccgcaagcttgatccacaaacctactctatctacaaagcaaaattccctgaaattgatgatattcccctgataggcaacaccactgccgatacggtcagttctgaaaaagtactgactcttaatcccgatgtagctatttttggtttatccggtcatggcccgggcaaacacagcgaactggttaaacaattagaaaaagcaggcgttcctgttgtttttgtcgatttccgtaatgatccactgaaaaacactctgccgagcattagcatgctgggtaaagtactgcaccgtgaggagcaggcaaacgcttatgctgatttttatgaaaagaatcagaaactggtcactgatattaccagccgtattccggcagagcagaaaccgtcagtctttattgagctgagagcaggttctatcgaagactgttgtggtactgcgggcaacggcaacatgggtaatttcattgaccttgcaggcggtaaaaacattgctaaagaggttctgccagtaccattgggtactatgaatctggaaaaagtgattacggctgatccttatatctatattgccagcggtgctcaggatcccggtgagaaaggtgaaggtatccagatgggtgctcagacttccccagaaactgctctcgctggtttgaaagcgatgacagagcgcagaggtatcaataccctgacagcggtaaaagaaggccgtactcatgctatctggcaccattactacaattcaccttataacgttgtagtgacacaagtttttgctaagtggttttatccagagcaatttgctgatttagacccacagcagacattaaaagagcttcactctaagttcctagcagtagaaccagcaggcacatattgggtcagtgaaaaataagcagtaacaggtaatagaaatgagtgtcactaccgagcctatgccaatgatgaaacaacagaacgagtgtgatatcaaagcacactatcgtcatatcctgcatcgacgtattgcatggatgttgttgctaattctggttatcggcgcctctttagtattagattttacaatggggccatcagggttatctttatcagctctctggcagactctggtttcaccggagagtgtggatgcaggaacccgggtaattgtctgggatatccgattaccttatgccttgatggcggtagtggttggtttatcattgggcctggcgggtgcagaaatgcaaactattttgaataacccgctggccagcccgtttactctgggtgtttccaatgccgcctcttttggtgcggcattggcaatcgtactgggtattggtattccaggcatacctgatcagtggcttatttctgcaaatgcttttatttttgcgttgttagctgctttgatgcttgatggcattacgcgctggacaaaagttgcaacatctggcgtggtgctctttggtattgctatggtctttaccttcaatgcgctggtttccatgatgcagtttattgcaacggaagatacgttgcagggtctggttttctggacgatgggcagcctttcaaaagcaacgtggttaaaactgggtgttatgttgctggtgctcttgacccttatgcctgtttctatgatgaactcctggaaactgactgcattacgtttaggagaagatagggcgaccagctttggtatcaatatccgtcgtcttcgtctgggaacgcttttgcgtatcagtatcttgactgcattggcggtggcatttgtcgggccgattgcttttattggtctgattgctcctcatattgccagattaatgtttggtgaagatcaccgtttctacctacctgcaagtgcgttaattggtgccctggtattatcgatagcatcgattgcatctaaaaatttaattcctggagtcattatacctgttggcattgtgacatctttggtgggtgtacctttcttcctgagcattgttttgcgccatagggggagtgtatgagccaagggttaaaaataagccggtttacggctggttatcccaaacacccagttattgaaaatctggatgctaacccattgcctcggggtaaaattaccgtattactcgggccgaatggtagcggaaagtcaacattattgcgttcactggctggtttaaacaaagctaatggtgctttgttgctggatgggcaggatttgatgcaaatgaattttgcccaacgtgcgcagaatgtcgtttatttgcctcagtcgttgcctgcgggtgtccatctacatgtactggaatctgttattgttgcccagcgcgcatcaggtgggacaagtggtgaccaatgcgaacaggaagttatggcgctgttacgtcagcttggtattgaacatttagctttaagctatttagatcaattatcaggtggacaaaaacaactggtgggtttggcacaatcattaatcagaaagccgacactattattattagatgaaccattaagtgctctggatttaaattaccagtatcacgttatggatttggtcgcacgtgaaacacgtcgccggaatattattaccgtggttgttgtacacgatattaatattgcgctgcgtcatggtgaccatatattaatgttaaaaaagggtgaattaatttctgagggtttaccagaacaggtcattacacctgatagtctggctcaggtatatggtgtcaaggggcggatagagcattgttctcagggagtgcctcaagtattaattgatggccttgtaacggatttggccagctaaaataataaaaagcataaactgttttattaaaactgtagagtaaataaaaataacactggtggggataagagtgcttatccctgcactttgagtttatgtcgattatccagattaattaaattgttctattctaccttttggagaatcgggaatggtcgtttttgcaaagaaaaaagtcgtcttaggtattattgctgcgatttcatctagtgctgttttagctgctaatgcggcgaataatggtgaagataaaattattgttactactgcttcaggcttccaacaaaaaattgaagatgcgccagcttctatttcagtggtcagccgtgaacaattggaaaccaaagcctaccgtgatgtaacggatgcactgaaagatgtgccgggagttgtggtcactgggggaggcagtaaaactgatattagtatccgaggaatggcatcaaaatatactttgattttaatcgatggtaagcgtgtagatactcgaactaccagaccaaacagtgatggaccaggtattgagcaaggatggttgcctccattatctgcaattgaacgaattgaagtggttcgtggaccgatgtcagcactctatggctctgatgctatgggtggagtaattaatgtgatcacgcgcaaagctcagaaagaatggaaaaccagcttgcgtgcagatactacactaactgaaagtaaaaattcgggtaatagttatcagacaaatatttatacagctggtcctgtcattgatggaatattaggactaaaagtaagtggtctgttctctcatcgcaatgaagataaattctttgatggttttagtgaacaaaaaatgcgtaatggtgcggcgacattatccttaacaccaaatgagcagaatacttttgattttgaaattggaagatacgaacaagatcgtaatattactgagggaaaatcaggtaatagctcagataaggaagaat

SEQ ID NO: 829 - DNA, 3922 bp, Xenorhabdus sp.; identical to SEQ ID NO: 828
  CDS (2166)..(2954)

SEQ ID NO: 830 - DNA, 3922 bp, Xenorhabdus sp.; identical to SEQ ID NO: 828
  CDS (1117)..(2169)

SEQ ID NO: 831 - DNA, 3922 bp, Xenorhabdus sp.; identical to SEQ ID NO: 828
  CDS (3)..(1067)

SEQ ID NO: 832 - DNA, 790 bp, Xenorhabdus sp.
  CDS (285)..(782)
caagtgctctaaagggaaaataatttgagcaggaacacggtttggactgcaaatcaggtagttttataatataagctgtgataactaactgaattttaaaagtgaatgactggtaaaattcccgaaagaaaattctaattctgtgcttcaggctttaagctggggcagcgaatacaaggggtagcagaaaatttatcggagtgactgatatctttaataagaatccctgttcgttaatttattgttgttcatttgttgtgcttgactactttgtataggtgtatatggataagtataaactctatgagaatttatcagatagcttgatggcattattatcaggcgagtataacctgatcgcgtctcttgcaaatacaagttcattgttatatgaacatttggataatgttaattgggttggcttttacttggtagatggtgataccctagttttagggccatttcagggcaaaattgcttgtgttcgtattcctatagggaaaggggtatgcggaaccgctgtagaaaagaatagtattcagcggatttctgatgtacatgcttttcccggtcatatagcctgtgatgctaatagtaatgctgaaattgtccttcctttggaaattaatgggcaagttattggcgttctcgatatcgacagcacggtttttgaccggttcgatgaatacgatgaacatggcttgaaagcccttgttagcaggctttgtgagcatttggggcaatgtgttgtgccaaaatatctgcaacagaatgtaacttaacttatgta

SEQ ID NO: 833 - DNA, 3035 bp, Xenorhabdus sp.
  CDS (2874)..(3035)
gtgctctaaagtttatattgtggaagattagccccagaccgtgaatagcgccccaaagaataaaatttatccccacaccatgccacactccagagataaccatcgcagcaaatagattaaaatttttgcggatagctccctttttatttcctcccagaggaatataaacatagtcacgaataaaggtggacaggctgatatgccaacgatgccaaaacacctgtaggttctcagccagataaggtgcattaaaattctgcggtactctgaagccgagtaataacgctatccctgttaccaaatcggtataaccggaaaagttaaaatagatattccatgcataagcataaatcgctactaaaacttgacctgcatgataaccagccggatcctcaaataccggattaacgaaattttcagtcagggttgcactgagcagaaatagctttccaacagccagcccaatcaaaagcaaggctttcaaaggttccagaatgattctggatggtgcctgaatctgcggtagaaaatctttggcccgattgataggccctgctacaaggcttgggaaaaagcaaagatacagcataacgtcaggcaatgaggcaggtgaaagttctttcttacaaacagaaaccacataactgactgagtgaaaaacataaaatgacaaccctaacggtaataacagttcaagaaccggtagctctacattaagacctatactacctaatgcctgttgtattgcctcctgaaagaaagaatagtatttaaatacagtaaaacagccaaggatacccaatgtcagtaaagtaaatataattttatgggataaataccgactgagaatattggctaaaaagtaaataaacagagtgtagatgaatagaacataaacaaaatttgctgaaaaagagaatgtaaataaataactaactaaaattaacaatccgttttgtagcctggaggctttctgtaacagccagtaaacaaagagcaaaataacaaatgctccaagaaactcaaaagaaaagaagttcatattaggctctagctaaccatttatcattgtaggaaaaacacaatcccgatcccctctatgttatgggatttgtttatatttacaatagataatatatcgattgcttttttattagctatataccgtttcctctggaatgtactccaaaatctattaactgaagatgtcgtaataaaaataatccacagcgtaattaatacggtgcggattatttgatgaattaccatataacttgccttattggctataactatcgtattccagtacctgtgaaatcaattccttatttccatcaaatacctgatgtaaataacgattataaacagcacctaattcagaataaccatgcaaatgatcgataagtttgctggtattcagcggtttctgctctgttcgttgtctggcccgtgaaatacgcagtgactcataagcacggtgcgtattcatatttttcatataggcaatgaccgaatcttcaatcgtattatagacggaatagcctttgactttccctttggaatgaccacatgagctacaacgcattccaaacaggttattgtttttctgcgcaagttctgatgttccccaaccagattctgctgcggcctgagtagcaacaaaatgggttggaatgatgtcaactctactgattaacttctgccagttggtgtgttgtggtgaggtacaagtcattttgtaatcagaacagatcctttgcaacctcctgatatcctgtgcagaccatttagaagtatgatggtgtgacagaacccatttacggtctcgcataatctgttgattatgcttatcaattacagggacaacaaggttcaaaaacgctttctttctgggcacgccagaagggtattttcgcaaatcaggcaaatgatgtttgatgccactgtgagaatactcttccatttttgagctattttttgaagcactgctcaaaccagtaaagactaaagagagaaagaaagcgaagaccgcagttgtcctcatcattcgagagggcatttgcttctcctcgttttattactctgggtgaaaaacacacgaatattaacaaagcaattaacctatagctatctttattcgtgattagcacaaactatttacgtaacgaatattagcacgttactgataataatctatatttttcactcaacatagtaaataagtgtaataattattggatttttatcccgaaataacacttgttaatacattcattttacacctaaaaataggaaactcatgttcagcaaaacattatcaacccatttattttaaataaaaaaatcaccctccaaccacgttcaatcgattgataaaacattagcgatacaacatgaattatcagatatgattttatctatttttcattatctattttgctggttagttatatttaaataataaagacaaataaataacggggccattttaaatcaattgatttaatataacttcacccacacttatcctgtcaagaataatttaatcttattcttttattataattaaatacattctcaagtaaaaaacacattagggaacctctaaaaacttttcacagccacaaaattgagtaaaatgtaggcacagtacctctctgcaaggtagcgccatcatgataccgcctcgttctgctttaaaaaaagacaaacaggcatccgaatatcaccgtcgaaaaatcgatgaattaggtgatccgctgcttgttcttgataaatatgttgatttctcggcactggctgacaccctagaccgtatcgtcccacgtattatttcccccaaagggggacgcccgccattcccgacggaggtgatggttcgcatcattatcctgaaacatttccataatctttccgatgaaaaaatggaatatcaattgcttgaccgaatgagctggcaacgtttttgtcgcttgaccgatgtcattaatattccagaccgtaacacgatttggtgtttcgaaaaacggattggg

SEQ ID NO: 834 - DNA, 3035 bp, Xenorhabdus sp.
  CDS (1994)..(3034)
cccaatccgtttttcgaaacaccaaatcgtgttacggtctggaatattaatgacatcggtcaagcgacaaaaacgttgccagctcattcggtcaagcaattgatattccattttttcatcggaaagattatggaaatgtttcaggataatgatgcgaaccatcacctccgtcgggaatggcgggcgtccccctttgggggaaataatacgtgggacgatacggtctagggtgtcagccagtgccgagaaatcaacatatttatcaagaacaagcagcggatcacctaattcatcgatttttcgacggtgatattcggatgcctgtttgtctttttttaaagcagaacgaggcggtatcatgatggcgctaccttgcagagaggtactgtgcctacattttactcaattttgtggctgtgaaaagtttttagaggttccctaatgtgttttttacttgagaatgtatttaattataataaaagaataagattaaattattcttgacaggataagtgtgggtgaagttatattaaatcaattgatttaaaatggccccgttatttatttgtctttattatttaaatataactaaccagcaaaatagataatgaaaaatagataaaatcatatctgataattcatgttgtatcgctaatgttttatcaatcgattgaacgtggttggagggtgatttttttatttaaaataaatgggttgataatgttttgctgaacatgagtttcctatttttaggtgtaaaatgaatgtattaacaagtgttatttcgggataaaaatccaataattattacacttatttactatgttgagtgaaaaatatagattattatcagtaacgtgctaatattcgttacgtaaatagtttgtgctaatcacgaataaagatagctataggttaattgctttgttaatattcgtgtgtttttcacccagagtaataaaacgaggagaagcaaatgccctctcgaatgatgaggacaactgcggtcttcgctttctttctctctttagtctttactggtttgagcagtgcttcaaaaaatagctcaaaaatggaagagtattctcacagtggcatcaaacatcatttgcctgatttgcgaaaatacccttctggcgtgcccagaaagaaagcgtttttgaaccttgttgtccctgtaattgataagcataatcaacagattatgcgagaccgtaaatgggttctgtcacaccatcatacttctaaatggtctgcacaggatatcaggaggttgcaaaggatctgttctgattacaaaatgacttgtacctcaccacaacacaccaactggcagaagttaatcagtagagttgacatcattccaacccattttgttgctactcaggccgcagcagaatctggttggggaacatcagaacttgcgcagaaaaacaataacctgtttggaatgcgttgtagctcatgtggtcattccaaagggaaagtcaaaggctattccgtctataatacgattgaagattcggtcattgcctatatgaaaaatatgaatacgcaccgtgcttatgagtcactgcgtatttcacgggccagacaacgaacagagcagaaaccgctgaataccagcaaacttatcgatcatttgcatggttattctgaattaggtgctgtttataatcgttatttacatcaggtatttgatggaaataaggaattgatttcacaggtactggaatacgatagttatagccaataaggcaagttatatggtaattcatcaaataatccgcaccgtattaattacgctgtggattatttttattacgacatcttcagttaatagattttggagtacattccagaggaaacggtatatagctaataaaaaagcaatcgatatattatctattgtaaatataaacaaatcccataacatagaggggatcgggattgtgtttttcctacaatgataaatggttagctagagcctaatatgaacttcttttcttttgagtttcttggagcatttgttattttgctctttgtttactggctgttacagaaagcctccaggctacaaaacggattgttaattttagttagttatttatttacattctctttttcagcaaattttgtttatgttctattcatctacactctgtttatttactttttagccaatattctcagtcggtatttatcccataaaattatatttactttactgacattgggtatccttggctgttttactgtatttaaatactattctttctttcaggaggcaatacaacaggcattaggtagtataggtcttaatgtagagctaccggttcttgaactgttattaccgttagggttgtcattttatgtttttcactcagtcagttatgtggtttctgtttgtaagaaagaactttcacctgcctcattgcctgacgttatgctgtatctttgctttttcccaagccttgtagcagggcctatcaatcgggccaaagattttctaccgcagattcaggcaccatccagaatcattctggaacctttgaaagccttgcttttgattgggctggctgttggaaagctatttctgctcagtgcaaccctgactgaaaatttcgttaatccggtatttgaggatccggctggttatcatgcaggtcaagttttagtagcgatttatgcttatgcatggaatatctattttaacttttccggttataccgatttggtaacagggatagcgttattactcggcttcagagtaccgcagaattttaatgcaccttatctggctgagaacctacaggtgttttggcatcgttggcatatcagcctgtccacctttattcgtgactatgtttatattcctctgggaggaaataaaaagggagctatccgcaaaaattttaatctatttgctgcgatggttatctctggagtgtggcatggtgtggggataaattttattctttggggcgctattcacggtctggggctaatcttccacaatataaactttagagcac

SEQ ID NO: 835 - DNA, 3035 bp, Xenorhabdus sp.; identical to SEQ ID NO: 834
  CDS (1049)..(1756)

SEQ ID NO: 836 - DNA, 3140 bp, Xenorhabdus sp.; identical to SEQ ID NO: 160
  CDS (2902)..(3120)

SEQ ID NO: 837 - DNA, 3366 bp, Xenorhabdus sp.; identical to SEQ ID NO: 315
  CDS (2)..(274)

SEQ ID NO: 838 - DNA, 3366 bp, Xenorhabdus sp.; identical to SEQ ID NO: 315
  CDS (2854)..(3366)

SEQ ID NO: 839 - DNA, 2038 bp, Xenorhabdus sp.
  CDS (1900)..(2037)
cgggttgtcatgccaatggcactgcccggtagctaagtgcggaagagataaccgctgaaagcatctaagcgggaaacttgccttgagatgagtcttcccttgtccctagaggacactgaaggaacgttcgagacgaggacgtagataggctgggtgtgtaagcgttgcgagacgttgagctaaccagtactaatgaaccgtgcggcttaacctgacaacaccgaaggtgttttgcggggattgagagcaagacgataaaagtttcagatgaagagtgaccggaaaacagaaagtagccggtgacacagcttgttcgggattgaaaacaggatttgtctggcggcaatagcgcggtggtcccacctgaccccatgccgaactcagcagtgaaacgccgtagcgccgatggtagtgtggggtctccccatgtgagagtaggacactgccagacagcaatttagacgtgttgccaaaatggcaacactttttatttcagcatttgctgatatggctcagttggtagagcacacccttggtaagggtgaggtccccagttcgaatctgggtatcagcaccatgaataatatgttcggcaaataaaacagaatttgcttggcggcaatagcgcggtggtcccacctgaccccatgccgaactcagtagtgaaacaccgtagcgccgatggtagtgtggggtctccccatgtgagagtagggaactgccaagctttatatacagtcaaaaagccactcaaatgagtggctttttgcatttctaccctcatgataggtaattactgacttatctttcaaatgcagagtctgctagactacagtcaaattacttattgagcctgaattgaatgcctgtctgtaaatcaacccaactcaaaacatttaacacatttggtatatctgccaatgccaatcgtattagcgtagctgcctctgttcaatcacttctggctttgtggcaagaggctgtagaaaataaccagcctatcctattactgggtggagggagcaatgttctcttcactgaagatttcaaaggcactgtgattctgaatcgtattactggtgttgatatacaggaatcggataccgcatggaatattcatgttggtgcgggtgaaaattggcatgagctgattctttatttactcaaacacaagatctatggtttggagaatttagctcttattcccggaaatgtgggttctgcacctatccaaaatatcggggcttacggaattgagttcaaacaggtctgtgagtacgttgatttaattgagctgaaaacaggaaagcagatccgcttgatggaaaatgaatgtgggtttgcttacagagatagtgttttcaaacatgaatatagtaatggttatgcaattacagcggttggtttaaagctgaataaagtatggaacccaatactaacgtatggtggtttaacaaaattctcgcataatgatgtaacaccggagcaaatttttcatacagtgtgtgaaatgcgtcagagtaaattaccagatcctgcgatcacaggaaatgcaggaagcttcttcaaaaatccaattatatcagcagaattggcagagaaaattaaatctgagtatcctgattgtccccagtatcatcacaatgaacatagtgtaaaaatagcggcgggctggttgatagataagtgtcacctaaaagggtatcacattggtcatgcggcagttcaccataaacaagcattagtattaatcaatcaaggtaatgcaacaggacgtgatgttattgctttggctgcttatgttcgcaagcaagtagctgaaaagttcaatatttatttagaaccggaagtccgtttcattggtaatgtaggtgaaatagatgcgggggaatgtatttcatgaaagacgttagtactccattaaagttaattaaaattttatcagatggtgaaattcattcggggcagcaattgggccaaaagctaaggatgagtcgggcagggataaataaacatattcaggttattcgtgaatggg

SEQ ID NO: 840 - DNA, 2038 bp, Xenorhabdus sp.; identical to SEQ ID NO: 839
  CDS (1058)..(1903)

SEQ ID NO: 841 - DNA, 3574 bp, Xenorhabdus sp.
  CDS (3)..(434)
cgtcctttaaaggagattatcaaaccacatgcgcactgcattcttactttaatatcagcgatatagagaaaattcaggtcagtggattaggccgtcactttatcgattcgataacaaacaaaaaacagcaatcgaccagcgaaaaactaatttttcaggggcgaaccgatcggatttacaccgagccagaagatttcaatctaattagtgataaacactggaagcgtactatcgagattcatcactaccaccacagtgatatcgtttgctggaatcccggagcagaattatcaggcagcatgcaagatatggaaaacgaaggctataaaactatggtctgtgttgaaactgctcgtatcagtagccccttgcattccaaaaacgggaaccccggcaagctatctgtcgtccttcgttgtcgccagacaagctgaacctaagtgattggtcagaattaaaataaggatgaacaggcattgattcaaattgcatggaagcggtacgaaaaaatgcctgagaaaataataaatcccttatcattaatcaacaaccaccggaacacgtctggctaaagcgcacaacagttcataacctatcgtgcctgcaaactctgcgacttcatccaccggtaattttgcgccccatagctcaacagagctaccgattgtagcttctgggcatggtgtcagatccaccgtcatcatatccattgatatcgctcccaacacacgagtgcggataccatcaacaacaacaggtgttcctgttgatgcatgacgaggatagccatcagcataaccgcatgcaacagtacccactcgggttggagactgtgtggtatagcggccgccgtaaccaatttttaccccttgagccagctcatgaaccgcaataatttcacttttcagactcatcgcaggtttcaaccccgaatctgcaatatcacgccactttccgctgggagatgccccgtataaaatgattcccggcctgacccaatcgcgatgcgtttgcgggtgccatagaattgcaccagaattagccaagcaatgcgaaagaccgtccattctgagctctttaaccactgtaaattgctcattaacgcccatttcattatcagaattcgcaaaatgggtcattaaagtgactgatctgatattctgtatcccatttgccattgatactatctgtggatattcaccgggagtgaaacccagacggttcatgccactgttaagttttaaatagatatctacaggtttatcgaattctgcttcttctattgcctgaagctgccagcgactatgtactgtcgttgtcaggttatatttattgattatctgcaaatcttcggctttgaagaaaccttccaacaacaggataggcccttgccacccctgttctctcaaataaatagcttcattcatatcaagcagagcaaaaccatctgtctgcgtgagtgattgccatattctgtccaatccgtgcccatatgcattcgctttcactaccgaccaaattttactgtgaccaaccttctgacggatcgttgccaggttatggcggaatgcatcaaggtggatcgtcgccaaaataggacgtggcatgctgaccccttctaatttactttacgcagtatgtaagcgatgcttcgcccgaagtactttggtattaaacccatcggtgtatctgaatacagaaagatcatccgcagcgatatcaggttttttgcctgagattaagtcagataacagctttcctgaaccacaggccatcgtccagcctaatgtgccatgtccggtattcagataaaggttagcgtatttagtcgggccaacaataggtgtgccatccggtgtcatcggacgtaacccagcccagaatgaagcttcagcaatattgccaccgtcgtggtaaagatcatcaacgaccatttttagtgtttcacaacggctttttaggacgtccaagttaaaaccgacgacttctgccataccaccaacccggatacgattatcgaaacgcgtaatagcaatcttataagtttcatccagtatcgttgaagtcggtgagcgagtttcatccatgaccggcattgtcagcgaataacctttcatagggtaaaccggaattgtgataagacctctcaataactcggtggaataagcccccatcgctatcacatactgatccgcggttataacaccatcatcacactgaataccgctaaccttatcaccatccatcagaatttgtttaacctgcctgttaaatataaatctgacgcctgctttttctgccattttggctaattctttggtaaaaatatggcaatcaccagtttcatcattgggaagttgcaatccccccgtcaatttatgggaagaatgatcaagagccggctctactgacgttaattgttctgccgtcaataatcgataaggaacgccctcctgctccagtaccgcaatattcttggctgcactatcaaactgcttagcagttctgaacagttgcaatgttcccccaagacgctcctcataccgaatacctgtatccgctctcaactgtttaatacagtcacgactatattcagccagacgcaccattctgcttttattcatcgcataatgatcagcatcgcaattgcgcagcatttgccacatccagcgcaactgaaataatgaaccatcagggcgaatggctagtggagcatggcgctggaacagccatttgaacgcttttaacggaatacccggagcaccccagggagttgaatacccgggtgaaatttgcccggcattacctgcactcgtttcttcggcagcactctgctgacgatctacgacgatcacttcatgaccttcctgagccagataccaggcgctggtgacgccaataacaccactgcctaaaataaggactttcattctgccacctgctgataagaaatatacgaagacaagcataatatgctaaatagaaaaatccaacacagaataatagaccatgaaatgattaattgaattttaggatttaaatcacaatttcattacaaaattctgataaaaaaccttcttattatcagatggaaaacaaaaaatattcataaatacaaaggcataccaaagaattaaatgctattgattggttgtataagtattctaaaaagtgatttttacggtaaaaaagcaacattaagttcacaatattcgattttactttaatctaaataaaatttatttttaagagttaaatttcgaatcaatgtaagctgaacagtataatagggaacctctaaaaacttttcacagccacaaaattgagtaaaatgtaggcacagtacctctctgcaaggtagcgccatcatgataccgcctcgttctgctttaaaaaaagacaaacaggcatccgaatatcaccgtcgaaaaatcgatgaattaggtgatccgctgcttgttcttgataaatatgttgatttctcggcactggctgacaccctagaccgtatcgtcccacgtattatttcccccaaagggggacgcccgccattcccgacggaggtgatggttcg

SEQ ID NO: 842 - DNA, 3574 bp, Xenorhabdus sp.; identical to SEQ ID NO: 841
  CDS (3369)..(3572)

SEQ ID NO: 843 - DNA, 3574 bp, Xenorhabdus sp.
  CDS (1968)..(3035)
cgaaccatcacctccgtcgggaatggcgggcgtccccctttgggggaaataatacgtgggacgatacggtctagggtgtcagccagtgccgagaaatcaacatatttatcaagaacaagcagcggatcacctaattcatcgatttttcgacggtgatattcggatgcctgtttgtctttttttaaagcagaacgaggcggtatcatgatggcgctaccttgcagagaggtactgtgcctacattttactcaattttgtggctgtgaaaagtttttagaggttccctattatactgttcagcttacattgattcgaaatttaactcttaaaaataaattttatttagattaaagtaaaatcgaatattgtgaacttaatgttgcttttttaccgtaaaaatcactttttagaatacttatacaaccaatcaatagcatttaattctttggtatgcctttgtatttatgaatattttttgttttccatctgataataagaaggttttttatcagaattttgtaatgaaattgtgatttaaatcctaaaattcaattaatcatttcatggtctattattctgtgttggatttttctatttagcatattatgcttgtcttcgtatatttcttatcagcaggtggcagaatgaaagtccttattttaggcagtggtgttattggcgtcaccagcgcctggtatctggctcaggaaggtcatgaagtgatcgtcgtagatcgtcagcagagtgctgccgaagaaacgagtgcaggtaatgccgggcaaatttcacccgggtattcaactccctggggtgctccgggtattccgttaaaagcgttcaaatggctgttccagcgccatgctccactagccattcgccctgatggttcattatttcagttgcgctggatgtggcaaatgctgcgcaattgcgatgctgatcattatgcgatgaataaaagcagaatggtgcgtctggctgaatatagtcgtgactgtattaaacagttgagagcggatacaggtattcggtatgaggagcgtcttgggggaacattgcaactgttcagaactgctaagcagtttgatagtgcagccaagaatattgcggtactggagcaggagggcgttccttatcgattattgacggcagaacaattaacgtcagtagagccggctcttgatcattcttcccataaattgacggggggattgcaacttcccaatgatgaaactggtgattgccatatttttaccaaagaattagccaaaatggcagaaaaagcaggcgtcagatttatatttaacaggcaggttaaacaaattctgatggatggtgataaggttagcggtattcagtgtgatgatggtgttataaccgcggatcagtatgtgatagcgatgggggcttattccaccgagttattgagaggtcttatcacaattccggtttaccctatgaaaggttattcgctgacaatgccggtcatggatgaaactcgctcaccgacttcaacgatactggatgaaacttataagattgctattacgcgtttcgataatcgtatccgggttggtggtatggcagaagtcgtcggttttaacttggacgtcctaaaaagccgttgtgaaacactaaaaatggtcgttgatgatctttaccacgacggtggcaatattgctgaagcttcattctgggctgggttacgtccgatgacaccggatggcacacctattgttggcccgactaaatacgctaacctttatctgaataccggacatggcacattaggctggacgatggcctgtggttcaggaaagctgttatctgacttaatctcaggcaaaaaacctgatatcgctgcggatgatctttctgtattcagatacaccgatgggtttaataccaaagtacttcgggcgaagcatcgcttacatactgcgtaaagtaaattagaaggggtcagcatgccacgtcctattttggcgacgatccaccttgatgcattccgccataacctggcaacgatccgtcagaaggttggtcacagtaaaatttggtcggtagtgaaagcgaatgcatatgggcacggattggacagaatatggcaatcactcacgcagacagatggttttgctctgcttgatatgaatgaagctatttatttgagagaacaggggtggcaagggcctatcctgttgttggaaggtttcttcaaagccgaagatttgcagataatcaataaatataacctgacaacgacagtacatagtcgctggcagcttcaggcaatagaagaagcagaattcgataaacctgtagatatctatttaaaacttaacagtggcatgaaccgtctgggtttcactcccggtgaatatccacagatagtatcaatggcaaatgggatacagaatatcagatcagtcactttaatgacccattttgcgaattctgataatgaaatgggcgttaatgagcaatttacagtggttaaagagctcagaatggacggtctttcgcattgcttggctaattctggtgcaattctatggcacccgcaaacgcatcgcgattgggtcaggccgggaatcattttatacggggcatctcccagcggaaagtggcgtgatattgcagattcggggttgaaacctgcgatgagtctgaaaagtgaaattattgcggttcatgagctggctcaaggggtaaaaattggttacggcggccgctataccacacagtctccaacccgagtgggtactgttgcatgcggttatgctgatggctatcctcgtcatgcatcaacaggaacacctgttgttgttgatggtatccgcactcgtgtgttgggagcgatatcaatggatatgatgacggtggatctgacaccatgcccagaagctacaatcggtagctctgttgagctatggggcgcaaaattaccggtggatgaagtcgcagagtttgcaggcacgataggttatgaactgttgtgcgctttagccagacgtgttccggtggttgttgattaatgataagggatttattattttctcaggcattttttcgtaccgcttccatgcaatttgaatcaatgcctgttcatccttattttaattctgaccaatcacttaggttcagcttgtctggcgacaacgaaggacgacagatagcttgccggggttcccgtttttggaatgcaaggggctactgatacgagcagtttcaacacagaccatagttttatagccttcgttttccatatcttgcatgctgcctgataattctgctccgggattccagcaaacgatatcactgtggtggtagtgatgaatctcgatagtacgcttccagtgtttatcactaattagattgaaatcttctggctcggtgtaaatccgatcggttcgcccctgaaaaattagtttttcgctggtcgattgctgttttttgtttgttatcgaatcgataaagtgacggcctaatccactgacctgaattttctctatatcgctgatattaaagtaagaatgcagtgcgcatgtggtttgataatctcctttaaaggacg

SEQ ID NO: 844 - DNA, 3574 bp, Xenorhabdus sp.; identical to SEQ ID NO: 843
  CDS (645)..(1946)

SEQ ID NO: 845 - DNA, 3502 bp, Xenorhabdus sp.; identical to SEQ ID NO: 360
  CDS (2585)..(3037)

SEQ ID NO: 846 - DNA, 3502 bp, Xenorhabdus sp.
  CDS (2436)..(3449)
caaataacgttcttggccctttcctgcccaatccgttttttcgaaacaccaaatcgtgttacggtctggaatattaatgccatcggtcaagcgacaaaaacgttgccagctcattcggtcaagcaattgatattccattttttcatcggaaagattatggaaatgtttcaggataatgatgcgaaccatcacctccgtcgggaatggcgggcgtccccctttgggggaaataatacgtgggacgatacggtctagggtgtcagccagtgccgagaaatcaacatatttatcaagaacaagcagcggatcacctaattcatcgatttttcgacggtgatattcggatgcctgtttgtctttttttaaagcagaacgaggcggtatcatgatggcgctaccttgcagagaggtactgtgcctacattttactcaattttgtggctgtgaaaagtttttagaggttcccaggtgtaatttgaaaccgtaaaaccaccccattgaggtttttcctcgctgtgctgtcccttcaaataccttatggcggggaatacggatattatggcacacgctcaaacgcgtggagtcaataaaggcgatccccgtagggtttccttttaattgagtcagatagctgcacagaggcactaaaacggaaggcgtgacactgataaaacgagtataactgagcaaggtgggaaaatcgtgatgatgatatcgccaaatatgctccagataaaaatttttaaaatcacgataatgcgacagatgaaagaggatcaggatggtcatgatttcactgggatacatgtgaccttttctacgacgtaggcgatatcccttattgagacaaaactgttcccattgtggaatgaaaaaacgacaaaagtcatcgacatcgatgaaaatttcaactaagttgttcatagcctgttcctccccggagctgtttcgacttgcaccaaaacacggctccttgaacaggcttctcgtcaatttcttatccagaattggggttatttacacagccactttgtatgcgctgagctttgtgctttaatgcccataaacacctttccttatttgagttacgaatattagcttgaacatctatatcgtaacggaaaggtgtttttcttggtataacctttgaactccacccgcaaagcgggtggttttatgtttaagacgctaacgcgacttaaactggctaaagccataaaataaaattaaggacggtacttccgccgtcctttcactctcactacgccctaacaaactcctgttgttaattcaccagaaaccttactgaggtcaaatcttcatctcaatcggattacgtctatagcaaggcttataatttgaaagatggtgtgttattcagtgaggtgtatatttgaaatttggtgctgacatagcttaactccccataagttgtttttcatccacaatagtgcaagattcctgtctggaaacctgcttttaatattctaggataaccaattaatttttcgatcaaaacttgaatcccggttctctgacggagataaataagatcaagggttacccaacgtccctcaatggataaagttaataatattaatttattatattaaaatgggaagattatccctgttaaaagctaagatttatcagacaaccacaagcaaataaattttgttaatgtcccgccaaccattctatgtcattcttcttaaattcatgaaaatacaatgacagaattacctagctctaatcaaactttggcataacgtataagccttataaataaaaataatctctataaagtgacgaaatctatctgttttcattttttatcttaggagacgatatgtgtactcgtatagtttatttaggtaaagatgagcaaaccataacaacaagaacaatggattggaaacacgaaatcaaaacaaatttatggatatttccacgaggcatgagcagggatggtattgctggccctaattctattaaatggaaatctaaatacggtagcgtgattgcatctggcttcgatatttcaaccacagatggtattaacgaaaaaggtcttgtggctaacttattatggttagctgaatctaaatatccacaaccaaatgataagcggcctgcagtatcaatttcattgtgggcgcagtatatgctagataattacgcgacagtagctgaagtcgttgaatcactggaaaaaacgcctttagtagtgatgacggataaaatggagggcgaagaccgtttagcaacattgcatttatcattatcagatgcgagtggtgatagtgcaattattgaatatatcgacggtaaacaagtgatccatcacagggtgcgagcatacttttttagcatttcttgaatgaaggcaaatgacatgatctaatgagatttattttccttctcattgctgacctatgactctgattgaacacttatccgttgtgaaagaaacccgctctgatattaatcgccaatacgatctggttgatattattttcctcgttgtcagggccattatggcgggaactgaaggctggcaagacattgagacttatggccaagccaaaattaagtggttaaaggaataccggactttttcccatggaatcccctgtcgacataccattgcaagaatactgcgggctatcgagttggattctttactggaagcgttactgaattgggttaatgaacagcgtgaactgggcggtaaatccgtcatcgcctttgatggcaaagtcctgaggcgggcctaccggaatgaaaagaaaaatgctatccagctggtcacagcgtatgacactgaacgaggattagtgttgagccagaaagccaccgctacaaaaaacggtgaaatccaggttgttcgtcaaatgctggatatccttaatctgaagggcagtattgtgacactggatgccctgcattgtcagcgtgaaacactggaaaaaatcagtgaaaagaaagcgtatgcggttgttcaggtgaagaaaaatcagcctaagttatgggctgctgtccagtcacaatttcaatcggtgtttgatgcaggtaaagaacagattgtcactgaagttaagcaagaagcgcatggacgtcgggaagagcgctatgtgttccagctcaaacctcaatttacacctgaaatggcagaaaaatggccaaccattcgcagtatcattgcggtcgaacggcatcggtcagaaaacggcaaaggcacagtagagacgtcctactatatcagttcattgcctccccgacataagttattaggacactacattcgccagcattggcggattgagaatagcctgcattatatccttgatgtggtttttaaagaggattattcacgtattgttctgggagggcaaacgggtctaatttatacagatgaaaatcccactgtcaggattttcatcatatagccattatcccagccagccttctggcgcttagtcttcacgcctattttaactga

SEQ ID NO: 847 - DNA, 3502 bp, Xenorhabdus sp.; identical to SEQ ID NO: 846
  CDS (1853)..(2380)

SEQ ID NO: 848 - DNA, 3838 bp, Xenorhabdus sp.; identical to SEQ ID NO: 361
  CDS (3)..(404)

SEQ ID NO: 849 - DNA, 3838 bp, Xenorhabdus sp.; identical to SEQ ID NO: 361
  CDS (415)..(2184)

SEQ ID NO: 850 - DNA, 3838 bp, Xenorhabdus sp.; identical to SEQ ID NO: 361
  CDS (3186)..(3836)

SEQ ID NO: 851 - DNA, 4188 bp, Xenorhabdus sp.; identical to SEQ ID NO: 444
  CDS (2)..(931)

SEQ ID NO: 852 - DNA, 4188 bp, Xenorhabdus sp.; identical to SEQ ID NO: 444
  CDS (934)..(1560)

SEQ ID NO: 853 - DNA, 4188 bp, Xenorhabdus sp.; identical to SEQ ID NO: 444
  CDS (1612)..(2982)

SEQ ID NO: 854 - DNA, 4188 bp, Xenorhabdus sp.; identical to SEQ ID NO: 444
  CDS (4067)..(4186)

SEQ ID NO: 855 - DNA, 3739 bp, Xenorhabdus sp.; identical to SEQ ID NO: 36
  CDS (296)..(1105)

SEQ ID NO: 856 - DNA, 3739 bp, Xenorhabdus sp.
  CDS (2041)..(2619)
tgttttgcaatatcaacgccaaccggtgtacatttcatgttggggagtctccagtttgagggagctttatgcatcccgtattgggcactatgatgccggaaatctgcgaggctccacacctttatgtactttcccttcattcatcattgtgctccagatttaatgagtggggagcgttcatctcattcctgtaattttcattattatattaattgtgtacctctcataaataacatgctcccatatctcaatctgtgcgttaggcctgataacactcagatggagacataggagccatttcaatttatagatttatttaataattattaatctgttttcactgccgttttaatttcaatactgcttgccttaatctcaatgctgtccgcattcacatcatggatatgatctttggtcaggcggtataccaccgggcttaacagagcaatcgcaattaagttagggatagccatcatcgcattaagtgtgtctgctaatagccaaactaagcttagtgactgagtcgcgccaattggcagggcaatgatccagacaatacgaaaaggtgtaatggctttcgttccaaataagtactggatacatttttcaccgtagaaactccagcccaaaatggttgtgaaagcaaagatagccagagcaatcgcaacaaggtagtgccctcccgggatcactgacgagaaagaacttgctgttagtgttgcgccggtttctcctgtcagccagccaccggtaataacaattgtcagcccggtaatggagcaaactataatggtatcgataaaagtgcccaacatggcgattaagccctgccggatagggttttgagtttttgctgctgcgtgagcgataggcgcacttcccataccggcttcgttagagaacacaccacgggcaataccaaagcggattgcagcccagactgctgcaccggcaaacccaccctgagccgcaacaggagtaaacgcagacttaatgatcaaagcgattgcttccggaatagcggtcacgttaagccccagaacgataattccgatcgccaagtaaccgacggtcatcacaggcaccagcttacctgcaacatcagagatacgcttaatgccaccaatcagtaccgcaccaaccagaagaaccagtgcaacggcagtaatggctttatcaataccaaagctgctgtgtagtacttcagcaaccgagttggcctgtactgtattaccaataccaaaaccggccatgctgccaaataaggcaaataacgttcccagccagacccatttttttcctaatccatttttgatgtagtacatggggccgcccacatagttaccgtttttgtctgtttcacggtaacgtactgccagcacggcttcagaatatttagtcgccattcctaccaatgccgtcatccacatccagaacagtgctccttggcccacccatgacaatagcggtcgctaccccgggcaatgtttcctgtaccctattgttgcggataaatgcggtcattaatgcattaaaaggtgaaatctgcccttcgccacgttgtttgtttttttggaaaagtaatttaaaacctgttcctaatttacggataggcaggaaagacaggcggatttgcatgaaaataccaatgcccagaagaccaatcaacattggtactccccatacaaccccgtttattgcacctaaccattgtgtgatcagctccatatacaaccctcggaattataaataacaagttagcaacaaaattgtttcaactaaataaagagcattttgagaaaataatcgagaactaattgctaactcttgttaataaaacttaatactgtgagtatgatcaccgagtcaggcggcatgttaatgattttatttaatactgtccttcgccataacaaaatcaaggacaaagcactattttgtgaatttttatcacgtaatttggtaaattttaggtttttataatggaaaagtcggtattatttccttatgaatagttcattacataattaagggttatccgtggcaaaaattggttatatcagggtatcaacaagtgaccagaatagtgatttacaaagaaatgcattagccaatatccactgtgaaatgatttttgaagataaaatcagtggaagaaccgccaatcgtccgggattaaaacgtgcattgaagcatctgaaatctggcgatacactggttgtctggaagctggatcgtctggggcgcagtgtaaaaaatctggtgacattaatttcagaactgaatgaacagggaattcatttccaaagtctgacggatagtattgataccagtaccgctatggggcgttttttcttccatgtaatgagtgcactggcagaaatggaacgtgagttgatcgtcgaaagaacaaatgcaggcctggctgcggcccgggaacaaggcaggatcggcggacgacctgtcagattcaccgaagaagatcgacaacaggccgccagattactgcataaaggccatacccgaaagcaactatccattatttatgatgtatcactgtcaaccatttataaatatttaccagtgaatttagcctctacgtcaaccctttcagagtaaaaactacggctctggctagcgatactgtaaaaaatcgttgataacggtcacccattctgttgggttttccagcggtacagcatgaccactcttcacttccctgtactggctgtttttcacataccgatgaacttctcgcaccagataaggcgggataagcgtatcgtgacttaatccgataattaaagtatctttatttatccgggtcagataatcttcgatatttactgataaccccagagctatgcgtttatccgtctctttttctgagggtctggcacagatttgattgagagtatcctgccccagtgatgaaataaattccgggctaagaacatgggataagccaaaggcagttgctaaagcctgatcactgttttccagttttaaccaggttgtgaacatcaacctaaaatagggatcgtcattggttgcccacggagcagtcaatacccgtcgatttactaattgtggatgagtcgcggcaacaaccgcagcaacaacggcacccaaagaaaaccccactaaatccacaggctcatcgctactatcatcgataactgcgactacttgctctgcaaggtgttcaatcgtcagctcaccggatggcaaactggaattaccacagcccgcatagtcagggataataactgcccggtcacgattaaatggagtttttatctttccaaaactactatttccatcgctatttgtaccatgcagaagcattactggattctgggaattttcctgattttcactaaagtctttacgataagaaacaaatgaatctgccaaatggatcgttttttcgatcgtatgcactgtccattaccccgcctagatttaaatggtgctgttttatacactaaatcaaccagataacactgtgacctattccaaaatccagcatattgggtattgccctgttttagactataaaaaatgcatcactgtttacttttggcagttttaacaggcaaatgagccaattttgcactacaaattcagctcctgaaattgatacgccgttatgttgaatcgggttcagccccgcgactgcgtcggcatggagcgcccgaacccgatttacacataacgatattatctttagagcaca

SEQ ID NO: 857 - DNA, 3591 bp, Xenorhabdus sp.
  CDS (2465)..(3121)
acaattgatggaaatgtagagcttggtggcaccactctgtatatatctggcccaaatgcagccttgaagggtaatgtatccggagcgaaaaattcaattgttatcattggggaaaaagttgctacaacgggaaacacggattttgcttatacccatgatatgaatgttggctctgtcaatatattacccggcaaagtattacgtctgggtgatggacataaaaccgggaacattgccagcgacattgataatgggggaagcctttatttcaatcggagcgataaagttacctataaccacattattagtggaacaggttctgtttatcaggtagggaacggcacgactactctaacgggtatcaatacatataaaggagcaacgaatgttgaaggaggaatgattgttgttaacggtcaggtgggtacaacaacttcaacctttaatgctaaaaaaggaggaacggttggtggtacagggctaatcaatagtgtgacaatgattgaaaacggagggcgccttatcggtcaccaagataatactttgacatttggtaatgatcttattttcagcaacggcgcaaatgtaggtatatcacttggggcagaaaacatatctgtacccacattatttgatgttaagggtaatctgacactggccggaacgcttgacgtcacagatcttggcggtttctctgtcggtgaatacgatatattcaattatggcggaaaattaaactatgacagtaagttacctgattatggtatgacgctgcttacgggtggaaaaccgggctcactctctctcacgcacagaaataataaagtctatctcattaacaccgcgggtatacgcctgaactattgggatggcgataatgccagcaaacacgataatggtgtaattgatgggggtaatggcatttggcaggtcggtggaccagataattggacattaaaagaaggaaaactgacaggtgaacgtaataccagctggagtaatagcgaccagtttgccattttttccggtaccgcagggagtgtacgcgtcgataatagtggtggtaatgtcactgttaatggcatgcaatttagcaccagcggatacactatcaatggtcatccattaactttaaaaaatgatccaaaaaacagtgccaaaattcgcgttggaacggggaaaaaatcagcaactgatatggttgcgacgattgaatcaaacttaacgggttcagccacgcttgagacaacggattacggtaagctgattttgaagggtgagagtgattacaacgggggtacaaaaataacacgcggcgttcttcagataggtgatggcagcaccaaaggcagtattgttggcaatgttgtcataggaagtgaaggtacccttatatttaaccgttcagatgatataacgtttggcggtaatatcactggtgaaggaaagcttgttcaaaatggtacaggaacccttactctgactaacgctaatagccacacaggcatggcagaagtacaaagaggcacattccgtcagggcaaagagggggctttcagcccaacttcgctttatgacattggccaacaaggtaagcttgatacaggtggatttagtgcgacaatttccgctttgaataacagtggtaaagtattagttggcggagataacaaaactgttgggcgtacactaactattaagggcgattacaagggaaataacggtactgtaactttatcaactgtgttgggcggagataactcaaagactgataaacttgttgtaaagggcaacacatcgggttcaacttacctcgtgattaaaaatgccggaggaaatggagcaccgacgaatgaaggcattaaagttattgatgtagaaggaaagtcaaacggaacgttcactttgtctggcgactataattacaagggagagccagctatcgtggctggagcctatgcctatcgtctttataagaatggcacaaacaattttgatggaaactggtatctgagatcgtcgctgaccagtacaacacctaaccctaaccctaaccctaaccctaatccagaacctataccgaagccaccacgtctctatcaggctggtgttagcgtttatgaagcctatggacgagttttacagacgctgaatgaaccaggttccttacgagatagggctgatggttatgaagataggctacgtggtgtaagtgtttccagaaatgctattactggcgacaaaatagacgacaatataggtcaaatacctaatggattattggaacggaatttcaatttcttcatggcaaactattcaccacgggtttctacatctggggatgatgctataacctataatatgcgtagagctcagataggtatgggtaaacctttttatgaaaatgattcgaggcgtagcggctggtggggtttttctgcaatactcgaatattgatgcgaatatgggttctttacacggtgaaggtgatatcagtgcgagtggctacacggtagggacgacaagcacttgggttggaaataataagttttatttagatgggctagctcaggttacctattttaacaatgacctgaattcgaagactgccagtcggccactgggtaagaataaatcagctctggggtatgcgttcagtctggaaacggggcaaggatttgagctaagcccgaaatggacgctggctccgcaagcgcagctcacgttttcttctattggcataaatgactttcatgatacgtttgaagccaaagtccgttttgctcaaagcaggagtatgaaattacgtgcaggcgcaacaatagactacagccaaaagtggcatgatgttcagagcaagaaagaaaaatccacaaatctctacgggtttttgaacatacgtcaggagcttctggggcataatgataaggttaatattgctaatgtagcctttcaccatgggaatgaacgtctctggggggaggcgggtacaggtggttcttacagttgggataaccgaaaatcttttgtctatggtcaaacttcagccaataccagcctgaataattttgcagacagctatgagttgagtgcaaaaattggcataaaggtaatgtggtgattaaatcagagccactgtaactaataaaaatctatggttcccctcttttttgcaacactaatttttgatgaatttttggcttgcttaaatctatccggcgtcactgtaggcaaggagcctgcgcctcgatgagttccgcgcctgatgaaccttaaaaccgtgtcggcttgaaagagccattttttatgttaggtttctcatcaggccggtaggccgttcatgtcatcaataatcagtcttcgcaaaaccagtggggtaacatttaaataggttcacaatgacgccagctttaggcgacaaataccgtgtgttgtgtcgtcatggcccacgctatccgggcgagtttattagccaatgcacaggccacgatattagagtgctttattagagtgctttcgttcaagctgctgcttaacccagtcagccagttttccctgccggtgctcaatctgttgcatgaactttagagc

SEQ ID NO: 858 - DNA, 3591 bp, Xenorhabdus sp.; identical to SEQ ID NO: 857
  CDS (1)..(2457)

SEQ ID NO: 859 - DNA, 948 bp, Xenorhabdus sp.
  CDS (43)..(492)
  unsure (1)..(948): unsure at all n locations
nnnnnnnnnnnnnnnnnnnnnnnnnnnnnngtgctctaaagcgcttatttgcctgtagatcccaattatccgcaagagcgggttaactatatgctgaaggacagtggtgtcacggtcatcatttccgatgaggttaatccgtctttgagtgagcaatcgtatgttgtcattgacggaagtcgcatttcaattcatgagcatataaagcagcccaatttatctgccacagattcgctggcttatatgatttatacctcaggctctaccggacagcctaaaggtgtaatgatcaaccataattcagcggtaaaccggattgagtggatgcaggaacgttatccactcaatagcactgatgtgatattacaaaagacgcctatttcatttgatgtgtctgtctgggagttattctggtggtcaatttccggggcatctggtcacttattacctcccggggctcataaagaaccgcgagagataataaacgcgatannnnnnnnnnnnnnnnnnnnnnnnnnnnnnnnnnnnnnnnnnnnnnnnnnnnnnnnnnnnnnnnnnnnnnnnnnnnnnnnnnnnnnnnnnnnnnnnnnnnnnnnnnnnnnnnnnnnnnnnnnnnnnnnnnnnnnnnnnnnnnnnnnnnnnnnnnnnnnnnnnnnnnnnnnnnnnnnnnnnnnnnnnnnnnnnnnnnnnnnnnnnnnnnnnnnnnnnnnnnnnnnnnnnnnnnnnnnnnnnnnnnnnnnnnnnnnnnnnnnnnnnnnnnnnnnnnnnnnnnnnnnnnnnnnnnnnnnnnnnnnnnnnnnnnnnnnnnnnnnnnnnnnnnnnnnnnnnnnnnnnnnnnnnnnnnnnnnnnnnnnnnnnnnnnnnnnnnnnnnnnnnnnnnnnnnnnnnnnnnnnnnnnnnnnnnnnnnnnnnnnnnnnnnnnnnnnnnnnnnnnnnnnnnnnnnnnnn

SEQ ID NO: 860 - DNA, 845 bp, Xenorhabdus sp.
  CDS (66)..(845)
gtgctctaagggttatggcttggaaataaataaggatagagctgtgcaatgttatcgggtggaagatgagtaaagaaacgaacaaagtattcaggttgcattctgatttcgaacctggcggtgatcagccagaagccatccgcaaactacaggatgggctggaagatggccttgcccatcacacattattgggagtcacagggtcaggtaaaacgtttacgattgccaatgtcatcgccaatatgaaccggccaacaatggttctggcacccaataaaacactggcagctcagctctatagtgaaatgaaagagttttttccggaaaacgccgtagagtacttcgtttcttattatgattattatcagcctgaagcctatgttcccagctctgatacttttatcgaaaaagatgcctctgtaaacgaacatattgaacagatgcggctatctgcgaccaaagcgctgctggagcgaagagatgtggttgttgtggcttctgtttccgctatttatgggctgggtgatcctgatagctacctgaaaatgatgcttcatctgacaaatggtatgttgatcgatcagcgctctatcctgcggcgtttggctgaactgcaatatacgcgcaatgatcaggcattccagcggggaacattccgtgtgcgtggcgaagtcattgatatttttccggccgaatctgatgaacatgcgttacgtgttgagctgtttgacgatgaagttgaacggctttccctgtttgatccactgacgggtcagggtgagtataacgttccccgttatacggtttatcctaaaactcactatgtaacacctcgtggagcgtat

SEQ ID NO: 861 - DNA, 4885 bp, Xenorhabdus sp.
  CDS (1816)..(4506)
tctaaggttccgacgttacgtattttcatataattagcgagttctttattgtctggcattttactttccttcaaagcggaaaaaacgcctctttgatcaccctgatttttatgctgccctagtttttcttttgcatctattttcgtgatagtgattttaaatccgacaattgcctgacgttgtttattgagatattcctctggcattaactccgtgttattcattagccccggctcatatttattaactaaattttctaaagctgattgagtttcattgccatttaaaaattttgtgacaccgtaacagtgaacagcagtgtaattccaggtgggtacagcatgctcagattcataccacgtaggtgatatataggcatgagggccggtaaaaacggccagaacaggctgattttctaattctttccagtgtgggttggccttagatatatggccgtataacgtaccatattctccttcatcgggattcaggactaaaggaagatgtgttccggccaaagagggagaaaccagcaatccaaagctataagtagaaataaacttagtaatatcttctctgtcctgcatttgcattttgtgaggcgtgtacatgtttatcactccgataacaataaatttaactggtttcagaataacgctgacataataatataacaatcgtatatgaatatattattcaaaccaaaatttataactttctgtttttaaaattcgccgctaaaaaagttatctgatttttctattgatgctcgtttgtttttaagaagaaagctttcaaaatccgattttatttctggatcttccaatgcctgataatcaaataatgacacgcaggaagagtaattaaattcaacattgatagcttcattggaagcgcaatttgatgtgacttctgaatttgctctgtcaaaatccagcttaaaaagctttattttgggaatatatatgacttgattatcgttaccgactgcctcaatgatgcttgccagtgtgattgttgaataacggtcatcattttttttcagcccgagtctgatcgcatccccctgtttttgcagaaactgtgaaaagctcttcatgcccggagagttagtattcacaacgatatccatgatcagctgtaataaattggttgcgatagaaaaacctttcataacatgttgatatgtttgcttttcaatatttctgacactcattaatggcagctttcccataatatcaccccagaactggacatctgttctgtactgtcggccacgggtatcggagtatctgataatataatcagttgcaatagaagaaagggctatctgagttttttttatatcgtccatcttcttcataacattcgatttctcattgagttgtgatgcaatgacaaattgaactaggccatcagcatcgctgaatcgatggtcggagagagtgaaatgatcttcaatattatgacaaaaaaattgttcagcctgttttatctggtttagataattttcacgcttaataataatttcgttatccataattcgccttccaatagttaataaacaataatatggttgatgatgatattctgggcgctgaatatcagttcaggccatcaatagaacatatctattttgtgggtgtcatcactaaagtttgtcaataagtgaggaattacagcgggttggcaaaatatgtgaaagctgaataacaattatctactagtatgttatgtttaatcatatatatccgtcgtttttcaaattgaaattcatagggtgtagctggtcataaatataaaaatggaggagttatgtcgtctaaattgaaaacggactgtgcctcaacactttccattaacagtgaaacttctggcagtaagacctaccattattacagtttacctctgttatctgagcaactgggtgaaatatcccgcctccctaagtcactgaaagttctgcttgaaaaccttttgcgtaatattgatggtgattctgttgttgaagatgacctgaaagcgctggtggcatggcaacgaagcggtcatgctgagcgggaaattgcctatcgtcctgcccgtgtattaatgcaggatttcaccggtgtacccgccgtcgtggatcttgctgcaatgagggaggctgttttaaggcttggtggcaatgtagatcaggtgaatcctttatcaccggttgatctggtgattgaccactctgtcatggtggataaattcggaactgagcaggcgtttgaagagaacgttcagattgagatggagcgtaactatgaacgctatttatttttacgctgggggcaaaaagccttcaatcgcttccgggttgttcctcccggaacaggtatttgccatcaggttaaccttgaatatttaggcaaggcggtttggtatgaaaaccgtgacggaagggattttgcctacccggatacattggttggtaccgattctcataccacaatgattaacggtctcggtgtgcttggatggggcgttggcggaattgaagccgaagccgcgatgctagggcagccaatttccatgctgatcccggatgtggttggtttcaaactgacaggaaaattacgcgaagggatcaccgcgactgatctggtgctgactgtcacacagatgctgcgtaaacatggtgtggtcggcaaatttgttgaattttacggcgatggtttggctgatttgccattggcagatcgggcgacgattgccaatatgtcgccggaatatggcgcaacttgtggtttcttccctgttgatgatattaccctgagttatatgcgattaaccggacgcagcgaagatgaaattacgctggttgaggcttatagcaaacagcagggattatggcgtcatgccggagatgagccaattttcaccagcagtcttgagctggatatgtctacggtagaagccagtttagcggggccaaaacgtcctcaggacagagtcgcgctgggtggtgttccacatgccttccagtcctcgattgatctggatattaatagaaagcaggggctgcaatcatctatccctgtgacagtagataatcagacattttctttgcaggaaggggcggtagtgattgcagctattacctcttgtactaatacttccaatcccagtgtattgatgacagccggcttacttgctaaaaaagcggttgagaaggggttacaacggcagccatgggttaaaacgtcactggctccgggttctaaagtagtaacagaatatctgaatctggccggattcatgccttatcttgaaaagttaggctttaatttagtgggatatggctgtactacctgtattggtaactcagggccgttacaggatgagattgaggctgcgattaaacagtctgacttgacagtcggagccgtcctttccggcaaccgaaactttgaagggcgtattcatccattggtcaaaactaactggctggcttctccgccactggtcgtggcctatgctctttccggtagtatgaaacgcgatctgaccagtgaaccaattgggcaggatcagcaggggcgtgatatctatctgaaagatatctggccgagcagtaaggaagttgctgaagcggtggaaaaagtcagaaccgagatgttccacaaggaatatagtgcggtgtttgacggcgatgaaaactggcaagcactggaagtcgaaagttcagctacttattcctggcagccggattcaacctatatacgtcttccgcctttctttagccatatgacacaggagcctgagccggtaacggatatccatcaggctaatattctggccattttgggtgattcagtaacaacagaccatatttctcccgccgggaatatcaaggcagacagtccggctgggcgatatttacaggatcatggcgtagcaccgaaagattttaactcgtatggttcaaggcgcggaaatcacgaagttatgatgcgtggaacatttgctaatattcgtattcgtaatgaaatggtgcccggtattgaagggggatatacgcgccacatcccgtcacaaagccagctggctatttatgatgcggctatgcgttatcaggaagagaaaaaaccgcttgccattattgctggtaaagaatatggctctggttccagtcgtgactgggcggcgaaaggaaccagcttattgggggtaagagtggttattgcggaatcttttgagcgaattcaccgttccaatctgattggaatgggggtattaccgctggagtttccacagggcatcactcgtaaaactcttaacctgactggggatgaattcattgatatcggcggattgaatgatataaagcctggtcagattattgttgtgaaaattacttaccctaatggggaggtaactcaagttaatgcccattgtcgaattgataccaatacagagctcgcctatttctataatggcggcatattgcattatgttatccgcaatatgttgaagtaaaaataagcattgctgaaatgaaaaactgcgcccacaccgacgcagtttttattttcttttctatagaaagaaattagctggatttggacagcagatgccccatcaggcgcgcttttgtatcaaggtagtaagcgttattagggttacgccctacaataagcggcacacgctcgacaatgttaatgccggctccgaccataatctccattttttgcggattattcgtcagaagacggatagcacgtacacccagtaatttatacatgtctgaacacagagtgaaatctcgctcatcggcagcgaaacctaactgatggttcgcttcgacagtatcaacacctttatcctgcaatgcataggcccgaattttattcagtag

SEQ ID NO: 862 - DNA, 4885 bp, Xenorhabdus sp.; identical to SEQ ID NO: 445
  CDS (3346)..(4161)

SEQ ID NO: 863 - DNA, 4885 bp, Xenorhabdus sp.; identical to SEQ ID NO: 445
  CDS (1)..(306)

SEQ ID NO: 864 - DNA, 2777 bp, Xenorhabdus sp.
  CDS (97)..(1332)
cgaaatgggggggctttttttcgttgctttgctgtaaaatccctccaacctgattaaagaaaattaattcttttacgactcaaattaacatcatttatgaaatcctttgattcagaaaaatttcgctgccagtttcctgccctacagccatcctctgagtttccagaaccggcagtgtttctggacagtgcagcaacttccctcaaacccgcgtgtatgattgaggcgactcagtgctactaccagaatcacagtgcgacagttcatcgcagccagcacgcaacggcacaggcaatgacagagcgctacgaacaggcgcgttctttagtagctgaattgatcagcgccccacaaccggaaaatattatctggacaaagggcaccagcgaagccattaatctggttgcacaagggtattttcgttcccgcttatcggctggtgatgaaattatcgtcagtgaacaggaacatcattccaacctgctgccgtggctgattctggcagagcaaaccggcgctaaagttgtaaaatggccgattggcacaaataaacaaaaacgataccaaccagaaattgatacgctggcaacattgctcaatgaaaaaagccgactggttgcgattagccagatgtcaaatgtcaccggggctgctgtcgatttggaacaggtcacctccctcgctcatcagtataactgtctggtactggttgatggcgctcagggaattgtgcattcacccgttgatgtacagcgtgcagatatcgatttttatgctttttccgctcataaactctatggcccgaatggactgggtgtactgtatggcaaaggaacattactgaatgcaatgtccccgtggcagggcggcggaaaaatgctgacacaggtttctttcgacggtttcactccggaagccgttccttatcgttttgaagctggcacaccgaacgtggctggtgttattggtttcgcggctactctcgaatggttaaaaactgtcgatattccacttgccgaatcctatgccgttgccctgactgattatgcagagcaacaacttagtgcgattccgggctttaccagctatcgctcaacgggttccagcctgctggccttcaatattgccgatatacatcatagcgatctggccatgctcattgctgaacagaatatctccctgcgctcagggcaacactgtgctcagcctctgcttgatgcattaggaatagacggatgcctgcgtgcttcatttatgccttataacaataagtcagatgccgataaattagtcagtgcggtcaaattcgccctgtcgctgcttgaggattaaataactgatgacatcactttcaacccgaataccgtcagcatcaatcgttgctccgcatccattcggaaccgaaattacagaacagcaactgatggaaacatttgagcaatgccgattgtgggaagatcgctaccggcagcttatcgggcttgccaaaaaactaccggctctgcccgatgagctgaaacaacaacagattgaaatcacaggctgtgaaaacagggtttggttaggacaccagctacttgctgagaaccgcctgcatttttacggtgatagtgaaggccgtattgtaaaaggcttgctggcttttatcctgaccatagtggaaggaaaaacaccggaacagctcttgcagacaccattaatcgaactatttcaacaagcaggccttgaacaacaactaagtggctcacgagttaatggtgtcaaatcgctgattaacgccatacaagaaatcgcccgtacttatcaaaatcgttcataacagactgactaaagacgattctcccgctctgccttagcgaccattttctttaatgcgtgagagacggaaacaaacccaaaagttgccgtaaccatggttgcggcaccaaaaccagaagcgcaatccatccgttttgagccatcagccgtacttttagccgcacacactgtgccgtcagattgtgggtataccaactgttctgttgagaaaacacaatcaatacccagttttcctttaccgtttttcacaacacgataatcagatttcaggcgttcttttaatttggcagccaaagggtcttgcactgttttagctagatccactacctgaatctgagtgggatcaagttgcccgccagcgcctccggttgtcaccacagggatcttataacgacggcaataagccagcaaagcagctttcgggcgaacactgtcaatagcatcaatgacataatcaaaatccgctgatatcagttccgccacattatccggtgtaacgaagtcatcaatacaggtgacgcgacactcaggattgattgcccgtatccgctccgcaatcacgtccgtttttgctaacccgacattctgtaccagtgtgtgcaactggcggttagtattcgttatacagacatcatccatatcaatcagcgtgatcgccccgatgcccgtgcgagccaacgcttccgctgcccatgatcccacgccaccaataccgacaacgcagacatgtgaacgggcaaataatgaaagcgctttctggccatataatcgtgcagtaccagcaaaacgttgaagataagcatcagagagagaaacttgcatcattaataaatcctgaataaaacctatgccagctgataccgttatttcctgacaggtaatcggtcatgaatagataaaagatgataggtgatcgatagtttgaactgagcaggatcttactggtttgccgccaaaaa

SEQ ID NO: 865 - DNA, 2777 bp, Xenorhabdus sp.; identical to SEQ ID NO: 864
  CDS (1382)..(1819)

SEQ ID NO: 866 - DNA, 2777 bp, Xenorhabdus sp.
  CDS (138)..(950)
tttttggcggcaaaccagtaagatcctgctcagttcaaactatcgatcacctatcatcttttatctattcatgaccgattacctgtcaggaaataacggtatcagctggcataggttttattcaggatttattaatgatgcaagtttctctctctgatgcttatcttcaacgttttgctggtactgcacgattatatggccagaaagcgctttcattatttgcccgttcacatgtctgcgttgtcggtattggtggcgtgggatcatgggcagcggaagcgttggctcgcacgggcatcggggcgatcacgctgattgatatggatgatgtctgtataacgaatactaaccgccagttgcacacactggtacagaatgtcgggttagcaaaaacggacgtgattgcggagcggatacgggcaatcaatcctgagtgtcgcgtcacctgtattgatgacttcgttacaccggataatgtggcggaactgatatcagcggattttgattatgtcattgatgctattgacagtgttcgcccgaaagctgctttgctggcttattgccgtcgttataagatccctgtggtgacaaccggaggcgctggcgggcaacttgatcccactcagattcaggtagtggatctagctaaaacagtgcaagaccctttggctgccaaattaaaagaacgcctgaaatctgattatcgtgttgtgaaaaacggtaaaggaaaactgggtattgattgtgttttctcaacagaacagttggtatacccacaatctgacggcacagtgtgtgcggctaaaagtacggctgatggctcaaaacggatggattgcgcttctggttttggtgccgcaaccatggttacggcaacttttgggtttgtttccgtctctcacgcattaaagaaaatggtcgctaaggcagagcgggagaatcgtctttagtcagtctgttatgaacgattttgataagtacgggcgatttcttgtatggcgttaatcagcgatttgacaccattaactcgtgagccacttagttgttgttcaaggcctgcttgttgaaatagttcgattaatggtgtctgcaagagctgttccggtgtttttccttccactatggtcaggataaaagccagcaagccttttacaatacggccttcactatcaccgtaaaaatgcaggcggttctcagcaagtagctggtgtcctaaccaaaccctgttttcacagcctgtgatttcaatctgttgttgtttcagctcatcgggcagagccggtagttttttggcaagcccgataagctgccggtagcgatcttcccacaatcggcattgctcaaatgtttccatcagttgctgttctgtaatttcggttccgaatggatgcggagcaacgattgatgctgacggtattcgggttgaaagtgatgtcatcagttatttaatcctcaagcagcgacagggcgaatttgaccgcactgactaatttatcggcatctgacttattgttataaggcataaatgaagcacgcaggcatccgtctattcctaatgcatcaagcagaggctgagcacagtgttgccctgagcgcagggagatattctgttcagcaatgagcatggccagatcgctatgatgtatatcggcaatattgaaggccagcaggctggaacccgttgagcgatagctggtaaagcccggaatcgcactaagttgttgctctgcataatcagtcagggcaacggcataggattcggcaagtggaatatcgacagtttttaaccattcgagagtagccgcgaaaccaataacaccagccacgttcggtgtgccagcttcaaaacgataaggaacggcttccggagtgaaaccgtcgaaagaaacctgtgtcagcatttttccgccgccctgccacggggacattgcattcagtaatgttcctttgccatacagtacacccagtccattcgggccatagagtttatgagcggaaaaagcataaaaatcgatatctgcacgctgtacatcaacgggtgaatgcacaattccctgagcgccatcaaccagtaccagacagttatactgatgagcgagggaggtgacctgttccaaatcgacagcagccccggtgacatttgacatctggctaatcgcaaccagtcggcttttttcattgagcaatgttgccagcgtatcaatttctggttggtatcgtttttgtttatttgtgccaatcggccattttacaactttagcgccggtttgctctgccagaatcagccacggcagcaggttggaatgatgttcctgttcactgacgataatttcatcaccagccgataagcgggaacgaaaatacccttgtgcaaccagattaatggcttcgctggtgccctttgtccagataatattttccggttgtggggcgctgatcaattcagctactaaagaacgcgcctgttcgtagcgctctgtcattgcctgtgccgttgcgtgctggctgcgatgaactgtcgcactgtgattctggtagtagcactgagtcgcctcaatcatacacgcgggtttgagggaagttgctgcactgtccagaaacactgccggttctggaaactcagaggatggctgtagggcaggaaactggcagcgaaatttttctgaatcaaaggatttcataaatgatgttaatttgagtcgtaaaagaattaattttctttaatcaggttggagggattttacagcaaagcaacgaaaaaaagcccccccatttcg

SEQ ID NO: 867 - DNA, 3517 bp, Xenorhabdus sp.
  CDS (31)..(294)
gtgctctagaccgccataacgtgacgtgtgctgagggaacagggctatcgtgtgcatattcagagaaaagcggcacgtaataagcccttatcacactgccaaaaaggccgaaataagaaaatagcgaaaactcgggcacgcgtagaacatatctttggctcactctctcagatgggtgaaaaaattattcggacgataggccagctgcgagccaattttgcgatgacgatgaaggcaacctgctatgatttgcaacgtttggtttatttcggaaaatcgggtattcatgctttttaatttcgagatgtgatgaaaaagtgatgcgtttgtttttttcccctgaacaagcaagaaaaagtcatacacaataaggtcagttattggtgagttcaaaattgatcttattttttgtattgagagtttttagaggttcccttataaatataaaaatattatctctgtatttttcagattgctgctatgacatccattttttatattttatacacatcaataggaaaggataatggacagacacaatccaacaaacgatactaatcccacatttattcccggtaataaatatgtactctcttgggatagtgcaggtaattggatgataaatggtaaatccttccaatttttcggcggaaaattcatccttgacgggttccatctcaaaattgggatcaccggatcaaaatgatcaaagctctggggtgtaatacgatatcactctatctaatgtggaattttcatgagctacctgatgggtcttttgatttctcatcgtcagacaaaaatatcgcacacttcatcaatctatgtgcaactaacaatatgtgggtattgttacgtcccggaccatattcttgcgcagaatgggattttggtggattaccaccacgtatgttagccgatccccagttccatgactcttcagataagttacaaatacgcggcaatttcccaaattacatgtcagccgtactaaaatggaatacagctctttataaacagatcattaaaggacggacgctgacctcaggtggcccaatcatgctgatagcgctagaaaatgaatatacctcttggagtccggacgatcccgctcacccaactgcgctggcatcacaatgggtaagtttaggctatacagagaagttttgtgtttgtgaaggctgggcgaacgctttcaaaaataataacattccactaccggccaatacggcatacgggctgacagctgaaggagatagtgtttcacatcataatgaagctaaacaatactatcagatcgcaagttttggtgcagaatgctatcccggctggatatgtcattggaccgaggaaaaacaaacaattaacatcgatacttttgcagatatagtcgcaacgctggcaaaagcaggttgttcatttgtcatttacgttgggcacggaggtactaactttggctttacggctggcagtaatggaaagttaatttcatcagccccagtgataacctcttatgactatggcgcaccagtatcagaaaatggccggcaaaatgcaaatttccaagttattaaagctgcctatgctgaaaatgcttcatatatagtaccttctaatccaattcctacgcctatccccagtattactgacggcgaaatctcgccgatatcgaacagccaattcgttttcagtgattttctatctaatgtcattccgaccattccaaaccccataccacagaccattgagtagatcgcgttgactcttaacagccaacaaccagccagtgctggtatttatccggctggcatcgctgtttatcaaacagagctacctaaatcaggttatgatctctctgtggaattcaatcggccacccgattttgcattggccttcctcaacggggttcgtgttacaagcgatgtattaacgacggtaaaagggggaaaaatatctcctgtaatttcattcaaaattgatgatgtgccgccaaattctatattacagatcgtctgtatgccattcggacgagcaaattatggtggtgatgaaatgagaacggatggacgtggcctttctagcaacgtaattctgaatggtgatatgctgacaaactggaagatgactctttatccgctattggcatcacaactggcgaaactgccttttggtatcaataagcccacgggtcctcgtccattttttgctaaagcaattcttactattgatattcctaaagacatgtatattgatatgtcctcatggggtactggctacgttttagtgaacggacacaatctcggccgttattggacgttggcaggccctcagacccggctatattgcccaggagtgtggttaaacagtggcagtaatacgattatcattttcgaatttactcaggctactgctggtacacttagcttctttagctcgagtaatttgccatataaccagtagaatataagcttagtactatcagagatgataggtttagatgatggcagagcatacagaataatccggcctcacccttcgggccaacgcttatgcgttgttgtctcgcttcgctcggctcgaacctgtgaccaattgattaaaagccaacttctctaccgactgaggttattaattatttgaagaatattggattgagaatttagatggtgggtcgtgcaggattcgaacctgcgaccaattgattaaaagtcaactgctctaccgactgagctaacgacccatctggggtatatctgaattgatgatttaaatggtgggtcgtgcaggattcgaacctgcgaccaattgattaaaagtcaactgctctaccgactgagctaacgacccaattaggtaattctgatttttatatctaaatggtgggtcgtgcaggattcgaacctgcgaccaattgattaaaagtcaactgctctaccgactgagctaacgacccaattagataattttgatttggatatttagatggtgggtcgtgcaggattcgaacctgcgaccaattgattaaaagtcaactgctctaccgactgagctaacgacccatctaaaatatcagtgtgatactgcggaacaatctaatgaagtggtgggcgataccagattcgaactgatgaccccctccttgtaagggagatgctctaccaactgagctaatcgcccacttcatgctgactattactgcatgatgactattaccgaataattatctgtaacgacatcgatatatcactgatttatgattggtgggcgataccagattcgaactgatgaccccctccttgtaagggaggtgctctaccaactgagctaatcgcccaatcataaaatcattttttatcactacggccttaccgctttcagtttatcactgagagtggtgggcgataccagattcgaactgatgaccccctccttgtaagggagatgctctaccaactgagctaatcgccccgtcgtgatggagtcgcattatagggatagttcgaggtgagtctttaaa

SEQ ID NO: 868 - DNA, 3239 bp, Xenorhabdus sp.; identical to SEQ ID NO: 316
  CDS (1)..(321)

SEQ ID NO: 869 - DNA, 3239 bp, Xenorhabdus sp.; identical to SEQ ID NO: 316
  CDS (336)..(878)

SEQ ID NO: 870 - DNA, 3239 bp, Xenorhabdus sp.; identical to SEQ ID NO: 316
  CDS (1341)..(1766)

SEQ ID NO: 871 - DNA, 3239 bp, Xenorhabdus sp.; identical to SEQ ID NO: 316
  CDS (2391)..(3239)

SEQ ID NO: 872 - DNA, 2617 bp, Xenorhabdus sp.
  CDS (1708)..(2433)
ctgctaagattgacagtgcactgggtagcctgaaaaacctgattgttgttgatcatcagcataccgccattatggataaagcccatctgatcctctctgctgtgcagtttcgcagaaagcgatggcacactggtgaatcaggaaggtcgtgcgcagcgatacttccaggtatatgagcctgcattctatgataaatccgttgttatgctggtggctgaaagttatattcttgggtgcctggaggcgttagataagccattggaaatagacctaatttatggcttccacggtaacagggtgaatttgtccagttcagcattaaacgcccaacagtaaaaagcctatcccctgcccgtatacctgcgcgaacggctaccgccaaatgtggcggtagggttaatttagacaaatttgtccaatagggctaagcgtatataagagtaaatttctttttttgcttgaattttaataatatctatctgttgctggttttattttcctaccgccatcttcaatataattatcgtaaatataaatactactatccgcgaatatgaaataagagttctgttggcctctgattgataccgccattacaaaaccacgataatcggtacgatcccaagagtcaccatcgcccggcgccaacctaaaccagcccttgttcccgtcatccccccaagcattaatactaactgaaacagtattacttgaacgattctctattcgcataatatcccctatattttttaatacatagaaaataggattagtggctttatcaaaaacaccttcttctaaacacgattctgattatggttttatattcaatacccacaacaataataaagataagtggcctattacattaactgccgtaatgccggtagcttgcaaagcaccaccaacccgcaggggcaaagctcaggtattacgagcaatgcaaagccctctatagggcttagctcacagggtcgcggaaaacttttacccgacctcataaccaattgataaaacttaaatacggtgaaacgcagagtttgaaccgttatgggaattcccatagcgcccggcttcctcaaattgaggtttttgagaatatcaaagggttaggtttaattccggcgttttactgagaccggtataacccattgaaaagtaatcagagtgtaaatttacattccgatctaaaaatacgccgttgatgtccggggaatggatacagcttccaccattggtgattgctgagattatcaaagagttaaacgggcagtgtgtgaatatgcacactgggtagaaatcagcttcccccaatgggggtttttgaaaatatcaaagggttaggtgtatctttccgtgtgccgttctgaaccaagctgcatatttacaccttgcccgtcaatccaccagtaaagtgattccgtttattcaacagaattaagcctattcagttagttagacattacttggcaatacttcccccattggggtaagttaataacaatcaataagttatacagctgtcctaccaataactatttgattaggcttaattgtcccatccctgcactctcagactttggacaaaaaccaccagctatagcacaatgttattcgatggggctatcttaccggaagagaaaagcggtacgccttaccgcctgcatcatcacctccattattaaggcacaacgttataaggcggacgtgatgaaagctcccaagccaaaacctctaatatacccgtttgaaaacccctctataaccgcaggattagcggcaatcaacgcaactgatcccccttttaaagttgaacctcatcatctcacttcttggtttaaagagggaattattgcccgttatgtactgcttaatgatatccgtgaaatgtggggcaaagaggcattgagagctgagtttgaagccatattcggtgaagctaaacattgtacattaattgcttctaagagatctgatagagattgggacacattagaagatatagaaatggcaacatatagcgtacatgcaattgataccgcagcagctctatatgttgaagcggaaatttccgcaccatctattactcctgaggatatcggatcagatgaacaaagcggagaaaaagcagtatttaattatcccatgcctgaacccgttctacctcgctatgaagcagagaaaatctactcaatgcttcataaccagccaatatctgaaaaagaacccagaatgaaggtaacttcgaacatatgcacggctcttgttgaatcgctatctaaacatggttttactgagaaagattttaagggaagcataaagcaattacagagcaaaatggctaataagggctttaacggagtattaacatcagtcaccgataaaacgttaattgactggttaaagaaaggtggggtaaggccagaaaaataatggagtttttgaaaactccgaggaatttttaaaactccaccacctcatctaaataaaacagtagtctttctctcgtaccgatcaacaacaaccgaggaagactattatttatgaaacactctcttatccgattacccgaagtttgtcgccgtactggtttaggcaagtccacggtgtataaata

SEQ ID NO: 873 - DNA, 1774 bp, Xenorhabdus sp.
  CDS (1)..(150)
aaggtgatggagaacaatccgatagccttacgcctgaaagaattggaaacactggaaagtattgcagaacgtattaatcagatctcagtgtatggcggtttagatcaagtattaaacggattggtacaaattaaaggagaacaaaaatgactataactgaaatgaaaaccaacgcttataacttattgactcaggagagcggtgctccggtaaaaatgtggacgaatggggtgccggttgatccaaaagcgattactcaattacaaaacacggccaagatgccttttgtatttaagcatctggccgtgatgccggatgtacatgtcggtaaaggttctaccatcgggagtgtgatcccgactcgtggcgctattatcccggcagccgttggggtggatattggctgcggaatgattgcggttcgtacttcattggtggcatcggatttaccggataatttgctgaatatccgccatactattgaagctgctgtaccgcacgggcgtaccgtgaaccgtggcggacgggataaaggttcctggaataaggtgccggatgtggtggatcaacattgggcaacgttggctgatcgctttaaacatatcaccgataaatacccgaaactactgaacaccaataaccgtcagcatttgggaacgctgggaacaggaaaccattttattgagctgtgccttgatgaagcggatcgtgtttgggtaatgctgcatagcggttcccgcggagtaggcaatgccattggtaatctgtttattacactggcgcagaaagatatgcagcaacatatcgctaatttgcctgatcgtgatttggcgtattttgaggaaggaaatcgctacttcgatgattatatggaagcggtggactgggcacaagactacgcgcgccataatagggaagtgatgatgcatcgggcacttgaggcgttatcacgcgagataccaaaaccgttcacaacacagcaggaagcggtgaattgccaccataactatgtacagcgtgagcagcactacggtgaagaggttttggtaacccgtaaaggagcggtatcagcccgtaaaggccagatggggatcattccgggttcgatgggggcaaaaagttatattgtccgagggcttggaaacgaagaaagtttttgctcatgtagccacggcgctgggcgcgtaatgagccgtactgaagcgaaaaaacgctttacagtgaacgaccagaaacgagccacttcgcatgtggaatgccgaaaagatagtgatgtgatcgatgaaattccaatggcgtacaaagatattgatgcagtaatggctgcccagtcttcattggtagaaatcgtgcatactttacgtcaggtagtttgtgtaaaaggttagaaaaatcgcagcaggaaaaaagaaaatggaaagggaagcagaaacagtcagcccggaaatgcgggttcgtattaaaagagaactgtataaaatagagaaaaaatatggcgtgcggatactgtacgcctgtgagtctggcagtcgagggtggggctttgcatcaccggacagtgattatgatgtgagattcatttatgttcaccccgtggactggtatctcaaagtggaagccgggcgggatgtgattgaacagccgataaatgatgagctggatattagtggctgggagctgcgcaaggctttaaaactactgaagcaggcaaacccgactttgatggaatggctggattctcccgtcatctatagctgaatcaaaataattagag

SEQ ID NO: 874 - DNA, 1774 bp, Xenorhabdus sp.; identical to SEQ ID NO: 873
  CDS (162)..(1388)

SEQ ID NO: 875 - DNA, 1774 bp, Xenorhabdus sp.; identical to SEQ ID NO: 873
  CDS (1447)..(1758)

SEQ ID NO: 876 - DNA, 4810 bp, Xenorhabdus sp.
  CDS (4283)..(4804)
ccccacatcagcgtcccgactaacgccccaacttcaaacattgtaaagccggaaatagcagtttcttttgaatgccctaattcctgatacgcatataccgttgaccattggtcaataccaattcgcacgatataaagaaaaatattggcaaagcaaagaagccagatcactttgtttttcagaatatactcaacaaaaatctcccgcttggtcatttgattttcttctgctgctatatcctcttcgctgatcgcctcaccaaataactcttctgctttacccagaccataactttcaggcgaatcgcttccatagcgtaaaccaataaaaccgatgatcagagcaataatggaagggaaaataaacatcccgatgacatgaccatcaaataaatagtgcgctccaaacaaagcaactcctgccgcacctgcgccacccacattgtgcgacatattccaaagcccaagataggtgcctcgcttgctacgcggagtccatttggtaatggtggaataacttgccggcccacctatactttggaaaaaaccactcagcgcataaaatgccaccatcaaaaaaatactgatcccggagctacccatgctcatactgaaaccaagcatggccagaccagacaaaatcaacataaatggcaaaaattgtttggtattttttccatctgcataataagccactaacgttttgcctacgccataagtgatagagaaccccaaccctatcaacccaagctgcgtcatcgacaaaccataagtagaaaccatatcgttctgggcaatattgaaattcttgcgcaccagatacatcgccatatagccaatgaaaaccaccagatatgactgcataaaaggcttaaaccacatcttgcggcgtatatcgactggaagatccaacgtcggttggcgaacttgttccagaattttaatcatatgaaatcctcagataaccacgacaaagaaaacctttttaatgcaggtggaaatcaaaaaggtggctcgctaaaacgcgaattttttcgtaggtattgttattactgagattctaagaaaggggttaaaaattggcttgagctattgtcttagataaactaggaaaatttcctagttttgtctttataggaagtaaagcgtgaaaagaatcacaatctctcagcgaagcaacctgagacgatagatatcttaattcctatccggccagtgccatgatggctcctccagtatatccctaccaatgatatgagtttcacctaattgcttttcaagctgaatagtctgacaaagcgaagagtgctgtagtgctgaaatcaatactggagagtgtgaaacaacccaaacctgggtctgagcagaggcctttataatcaatttagccaatgaaggtaaaagttctggatgcaggctggtttctggttcattcaatatcatcattgatggtggacgtggtgtcagcaatgccgcaatccataacagatagcgtagcgttccgtcggataattcagtaccggagagagcgcgcattaaaccatactgacgaaactgtaatgtaaatagcccttcattggaacgggaaattgccaaagaagctccctgaaaagcatcattaaccgattcatccagcaattgtgcatcacctatctcgcggatagtttgtaacgcagcagccagatcccgcccatcatgatgcaataccggagtgcgggttccaatctaagctttgcgggcaggagcatcactatctgtccggaaatgatcatagaaacgccagccacggataaactcacgcatatgaaaaacttctggggccattgaaggatcagaaatatgatcaaacatactggtgaaactattaatatgctctgaagtaatttgccatttccgcccatcacgaacccggcttattgccccttttcgttctaccaaaacacctgccggatgataacgccctcctccccaaatacattcctgtttaatttctggatctaacgcaaaagcagagctagacgggtgaggcaaaccaagggagatggaataaccaaacgaatctgtcgcaaacccaagacgtaaccgttttacttcttttctaaccccaccctgtactggcatgtgccctgcacgtaccgcacctgaaaaattttccggcccggcccaaaatgcagaatccagcccaccttccagcgccagagaattcactacaccaccctgagctgtttcagataacaaacgtaatgcccgatataaatttgatttaccgctaccgtttgcgcctgtaatcacattaagaggagcaagagtaatacgaagatcacgaatagaacgataattattgatagctaatgtcgatatcataaaatcaatatcttcctgattatcatttttattttcagcaatcattaaatcaatagaaataatgatatccgtggggatgttatccttacctaaaagaatataaatggcaatcatttttaacagaaaaaatcccatacaagaatcacgcgaaaaaaatagttagcaaaccaatcatttcattataatatttattattctaacatttctttataccactctatttgatctctatttttttctacatactttttccactctgagctttttgatttattcagacaagagatatctatttttttacaaatagagaaattattagtggataaatcaactaactttgttaatgcaactatattaacacctaatttattagattcattcttatctccactaaccactttattaatctgagatataatagacttagcaacttgttcttttgctttattttctgatatacaactctttaaaaaaggctcaccaacagcagttccggcaacttcacaggctaaagtaattttttgtcctttacgtaatgttaacgcataatcctgaaaatcattactcagtgctgcatgcacagtatctaaaaaaccgccagcacttaatgcaatgaagactttaccatcagaagagtaattatttatacttttaataattccgaaaacgataactttcttatattttaaatcattatttgctttaacttcattttcggaataccttctgtataaatcctttgcagttatatgaatatacccataatcactagacttttttttgccagaaaaaaacagtttgacatcattatcaacaagcgattttgcaaatttagcatcattttcagtaaaaggaataatcccactgtttgccacagcaatttgccaaaataacccagaaaccaccgcaacaaccaattgtgctagttttctaatcataatcaataacctaaatttcaaaccaacaaaacttccacatttaaggaatccatttactgataaatttaatccacattaccctgaataatagtcaatgtaaaatattaccagttattatcattaaacaataacataacaatataatttatccctcttatccaatgaagttaaaatctcagaaaagtaatattgactattaacaatctaaattactgattgaataatttattaattatctatttttaaggttatttgtaatattaatcttaaacaggcatcgctaccgacctaatggaacttgctaaatagattctatgctatgcctgttctattttaatacttatttatgacaaagtataaataccaataacagaaactcttgttacattaccatccaactcctgggcatgaacaagtgcattatcctccagaatagttaaaaactgggcggccgaatttttcgtcatatcaatatctatagcaatctgagtgctaactaaaactccatcattattatcaagaccgttataaacgacgatatatttactcatgtcttattctcctatttatattatctcctatacactacattggctattttcctttttccatatgattaattaatggtctatttttaaatttcatctaacaatatttatacctgaattctggaataatgaatccgtcggaagtgaactttttcatcccaaagcatgccaccgctgagagacagaacatcaacatatgtatttataaaagtgaggattgggatgagtaaacagaaccatcaatatttagctcaaaatacgttctattggtttttcgtgtaaattccttctgttaataatgtagttgtctatgtcacaatggcgtcttaaacacagcctgagggtattaaggccatgctgtgagaataaattggatacaactatggaagaaaatatacaacccacacacccacctgaaactgaaggctcgcatcttcagcgaagcctgactaaccgacatatacagcttattgctatcgggggcgctattggaaccggcctgtttatggggtcaggtaaaactatttcccttgcagggccttcgatcattttcgtttatatgatcatcgggtttatgctgtttttcgtgatgcgagcaatgggagagctattgctttccaatttgcattataaatcattcagtgactttgcagctgaccttctgggaccatgggccggtttttttgtgggctggacttattggttttgctgggtgattaccggtatcgctgatgttgttgccatcacctcttatgtcgggtattgggcacctggtttccctgaatgggcgacttctcttttatgcgttttgattttactgacgctgaatctcgcaacagtcaaactatttggtgaactggaattttggtttgcgatgatcaaaattgttgccattgttgccttaattgtcattggtggcgtattgattggtagtcatttccagtctcccctttagagcaca

SEQ ID NO: 877 - DNA, 4810 bp, Xenorhabdus sp.
  CDS (3864)..(4808)
tgtgctctaaaggggagactggaaatgactaccaatcaatacgccaccaatgacaattaaggcaacaatggcaacaattttgatcatcgcaaaccaaaattccagttcaccaaatagtttgactgttgcgagattcagcgtcagtaaaatcaaaacgcataaaagagaagtcgcccattcagggaaaccaggtgcccaatacccgacataagaggtgatggcaacaacatcagcgataccggtaatcacccagcaaaaccaataagtccagcccacaaaaaaaccggcccatggtcccagaaggtcagctgcaaagtcactgaatgatttataatgcaaattggaaagcaatagctctcccattgctcgcatcacgaaaaacagcataaacccgatgatcatataaacgaaaatgatcgaaggccctgcaagggaaatagttttacctgaccccataaacaggccggttccaatagcgcccccgatagcaataagctgtatatgtcggttagtcaggcttcgctgaagatgcgagccttcagtttcaggtgggtgtgtgggttgtatattttcttccatagttgtatccaatttattctcacagcatggccttaataccctcaggctgtgtttaagacgccattgtgacatagacaactacattattaacagaaggaatttacacgaaaaaccaatagaacgtattttgagctaaatattgatggttctgtttactcatcccaatcctcacttttataaatacatatgttgatgttctgtctctcagcggtggcatgctttgggatgaaaaagttcacttccgacggattcattattccagaattcaggtataaatattgttagatgaaatttaaaaatagaccattaattaatcatatggaaaaaggaaaatagccaatgtagtgtataggagataatataaataggagaataagacatgagtaaatatatcgtcgtttataacggtcttgataataatgatggagttttagttagcactcagattgctatagatattgatatgacgaaaaattcggccgcccagtttttaactattctggaggataatgcacttgttcatgcccaggagttggatggtaatgtaacaagagtttctgttattggtatttatactttgtcataaataagtattaaaatagaacaggcatagcatagaatctatttagcaagttccattaggtcggtagcgatgcctgtttaagattaatattacaaataaccttaaaaatagataattaataaattattcaatcagtaatttagattgttaatagtcaatattacttttctgagattttaacttcattggataagagggataaattatattgttatgttattgtttaatgataataactggtaatattttacattgactattattcagggtaatgtggattaaatttatcagtaaatggattccttaaatgtggaagttttgttggtttgaaatttaggttattgattatgattagaaaactagcacaattggttgttgcggtggtttctgggttattttggcaaattgctgtggcaaacagtgggattattccttttactgaaaatgatgctaaatttgcaaaatcgcttgttgataatgatgtcaaactgtttttttctggcaaaaaaaagtctagtgattatgggtatattcatataactgcaaaggatttatacagaaggtattccgaaaatgaagttaaagcaaataatgatttaaaatataagaaagttatcgttttcggaattattaaaagtataaataattactcttctgatggtaaagtcttcattgcattaagtgctggcggttttttagatactgtgcatgcagcactgagtaatgattttcaggattatgcgttaacattacgtaaaggacaaaaaattactttagcctgtgaagttgccggaactgctgttggtgagccttttttaaagagttgtatatcagaaaataaagcaaaagaacaagttgctaagtctattatatctcagattaataaagtggttagtggagataagaatgaatctaataaattaggtgttaatatagttgcattaacaaagttagttgatttatccactaataatttctctatttgtaaaaaaatagatatctcttgtctgaataaatcaaaaagctcagagtggaaaaagtatgtagaaaaaaatagagatcaaatagagtggtataaagaaatgttagaataataaatattataatgaaatgattggtttgctaactatttttttcgcgtgattcttgtatgggattttttctgttaaaaatgattgccatttatattcttttaggtaaggataacatccccacggatatcattatttctattgatttaatgattgctgaaaataaaaatgataatcaggaagatattgattttatgatatcgacattagctatcaataattatcgttctattcgtgatcttcgtattactcttgctcctcttaatgtgattacaggcgcaaacggtagcggtaaatcaaatttatatcgggcattacgtttgttatctgaaacagctcagggtggtgtagtgaattctctggcgctggaaggtgggctggattctgcattttgggccgggccggaaaatttttcaggtgcggtacgtgcagggcacatgccagtacagggtggggttagaaaagaagtaaaacggttacgtcttgggtttgcgacagattcgtttggttattccatctcccttggtttgcctcacccgtctagctctgcttttgcgttagatccagaaattaaacaggaatgtatttggggaggagggcgttatcatccggcaggtgttttggtagaacgaaaaggggcaataagccgggttcgtgatgggcggaaatggcaaattacttcagagcatattaatagtttcaccagtatgtttgatcatatttctgatccttcaatggccccagaagtttttcatatgcgtgagtttatccgtggctggcgtttctatgatcatttccggacagatagtgatgctcctgcccgcaaagcttagattggaacccgcactccggtattgcatcatgatgggcgggatctggctgctgcgttacaaactatccgcgagataggtgatgcacaattgctggatgaatcggttaatgatgcttttcagggagcttctttggcaatttcccgttccaatgaagggctatttacattacagtttcgtcagtatggtttaatgcgcgctctctccggtactgaattatccgacggaacgctacgctatctgttatggattgcggcattgctgacaccacgtccaccatcaatgatgatattgaatgaaccagaaaccagcctgcatccagaacttttaccttcattggctaaattgattataaaggcctctgctcagacccaggtttgggttgtttcacactctccagtattgatttcagcactacagcactcttcgctttgtcagactattcagcttgaaaagcaattaggtgaaactcatatcattggtagggatatactggaggagccatcatggcactggccggataggaattaagatatctatcgtctcaggttgcttcgctgagagattgtgattcttttcacgctttacttcctataaagacaaaactaggaaattttcctagtttatctaagacaatagctcaagccaatttttaacccctttcttagaatctcagtaataacaatacctacgaaaaaattcgcgttttagcgagccacctttttgatttccacctgcattaaaaaggttttctttgtcgtggttatctgaggatttcatatgattaaaattctggaacaagttcgccaaccgacgttggatcttccagtcgatatacgccgcaagatgtggtttaagccttttatgcagtcatatctggtggttttcattggctatatggcgatgtatctggtgcgcaagaatttcaatattgcccagaacgatatggtttctacttatggtttgtcgatgacgcagcttgggttgatagggttggggttctctatcacttatggcgtaggcaaaacgttagtggcttattatgcagatggaaaaaataccaaacaatttttgccatttatgttgattttgtctggtctggccatgcttggtttcagtatgagcatgggtagctccgggatcagtatttttttgatggtggcattttatgcgctgagtggttttttccaaagtataggtgggccggcaagttattccaccattaccaaatggactccgcgtagcaagcgaggcacctatcttgggctttggaatatgtcgcacaatgtgggtggcgcaggtgcggcaggagttgctttgtttggagcgcactatttatttgatggtcatgtcatcgggatgtttattttcccttccattattgctctgatcatcggttttattggtttacgctatggaagcgattcgcctgaaagttatggtctgggtaaagcagaagagttatttggtgaggcgatcagcgaagaggatatagcagcagaagaaaatcaaatgaccaagcgggagatttttgttgagtatattctgaaaaacaaagtgatctggcttctttgctttgccaatatttttctttatatcgtgcgaattggtattgaccaatggtcaacggtatatgcgtatcaggaattagggcattcaaaagaaactgctatttccggctttacaatgtttgaagttggggcgttagtcgggacgctgatgtgggg

SEQ ID NO: 878 - DNA, 4810 bp, Xenorhabdus sp.; identical to SEQ ID NO: 877
  CDS (3276)..(3614)

SEQ ID NO: 879 - DNA, 4810 bp, Xenorhabdus sp.; identical to SEQ ID NO: 877
  CDS (2403)..(3086)

SEQ ID NO: 880 - DNA, 4449 bp, Xenorhabdus sp.
  CDS (3730)..(4449)
taatgcctttgccattcatggttccttgccgagcatcgtcaactttatcagtcagtcctttgataccagtaagtgcaacattcgcaggtgctttccagacaccacgctggttatccgtttggcaataaactccggcaatggcggagctgggaggaagaataagctgacgttgttgttcctgttttaatctggcatcaatactccgcgccagcgtttcattttttttcctgagttcatccagatttttcagtttatctttgcccgattcatcctcgtatccactgataatcacattcttatcaacgggtaaggcagagaatgtcaggttagtttccaactgaggataatacgcggcaattctggagcgagttcccgaacttggtatcgattcaccatcagggctgtctgcaatcagaaaatagcctactttgttatcatttagtaatgaactggctgcatcataaactctgtttttgtaatcccattcggtttccggacaaaccagtagagtaatatccccttgttgctcaattaattcgggaatagctgccaaagccaattcgttattaatattgtttaatgggtagatataacagctccctcctccattttgaaaatagagcctcagggcttctacagccagagattgattaattctctcaatactgtggatccatttttgggtttctccctcagcaacagaagcagcgagaatctgaacatcaggtgtttctcgggcttctttttttgttccactatcagaagggaggcttgatttgataacaacatctgtcactggtgccaaagaaaaagcagaagtaaattcaagccagttattgatacggatacaggcttggtttggctctaccgtgtttggggtaaacttaccgataaaaacaggcacagctgtgggactgttgctgacagacaatgcaagggaagcattttcttcaatataaacgccgggcgtttttagatcagctaccatgataattccttatcaatcaatatgattaacgctgttctacatcttgcgtaaactggaggatgataaattccgcaggtcgaacagcagccagaccgactttgactaccatttgtccctgattaatttgatcttctgtcatcgtaattcccttgccaatctgcacgaaataggcttcctcttctttgttgcccgccaatccgccttgttgccacaggctataaaggtaattattgattgctgctctaacacgttcccacgttggttggctgttaggttcaaacatggcaaagctcatggtgcgcttaacatcccgttcgatggtattgaataaacgacgcacagggacatagcgccagttgtcactgtcttccaacgtccttgctccccaaacggtgatgccggtattactgaaagtgcggatcatattaatggcacgcttagcgttatatgctccctgaacttcatccgtgaccaaaaatgccggttccagtccgccttttaatgcaatattggcaggggctttccatacaccgcgggagagatcgacggaggcataaacaccagccataaccgcactcggtggaatagtaatttttgcccaatccgctttcagccatgggtaataaactgccgcgaatgcggtagcgtcatatttactcttgatggtttctacattcgtgatagtcaaggcttcttcagggccatcaaaaatggcaaataatccttttcccggctgacataaaattgctgcggctgttttaatatcttcacccgcagcaaccagcaaagtgacatcatctaaggttggaatcactttttctaaattactgctcttgatgagataacaataacctccgccattagtaaaataagcccgcagagaaactgacaatttatcttctgcatcaaaattgtttgataccttattaaggtattccatccaggagttaattcggaatgcggtattttcggcaataatattatttttttcattcactgcaaaaacaggaacggctgtagcactactggatatagatagcgccagattatttaattcttcaatataaacgccggggtaactggtaacggttgtcataaaaaatcccttatatggaatgattaactatcaatgcctcaaataacctgcatagtgacgcgatcagccgccagcgtaatttcctgaacggcaatatcattgctggtggcatcaaaggaaggagacgttaatgaagtagggaaagcattagcgacattccaggtcattaataattcagaaccagcatcattggttaagctaatggtaatatcttttttctcaacttgattcagttggatagaattaatccagtcaaataactcagttttacccggaaaaacacctttacgcagggtaatattaataggttgatgttgaccaggcattttgaaccaattacctacaccgtcacgatattcgatggtttcataattaatatccagacctgaaacgctattgaatggaatctgttcaccgccaacagaaacaacaaaacgataagaaggaataggatatccaatcgcaatttgagacgtacttgtagacataatagcctctctttaaataaaagtgattatggttgattaaattacttagggtgcagaaaagtctttgtttacataaagctaccgccacaaaatgaaagtaaactttcttctgaaaaaaatttttgtagcgttgttagttttatatcggcattgatcgcgccgaaaattttatattgagtacattgccaataatgcaaattgctttttatgcaaattcaccttcccgaattaacaaattaatttctttagtacttaataacgtttaataaccattaaaaataatttaatgcataaattgaaagcactaatcaaaaattaacccgagataaaattaatcataaatggaaattgaaatgtgataatttaggtatggcgcgaatgaatagagtaattaaaccgggaagagattgaagcattaatacattaaattatttttcttttatgaaagaaaaataccgatcctgaagatcggcatatttatttaacaaaacccaattacaatggcatacgatattcaatcatgcctgacttttcggccacccagttataaaggcgctgaccacgcagattcgtttcatgtgtatgccagtataaccgcccacaatgttgtttttgtgcttcatgctggacaaattcaatcagctttttaccgatatgacgccctctgaactccggtgaaacaaagagatcttcaaggtaacaaaaatcagtttcagaccatgtagcacggtgatagagataatgaacaaagccaagaattttaccgctctctaatgcgaccgcacaatgcatgggttcttttacatcaaaaaatctggcccacgtcctttcagtaatattttccgctaaatcaactttataaaaatcctgatatgcctgccaataaaccagccactgtgaataatgttcaggagaaacaaattcaacagtaaccggtaataaatcattgctcatgataactcctctcaaataaaagccatcctatttgattttgatcgtaaaaatcataatgacgaaatgacggagcaatattacaattccatttggtacttaataagatacacttttattattatttaaggatccactttatcatggtgtgcaaaccacaatccccgtttccgcatttactcttaaataatggctacattaaggatcaggtttaccatacgatcagaaatgctattcttgatggtcggctcaccgaaagaaccaaaatcccatccacaagagcactggctgaaatgatggcaatttcacgcaactccgtgattgccggttttgaacgtctgatcgatgaaggatatttgatagcacgtaaaggttcaggaacctatgtatcaaccacgatcccagatgagttgatcacaacaaatccttctcctgattacttgaaaagaaaaatgatttcagcaccagacctcagcgctactgcaaataggctgatgcctttctgggaaaaaataaaactaataagcgaccaataccctatatttaacatcggtgtcggttgtgtggatcaatttcctcatgaattatggggacagttaagcggtagagtctggcgtcactctaaaaaagcaattggccaatttaaccgacctgatggctatccactactaaaaaaagtgctggctgattacgttcattcaacccgtggtgtaaattgccacgaagatcaaattattattgttaacggtactcagcaggcaataaatttagctgcccgggtattattacaacctgatgataaagtctggttagatgaccccggttatgacagtgccagagcaatattcacctcgatgggcgcacaaatcgctcctattccttccgatgaacaaagaatggatattgcttatggtgcaaccaatcac

SEQ ID NO: 881 - DNA, 4449 bp, Xenorhabdus sp.; identical to SEQ ID NO: 162
  CDS (3462)..(4448)

SEQ ID NO: 882 - DNA, 4449 bp, Xenorhabdus sp.; identical to SEQ ID NO: 162
  CDS (2366)..(3436)

SEQ ID NO: 883 - DNA, 4449 bp, Xenorhabdus sp.; identical to SEQ ID NO: 162
  CDS (1878)..(2327)

SEQ ID NO: 884 - DNA, 4929 bp, Xenorhabdus sp.; identical to SEQ ID NO: 362
  CDS (1753)..(3498)

SEQ ID NO: 885 - DNA, 4929 bp, Xenorhabdus sp.; identical to SEQ ID NO: 362
  CDS (2)..(1222)

SEQ ID NO: 886 - DNA, 4163 bp, Xenorhabdus sp.
  CDS (2674)..(3393)
gctgcttttttcttatcgctggaaaatacccttaagacactgcccgcaccaccgttatatgcggtaataacggcatagcggcgcgaggttgcgttctggatttcgcccaaataaacgttctgtaaaatcgccagataagccgtacctgcatctatgttgttttcagggtcaaaaagataattacggtctggctggccagatttaccctgcatcttgaatacatcccgtcctgcagtatgttgcattacctgcattagtcccagagcatcggagcgactgactgcgtaagggttaaaactagattctgtctgcataatggcaaggatcagcgattcatcaataccatatttaatcgcagctttgcggacaataggcaaatatttatgagcgcgtttatccaagtgattaggaactaattgcatcgtgacagaccaaatcacatgcagtcctgactgacggcgttgtaatttattctggagcaggtaatcggcaaagtggtttgcgcgccattcccagcgaattggctcgccggcattatccagaacctgcccgtaaagaaagggttctttgcttatttgaatatcattcgtgtcagagtaaaggtcaacagaacccggatcatcccccatcaataaagtggtgataatggccttgcgtaaatgctcatttggctcaataggcgatattgtttcaatagtaatggttccagcatcgaaattaatatgactgcgggttttatattgatctgtgtattttacgtaatctttagggccagcaattaaaacttcacgtaatccccagatattttcaatatcatgagcgaattgccccattaagatatcaaatccgttcgtgtcttttatatattcttctttgtattcaatattttttttacttgagcaggaaatcagaagtggagtgagcaggagcagtgccagcagttttttcattttatgatgccgttggatattaggataaattcccatttattgggtgatttttaaatatcctgattcacccaataaatagcagatattaaaaattatttttctggtggggtataaccgtcgattttaatatctttcccttcaaacaagaatttcaccatttcctgctcgagcaatttgcgatcttccggattcatcgtattcagtttcttttcgttaatcagcatagtctgtttgctcatccatttctgccaggcttctttagagatttcattgaaaatacgcttacccaattctcccggatagaactgaaaatcctggccttcggcttcttgttgcaaaaaagtacaaaaaatagttctgctcatgataaatcctcaaatgtcgttatggagcaaaaaataatggcgcacaaaatatgggttaagtttatcccaactgctgcaaaaggtactcaacgggagctgccagtccaatagttgctggctggcgtaagttataccaaagtcccttactttcatccatgcaggaatcaaaagataatatgttgattttaatgggtacgatatccagatgaaaatgactgaaagtgtggcgaaatgaagttagttgttcaggttgactgtgcgagatccctgaatcttccagccactgtttgagtgagttttcatcagtaaattgcgggaatgcaaataatccgccccagataccggaaagcgggcgttgttccagccagactgtatcgccatgttgcatcaataaaaaatacgcggttttttcagggatggtctgtttcggttttttacccggataattggcccagctgtgattagcatacgcgatacagcctgtattaagcgggcaaatctcacattttggtttgctgcgggtacataccattgcacccaaatccatcattgcctgattaaaatattcaacacccagcgcaggggtaacgcgggtactgatgtcccatagtcgattttctacgtcttttttacccggccagccatcaatagcatagcagcgggccagaacgcgttttacattaccatcaaggattgggaaatgcttgccctgagagagagaaagaatagcgcctgcggtagagcggcctacgccgggtaatgcgactacttcatcaaaggtggtcgggaattttcctctatgtaattcaacgacctgctgagcggctttgtgtagattacgggcacgtgcgtaatagcccagaccagtccacagatgaagaacttcatccaatggagctgccgccagtgaggtgacatcaggaaaacgtgaaataaacttctggaaatagggtatgactgtcgcaacctgcgtctgttgcagcatcacttctgaaagccagacgtgataggatgttttttccagctgccacggcagggttttacgaccataacggtgataccattcaagtaccgcctgtgaaaattgctcggcttccatcattagaataattgtctttatatctgataatcgtttcgtgaacaggattgcaacatagtgtaacctcagtgtaaacccgaactttgtttcgaagcactacacaatttaacattaaagttgtgcttatgagcactgaacttgataaactcagccatctttgcataattgcgctctctttaggcaatcctgcggcacataacgtcccggaagccagagcaaaagcctttaaaactgatagaaagtaccaatagacagtaccatgataaataacgtaatttcaccggaatatgatgaaaatggcagggctttgcgccgtgtccgcagttttgtgcgtcggcaggggcggttaacggctcgtcagcaacatgcacttgataatgtgtggccaaatatgggtgtggattatcagcctgcactgcaagatatggcagaattgtttggccgtgatgcacctgttgtgctggagattggttttggcatggggacatctctggtcacgatggcaagccagaatccggagaagaattttttcggaattgaagtccatgctccgggagtgggtgcatgtctggcttccgctgaagatgaaaatatcagcaatttgcgtgtgatgtgccacgatgcgattgaagtactggaaaatatgatccctgaacaggggctggaaatggttcagctattcttccctgatccatggcataaagcgcggcataataagcgccggattgtacagcctgcttttgctcagatgatcagaaataaactgaaaattggtggtgtattccatatggcaaccgactggcagccatatgctgagcatatgttggaagtgatgagcgaagctgaagggtatcgcaacatttcagaaagcaatgattacgtaccacgtcctgattcacgtcctgtcacaaaatttgagatgcgcggtcatcgtttggggcatggcgtatgggatctaatgtttgagagggtaaaataatggctaaaaaccgtagtcgccgtctgcgtaaaaaattgcgtattgatgaatttcaggaattaggtttttccgtcaagtggaactttccggctgatacatccgtcgaagtcgtagacagcacggttgatgctctgattgaggaattaatcgagccaaatggccttgcactggatgccagcggttatttgcagtgggaaggtcttgtctgtttacagaaaatcggtaaatgcactgaagaacaccgccagctgattgataaatggctgaaagatcgcggtatggaagaagttgccacatctgaattatttgatatgtggtgggattgattcgctgttgaattaagaattatgtaggggctcattgagagcccttttttgtctggagaaaaagtggtgaaagtaaggttctctaatgcgttattggcagatatcttagatgaagtacgccctttgattggccaaggaaaagtagcagattacattcctgctctggcggaagttccgataaataatctggcaatggctatctgtacggtagatggtcaagtctttaaagcgggagatgcggaaaaacgtttctccattcagtctgtttctaaggtgttgagcctgacactggcaatgacacgctataaagaagaggatatctggcagcgagtaggcacagagccttggggcaaccatttttaactcattggtgcagttggaactggaaaaaggtattccccgtaatccctttattaatgccggagcattggttatctgtgatat

SEQ ID NO: 887 - DNA, 4163 bp, Xenorhabdus sp.; identical to SEQ ID NO: 886
  CDS (3393)..(3719)

SEQ ID NO: 888 - DNA, 4163 bp, Xenorhabdus sp.; identical to SEQ ID NO: 886
  CDS (3783)..(4082)

SEQ ID NO: 889 - DNA, 4163 bp, Xenorhabdus sp.; identical to SEQ ID NO: 163
  CDS (2849)..(3121)

SEQ ID NO: 890 - DNA, 4163 bp, Xenorhabdus sp.; identical to SEQ ID NO: 163
  CDS (1750)..(2787)

SEQ ID NO: 891 - DNA, 793 bp, Xenorhabdus sp.
  CDS (2)..(202)
tttaaagcgcccattccgtcaattgtggattgctcgtatcaacgctgctgcacgtcagaacggcatgtcttacagccgtttcatcaacggcctgaaaaaggcttcgattgaaatcgaccgtaagattctggctgatatcgctgtattcgacaaagtagcatttgctgctctggttgaaaaagcgaagggcgctctggcataagtcaggttaaaagagggagcctttgctccctcttttactttttttcaaaatatgcttactattagctaaattagccagctcataaatagtcgggttgaaaagggtacgggagagagaataaaaatgatgaagttagcgttttttcgtttctttttttactttagcgcctgaaataagggggctttgcgcgtaagaaaagaaacgaaaaacagcgcttgagcctccggtctggaggcttttttatttttatgacctcattaagaaacaaaaattctgagggcataagtcgataacaactaaaaggccatctggccgaaggaagaggaaaacgatgtcacatcttactgagctggttgcaaacgcaaaagcagccgtagaagaagcccaggatgttgccgcgttggatttggtgcgagttgaatacctgggaaaaaaaggccatttaactctccagatgtcatcgctgcgtgacttgtctgccgaggagcgtccagcggcaggggctgttattaaccaggcaaaacaagaagtccaggaagctttgaatgcacgtaaagccaaattggaagcagatgttctgaatgcccgtct

SEQ ID NO: 892 - DNA, 793 bp, Xenorhabdus sp.; identical to SEQ ID NO: 891
  CDS (525)..(791)

SEQ ID NO: 893 - DNA, 4541 bp, Xenorhabdus sp.; identical to SEQ ID NO: 38
  CDS (2705)..(2911)

SEQ ID NO: 894 - DNA, 4541 bp, Xenorhabdus sp.; identical to SEQ ID NO: 38
  CDS (871)..(1212)

SEQ ID NO: 895 - DNA, 4541 bp, Xenorhabdus sp.
  CDS (4031)..(4534)
attcaattgatcaggccaaacaaattcaaaacgtcaccttctgaactattttatctgtccgtccggtcactataaaaggctctcaggctggcaaccaaaacatgctaggagcgattggcggagcagtattagggggcttgttaggtgattcggttggcggcggtagaggacagaggcttgcaacagccgctggggctattgtcggtggaatggcaggtcaaggaattgaaggtgctatcgatcagacaaaaggtgtcgaattggaaatccgtactgacagcggaagaaatattgttgtggtgcaaaaacaggatcaggttttattcagtaaagggcagcgtatcaaaattgccgatagtggcgattcaacaacggtctcccctatctaataggattaaagtatatttaaacaaaaaaatcgcggatcaccaaaatatggcccgcgattttctttttatcgattaatttttatattacctgtttatgtaattggctaatatttttttcgattttttttattacagaagcaagtagaattaactcgtcatgagtaattccctccaagatgtctttcctcgtcgaaccaataacactatccacttctctgataaaattttctgactcttctgttaatttgattcttttagcgcgcctatcattagcacatgtgtgccttgtaatgagtttcttttcttctaattgatctaaagttcttaccagggatggttgttcaataccaattgcttttgcaagttgtatctgtgactgctccggtggtaacaaactaatattgtaaagagtaacccaatgtgtctgagttaatttcaacggcttcaaacgatgatcaattaaagcgcgccaaacacgaactaaacgtgccaggtctgatcccaatgtcaattccaattacccctccttataattagagactcatataacatcaatgaattatccaatcagtttattcatatgaataatggatacgcatcctatatcttgctcacattagtagagtcagatatttcgctaattacttaattagtatcgcgttggcttgttacttaaagttgacatcttcgtcgccctaaagagcgaagttttacggcgcaccgaataaaatcgcgcattaatccaccaacgatataaactgtataaaataatcctccaacttaactattaagattttaaatatcaacgaaacaaatacaaactccaaaaaatagacacaataccgctcggttaaaggtctataagaatacccgccatccaaatattaatatatatatttttacattaatatcatttttatcttacagttagcgttaagaagataccaaaacccattaaaaacaaatagataaccaattagcgcaattattgttcaataattaattatttgataagaaacctttaccttaaggatttaattagccaatctctgtaatatttttaaatgacctatatcaaataaaaaataggtaatatgaataaaatatcactttatcatggcaaaagttcttaaccacaatgaaaatatgaaatattattcatataagaaaatttcattaacagttaaaaatgtgaattaaaataacccaagctgttttgatggaacaacttcatcatgcccgttatttttcagtgtccgcagatatctagcatggcataaccgcaatatttctcttttttgcccatcagataatttcatccacataaagcgctcttctcgattacgatagcaacctcgacagaaaccacggggaccagattcacaaatccccttgcaaggattaggaataacaaaaaactctagttgctcagccatgtcatcctcctgtatacaaaattacctaaccgattatctctgagagaattgcaacactatctagatccagctcacatcaaataatggattacaaaatagtagcgagtaaaacaaaggtgaaaggatgcattgaattaccttatgtttaccatatatagttaaaaaacaatggggtcagagcacgaaattttgatcttttgctatttcgtaaaattaatattttgatataaaaccataaacataagaggtaatcatgcgtctacttcatacaatgatccgtgttggcaacatgcaacgctcgattgatttttatactaaagtaatgggcatgcgtctacttcgtacgagtgaaaatccagagtataaatattccctcgcctttgtaggttactctgatgaaagccagagtgcggtcatcgaattaacgtacaactgggatgttgaaagctacgaaatgggtacagcattcggccatattgctttaggtgttgatgatgttgcggcaacgtgtgagcgtatcaaacttgccgggggaaatgtcattcgtgaagccgggcctgtgaaaggcggaacaactgttatcgcttttgttgaagatcctgacggttataaaatcgaacttattgaaaataaaagcgccagtagtgcattaggccattaactattttccatatgcaagtctccatatacaagggcatctttaacatgcccttcgtttccactaggtagatattacttctgcaatgcttaataaattttgtcataatatccgctatcctgaagttaagaataaaatcagatgtctaatataaaagatcaaaacatgctcagtgggcgctttcgtggctattatcccgttgttattgatgtagaaaccgccgggtttaatgcgcggacagatgctttacttgaaatagctgcaacgacgttaaaaatggatgaagaaggttggctggcgccggctgatacgctgcatttccatattgagccctttgaaggagccaatcttgatcccgccgcgctggcatttacaggtattgacccgactaatccattacggggtgccgtcagcgaatatactgcgctgcatgccatttttaagatggtccgtaaaggtatgaaagggagtaattgcaatcgcgccattatagttgctcataatgccagttttgatcacaattttgttatggcagcggctgaacgctctggtttaaaacgtaatccattccatccttttgccacgtttgatacggctgcactgagtggtttggtgcttggtcagactattctggcaaaagcctgcattacagcagaaatcccttttgacagtaatcaggcacacagtgctctctatgatacagatcggacgagtctgcttttctgcgaattggttaatcgctggaagcgactaggtggctggcctctggccactccggacgacgaagcctgataaactaagagcctattttattaggctcttagctccaataatgattatcaaatattattggctgtcttcttgctcacggtatttatccgcggtctctttaatcaatgcttgcagttcaccgcgttgatacatctccatcaggatgtcacatccccagactaactcaccatcaacccaaagctgagggaatgtcggccagttagcatacttaggtaattcagcacggatatccgggttttgcaaaatatccacgtaagcaaaacgttcaccacaagcagataaagcctgaacagcctgagcagagaaaccacagcttggcagcttcggtgagcctttcatgtacagcaaaatcgggttttcattaatttggcgttcgattttctcaattgtcgtcatttttacttccttaaaccgcaagtgctgtttatcagcatcagaaaagattgattcagaataccactttctgatgctgattttctacagcgaacgtgctgctacaaatttttatcatgaacaacattttgtaatcgctgagatttccatactctataaatatttaatccattaaaactgaacagttctacatcagctcatcattaaatcgcatctttttccctgttatttagcagaaaagttgttaagataatcactaaaatagcaacatgataataagcttaaatttgctctatccatgattaatactttacgaatcatggtttataaagccaaaaacccgatattaaaaggagtatgcaatgtcttttgaattaccagcattaccttatgctaaagatgccttagaacctcatatctcagcagaaactctggaatatcattacggcaaacatcacaatgcttatgttgtgaacctgaataacctgattaaaggtacagactttgccgaaaaaacactggaagaaatcatcaaaaattctgatggcggtatcttcaataatgctgcgcaagtatggaaccacactttctactggcacagcctgtcaccaaacggtggtggtgaacctaccgacaaagtggcagaagcaatcaacaaagctttcggctcttttgctgagtttaaacaacaatttactgatgcagccctgaaaaacttcggctccggctggacatggctggtcaagaaaactgatggtagcctggctatcgctaatacttccaatgcagcaactccgctgactggtgaagataagcctgttctgactgttgatgtttgggaacatgcttatcttctaaagctttagagccaca

SEQ ID NO: 896 - DNA, 4541 bp, Xenorhabdus sp.; identical to SEQ ID NO: 895
  CDS (2625)..(3275)

SEQ ID NO: 897 - DNA, 4541 bp, Xenorhabdus sp.; identical to SEQ ID NO: 895
  CDS (2079)..(2486)

SEQ ID NO: 898 - DNA, 3562 bp, Xenorhabdus sp.
  CDS (3321)..(3560)
agtgctctaaagtcgggtttatcagaccgaaaccagcctgaaatggggcggtgtgttgctatggtttgtcgttgtggggagtacttggctggcgagctattggtttttgcaactggcctatgggttgatgttctggctgggatgtgtagcagaaatctggctgatttataccatgctggcagggcgaagcctgagcgatgcagcaaatgcggtttatcaggcattgtgtaaggaagctacagatcacaataagttggatatcagccgtcaggaacttgccaaaattgttggtcgtgacacttctcaattacaaccaccacaaattagctgtgctgtgattgaaaccgtggctgaaaacagcgtagacggcgttattgctcccttatttttcttaatgcttggcggcgccccacttgctatggcttataaggcaatcaatacccttgattcaatggtgggatataaaactccccgttatcaggcaataggaatgttttcagcccgtatggatgatgtcgcgaattggttacctgcgcgtcttggatggcttctcttggcaatggccgcaaaatggcaggggcaggattttcgccaggcattgcgtattggctggcgtgaccgctaccagcacagcagcccgaatagtggctggtcagaggcaactatggcaggagcattaggtatccgcttgggtgggccgaatgtttactttaaccagctggtcgaaaagccgtggattggtgatgcaaagcgcgaagtcacaccagaggatatacctcagtctgttcgaataatgcaagtagcatcagtcatggcacttctgctttttgccctgctgtatagcctgttcagcgtgatgatataaggagggaacaacatgagtgattacatccgacagccccaacagattgaaaaaaatagtttcgatatcatcagccggattattttcgagtcatatcctgattttcactttgtcgatgaggagcaggaagcggtcatcaaacgggtcattcataccactgctgattttgactggcttaatcttctctatttttcccctgatgtttttcatcttattcgtaacggtatattgcgtggctgtacgctatataccgatacaactatggcgctgtccggcatcaacaaaacccgtctggctcagtatggaagcaaatgccgttgttatgtcagcgattgccgtactattcacatggcgaaagcgcagcaaattacgcgttcgatggcggctgtcgatctggctctgcaagaaccgggagagaagatttttatctttggtaatgctccgacagcgttgtttcgcttaatggaacatcaagttacccctattgctgtcgtcggtgtaccggttgggtttgttggggcagaggaatcaaaaaatgccctgatccagagcggaataagctgtattgcagcaaaaggccgtaaaggaggcagcaatattgcggctgcgataatcaacgcgattctgtaccggatgccagaggtgagccatgaatgatctcattgaactcggtacagtctggcacagaggaaaacagtatcgtaaaggctatactaccggttcttgtgcgaccgctgcggcaaaggttgctgcgttaatgatcctgcgtcagcaggttatccatcaggtttcaattgtcaccccttccggcatcacactggctttgaatattgaacagcccttgattgaaggcgatcaagctgtcgctgctatccgcaaagatggtggtgatgacgtagacgcaactcacgggatgctgatttttgcccgagtctccctgaatgacagcggtgttatcacactggatggcggtgacggtattggcagggtaacgcgggtgggagtcgggttacctataggctgggcggcaatcaataaaacccctcgtcagaccatagaagagacggtacgggaggtaatcggtccgaatcggggagcagatatcatcatttttgcacctgaaggtgaggagcgagcgaagcaaacttataacgatcgactggggattaaaggcggaatttcgattatcggtacaacaggcattgtaactccgatgtcagaagagagctggaaacgttcactggcactggagttagaaacgaaacgtgccagtgggctggatcgtatcatttttgtgccaggcaatcatggagagcgttttgtcagccagcagctgggtattgatgccagctatgtcgtcaccatgagtaactttgtcggttatatgttacaggaagccgtacgtttggaattccgccatatcgtgctggtcgggcatgtcggcaaattagtgaaaattgccgcaggtatttttcatactcacagccatattgccgatggacgcatggaaactctgattgccagtctggctttaatgggagctcctttcgaactgattcaggccgtggatcagtgtgacaccactgaagctgccattgaattgatagctgaacagggctggcagggagtgtatcagcagatagcgcagaaaataggctggcgcatcgaccaaatgttgcgtttcgccaagagtaagccccagtgtgatgccattttgttctcctttgataatcagatattaggctgtaaccggcctgtagaccagattgtgcgggattttatggagggcggacgatgatcacggttgtaggcgttggcccgggtgctttagaaaatcagacactgtctgcgctggatgttatcagtcatgccgatgtactggttggaggaaaacgtcatcttgccgaatttccttacttcgatggtgacacccatcctgtgaatgctgatatggatacgttaatgcagtggctggaacaaaatcagcatcgcaaagttgttgtactggcttcaggtgaccctcttttctatggcataggtaaacggattagccagcatttctcaaagctatctttcacaaaagagccacatactgatgagcagcataatggtagaaaaaatatccgcattattcccggtatcagttcagtccagtatttgtgtgcgcaaattttgctggatatgaatgatatttatctcaccagcagtcacggccgcaagccggattttgactggttactccaacacgaaaaaatcgccatggtgacggataacgtgattggcccttaccagattgcacaggaaattctggcgcgagggcaacagcgttgcatggtggttggtgaaaatttatcccacaaacatgaacacattcgttgcctgaccgcagagcagatcgtgcaacgtggcgacattcattatgacctgaatgtcgtgattatcctgaagggtgatttcgatgaaagatgaactgtttttgcgtggtcatcgcattcccatgaccaaagaagtggttagggcgctggcactggaacgtttgcaactggaaaatgcccgtcattttattgatgtcggtgcaggtactggcagcgtcagtattgaagcggcactgcgttatcccgcactggatattatcgctattgagcgcaaagaagatgcattactgctactggctgaaaatgttcagcttttttctgccat

SEQ ID NO: 899 - DNA, 3562 bp, Xenorhabdus sp.; identical to SEQ ID NO: 898
  CDS (2657)..(3331)

SEQ ID NO: 900 - DNA, 3562 bp, Xenorhabdus sp.; identical to SEQ ID NO: 898
  CDS (1512)..(2660)

SEQ ID NO: 901 - DNA, 3562 bp, Xenorhabdus sp.; identical to SEQ ID NO: 898
  CDS (887)..(1519)

SEQ ID NO: 902 - DNA, 3562 bp, Xenorhabdus sp.; identical to SEQ ID NO: 898
  CDS (53)..(865)

SEQ ID NO: 903 - DNA, 3837 bp, Xenorhabdus sp.; identical to SEQ ID NO: 364
  CDS (812)..(1033)

SEQ ID NO: 904 - DNA, 4481 bp, Xenorhabdus sp.
  CDS (2663)..(3664)
ctctataagcactgacaggcgctgtagctgcttcaatgattggtaatgatgtcaatgcattgttagctgtggtgggaactctaactcttggggctacaattggtgcatgcaccggatttatcatctcgaaaggtaaagttcaggcatttattgcaactctggttatgatgttgttattgcgtggtgtaacccgtgtgtataccgatggaagcccaatcaatacaggctttaatgacaatgcagatttattgggttggtttggtattggacgtccattgggaataccgaccccagtttggattatgctgctggttttcatcgttgcatggttcatccttcatcatactcgccttggccgttatatttatgctttaggtggaaatgaatctgcaacacgtttgtcaggtattaacgttgataaaataaaaataattgtttattccttatgtggtttattggcagcattggccagcattatagaagtagcccgactatcttctgctcagcctatggctggaagtggttatgaactggatgccattgctgctgtggttctgggaggaaccagcctggcgggaggtaaaggccggattataggcacattgattggtgcactgattttaggttttttaaataatggtctgaatttattaaatatttcttctaactatcaaatgatcgtcaaagcagttgttattttactggcggtcttagttgataacaaaagtagtaaataatcttaccctacaggaaaaacaacatgaaattgaagaaattggtaactgttttatctgcggttaccttgtatgttgctatgagtgctaatgctttggcaaaagactccatagcattggtaatttcaacattgaataaccctttctttgtcacgatgaaagatagtgcaaagaaagaagcagataaactgggatatattctgattattctagattcacaagataatccagccaaagagctagctaatgtacaggatttaattgttcgtggtactaaattgatgttgattaatccaacagattcagatgctgttggtaatgcagtcatgatggcaaataacgcaaatataccggttattacccttgatcgtatagctaacaaaggaaatgttatcagccatattgcttctgataaccgcttgggaggccaaatggcaggaaattttattgccgaaaaattaggtagtaaggtgaaagttattcagctagaaggtatttctggtacttcggcagggcgtgagcgtggagaagggtttgctcaggcagctaaaaaacaccaatttgacatgctggctagccaacctgctgatttcgatcgtacaaaagggcttaatgtcatgcagaatctgttgactgcgcgaccttcagtacaggcagtctttgcccaaaatgatgaaatggcactaggtgcactgcgtgcattacagaccgcagggaaaaaagatgtcttagttgttggatttgatgggactgacgatggaataaaagcagtcgaggcaggtaaattagatgctactattgcacagcgccctgatcagatcggtattattggtattcagactgcagataatgtactgaaaggtaacaaagttgatgccacaattccggtcgaattggaattggttattaaagaatagatcttattaaggtgaggtgattagttccaattatctacattttcattgaacaggaattatgaaacaggaataaatgtaatgagtgtggcaaaactagcagtgatgggcagtattaatgtcgatcatatattgaacctcaaattttttcctcagccaggagaaactgtacagggaaaacagtatcaggtggcattcggcggaaaaggagcaaatcaggcggttgctgctggtcgctgtggagctgatattacatttattgcctgtgttggtcaggacgatgttggtaaaaatatctgccaacaattggggaaagataatatcaatacttctgcaattaggatgatagaaggtgaatcaactggtgtcgcactgatttttgttaatcagcagggcgaaaatattattggcatcaatgcgggtgcgaatggatcacttacacctgaatgtatccatcatcatgaagtagtgatcaaagaagctgatgctctgttgttacaacttgaaataccgttgaatactgtcctactggctgcggagatggcgaaaaaacatctaactaaagtgatcctgaatcctgctccagcacaagaagtatcagataagctactttctttggtggatattatcactcctaatgaaacagaagcagagcatctgaccggaattgcaataacagataatactgaagcaggaaaagcagctcagtttttgcatgatagaggtattgaaacagttatcatcacgttgggtagtcgcggagtatggcttagcgaacaaggtaaacaaggaaaagtgatttctgggtttccggtaaaagctattgatacgattgctgcaggagatacatttaatggagctttggttacagggttgttagaaggtaaagacattttgtctgcaattcgttttgctcatgcagcagcagcgatagccgtgactcgtcgcggtgcacagccttcaattccatggcgaagtgaaattgatgcatttctggctgaacagggctaatccgtggcgaccatgaaggatgttgcccgtattgcgggcgtatcgacatcgacagtttctcatgtcattaacgataatcgttatgtcagtgaaagtgtgaaaaagagagtccatgctgctattgaggaattaaattacgctccttctgcattggcaagaagtttgaaaataaaacagaccaaaactattggtatgctagtgacaaccagtgataactcattttattttgaggttgtcagaggagttgaaagaagttgttacgagcgaggctatagtttaatcctatgtaatactgaaggtgattcagtacggttaacccgaaatatggaaacattgttgcaaaagcgggttgatggtttattgatcatgtgctcagagcatcaatctatatctaaggattttttgctgcgatatccactcgtacctattgttacaatggactggtctccttttgatgcctctagtgatgttattaaagataattcactaataggaggagagctggcgacaaattatctaattaataagggatttcgtaaaatagcttgtattgctggtccacaggataaaacaccggctatacaacgtttatctggatatcaaaaagcaatgcaaaatgctgggattgaaattcttgatggttacgaaatttacagcaactttgagttttctggtggtttttcatcaatgaagcaattactacaattgtctgatcctcctgaagccgtctttgttggtaatgatgctatggccattggagtttatcaggccctatatcaagcagggatttctattcctgaagatatatctgttattggttatgatgatatttctatagcttcctatctgacacctccactaacaaccatccatcaaccaaaagatgaattaggtaagttagccatcgatatgctgctttaccgaatggataacccagatagtaagccaaaacaattagtattgacaccagaacttattgaacgaaattcagtacgtgagcgttgataacatcattttttaggtcgctttttcttaaccaagttgatgccatcctctttctttaagagcagaaagataaaggcagaagttagcgtaatcatacctatcgtaataaaggtatagtgaaagttatctatagtagaaccataattttccgcgtcataaaaccgcaggattgccgcactgactgtgacccctaagctaatggataattgttgggctacagacagcaggctattcccggtacttgcattattatcgtttaagtcaccaagagtgattgtgttcatcgctgtaaattgagtagacatatccattcgcaatataaatatagggataatctaatacacgagtgacacgtctggtgactgcagcgaaaactgggcaatcatgagaccgataaggattgtgatccagagtaaggtatttcggtatcagaatcgtgacagtatccgagagacaaaagatttggctagaatagcgccaatggcattcggtgccatcataatgccggcaataatagctgaataaccgaaacctacctgtagcatcagcggaataagaaaagaaagtgatcccgtgcttaaacgcgtcgcaatattactgccgataccaaccgagaatgtccctgtttcaaattaactaagactgataagtgggttgggatgccttttggcataaaagcaatacccgaagagcatcataatccctgaagcgaatcctacagctggaacaccgttcggtaatgagctattaccaaataaataaagactgactgaaatcatcattaagcttgaactgaacatcacggggcccgtatact

SEQ ID NO: 905 - DNA, 4481 bp, Xenorhabdus sp.; identical to SEQ ID NO: 904
  CDS (1727)..(2659)

SEQ ID NO: 906 - DNA, 4481 bp, Xenorhabdus sp.; identical to SEQ ID NO: 904
  CDS (761)..(1651)

SEQ ID NO: 907 - DNA, 4481 bp, Xenorhabdus sp.; identical to SEQ ID NO: 904
  CDS (9)..(737)

SEQ ID NO: 908 - DNA, 4304 bp, Xenorhabdus sp.; identical to SEQ ID NO: 447
  CDS (3)..(896)

SEQ ID NO: 909 - DNA, 4304 bp, Xenorhabdus sp.; identical to SEQ ID NO: 447
  CDS (983)..(1879)

SEQ ID NO: 910 - DNA, 2159 bp, Xenorhabdus sp.
  CDS (1823)..(1978)
gagccaaattctgagcctcaatgccccagagcgtcgcagggcgccgcttgcgggctctatgccgcccgctcccgcagaacgtgcgcccgccgcccggcaagccgggcagcgttcgcccgttgccagaagtgaaaaacaatcccaaactgtacgtcggggtcaaaaaagtgatcggggtaaaatgggtgaaacgtgtcctgctgaaagccttgccctgcgcgggctgacgctgctctacgggtatgactgcctcagagctgatggccctttgccggccagtggcgggatgaagagagcgggctggtctacaatcggttccggtattattcgccggtggccagttgttacctgacgcctgatcccattgggttagttggtgggttcaatcattattcgtatgttaataacccaacgtcttggatcgatcctctaggactaagctccaaaaaatgtcaggaggtttatcgggaacttacacctgacgacgcgcttagactcgaacaagggttaagtttggttcctaaaggtgtaggtggttcgattgctgcccatgtagaaggtatcaatactggccatatatcagccgcattatccgctcgtgcagcagaaagatatactagtgggaatggactaattgcaatagatgtaaaaaaggcagttaaattaggtgctagctatatagatcataataatgtaatgcaggcagtgatgagagcgggaagtctcgaagctagaaagaatgcaaagatagccgaggaagtcttgtttaaaggtgaaatacctttcgaagcaattaagattttaaaaaaatagaagggggagttatgccagcactatcggaatatacaaatgtttataatacagcgcttaatattcttgataaaaaaggatatagagtttggtatgataaagaattacaggcttattgtgcagagaagaatggttgggattttattgggaatacgccttgtggattgctaggtgttatagcgatatatgaatataaacagccggaagaatataaagaatattggtggcgagatgatgagaagagattgtatcgaaatataccagaggaaaagccagagtatatatcgatagtatataaaaagtagtaatgaataaaactgaaaaatcttattcagttttttgttagtacttaatttaataaatcatcggtcaaataaaattgccgatgatttattttattggcgtagttgtggattaattttctgctgtgtgacagccatatctaggatacagcaaaccacgattttttttcttcctttatctcgctatcttgtttgtgtgaatttttattttaaatataaaaatattgtggttaaatgcttgagctataatcataaagttggatgctaacagattaaagagcagaatcctgaaataaaaatatcctttgggaattaaattaaaattagttaatcattccctattcagtgatgatagtatgaagggcactgcccatatttttgaatatggactggtaaattaaagataacgttgaagttgaaggtattcttgaacataggagaatgagaaaatgcaaaataatttccctgctgtattggacagttttataaaaagccacagtgcattaaaaaaaagtatcagtcaactgccagattcggaaatttttgaattggatgatgtttttctgaataatttagaagatttacttaagttgaaagtatatcatttaaaagcgtttgagattttattaaactctgctccggaaagagcaatttcttatttaaaaaatcattatttatcagctgacttgatagattcttgtgatgatcacgtggctgatttagcatttatgttttctgatattaaagaaattttaggagaagataaattgaatgaagtactcaactgccctgagtttacagagtgtaataaagaattctatcgtgtaaaacatgctattgaatttgctataggagaagatgaataaagtttaacgttaagattattttattaatatagagtattttatctttttaaaattagagtcttagcctaaatataattctttaaatttatatttaaaaagccggaaatattttcgtgatattccggctttttatcatcatcccgcctgataatccccaatcagttcccgcatccgcagctta

SEQ ID NO: 911 - DNA, 2159 bp, Xenorhabdus sp.; identical to SEQ ID NO: 910
  CDS (825)..(1115)

SEQ ID NO: 912 - DNA, 3368 bp, Xenorhabdus sp.
  CDS (3)..(1679)
aacagagcgttatcgcacaggcttccgctctgggcaaggaagtgctcttgctgttgtctcaccggggctcattactggagcaatggaaagtttttaaggcatgtgtagatgcagacaaaattattttaatgcaggcggcgaatacagggttaaccgaaggttctacccccaatggtgatgattatgatcgcgatattatcattatcagtacactgagaatgaataagatacagtttcttgaatctgccaatcaagtcgttgcttttccgggcagtacattatggcatttagaaaaagtgctaaaacctttagcgcgtgaaccgcattcagtcattggttcctcctgcattggcgcatcggttatagggggaatttgtaataattctggtggctctctggtgcaacgtggccctgcttatacagaaatggctttatatgggcgagtgaatgagaaaggcgaagctgaacttattaatcacttaggcatagctctgggggactcaccggaagatattctgacctgtctggaagagcggcgctaccgtgcggaagatattcaacaaaatagcagagtggcttctgatcatgaatatgctcatcgtgttcgtgatattgaggcggatactccatcgcgctttaatgctgatgagcgcagattatttgaaacttccggatgtgccgggaaactcgttgtttttgccgtgcgattagatacctttccggcagagtcacatactcaggtattctatatcggcactaatcagccagaagttttgaccgaattacgcagacatattttatcgaattttaaacacttgccggttgctggtgagtacatgcatcgggatatttttgatattgctgaaatttatggtaaagacacttttgttatgattgataaactcggtacagataaaatgccgatgtttttcagtataaagggacgactggatgccatattcggaaaaattccttttctgcctcctaatttaatagatcgcgtaatgcagtggttaagtggcttactgccttcacacttaccaacacgacttaaaacttatcgtgaccgttttgaacatcacttgatgcttaaaatgtctggtaatggaataaaagaagccagtgaatggctggaaaattatttcaaacaggctgacggagattatttttcttgtacgccggaagaaggagctaaagcgtttttacatcgctttgcggcagcaggagcagcaatccggtatcaggcagtacacagtgacgaagtggaggatattctggcgttagatattgctctgcggcgtaatgatcaggagtggtttgagcatctgccaccagaaattaatgaatcactagttcatcgtttatattatggtcactttatgtgtcatgtatttcatcaggactatattgtcaaaaaaggtagggatattaaggcactgaaagagaaaatgctggaaatcttaaatcagagaggagccgaatatcctgctgaacataatgttggtcatctgtataaagctaaaccccaacttaagcagttttatcaaatgaatgatcctactaacagtttgaatccgggtattggtaaaacatctaaattaaaaaattggggggaagtgcagggagaacaatgtcctgataattgttctactcaccaacatggtcagaataatggataacggctggataaagacagaaaaagacaaaatcttgtctttttctgtgctgatttaaatttactcagctaattgaactgcataggccattaatgcttttaactgacggcacttctcttcatcagattgatgttcaataaaaagacgctcaatatttgcaaagtattgagtgatattttcctgagtgaatatttcccggcgatgctgtaaccaacgctgttgttcaccataatccaatgttgccggataatttctggcacgataacggaataggagagccttaatgcgaggatcctgaaatgttaaatccaaagcaggcagattttgaggtgtagtttcacgaataatttccatcgctgttttatctgcatcgctgaagaagccactatatagtttggcatcaacattatcagattcaggaaattcttctggttgggaaaataattcgactattttttcacggatttgtgggttgttacgtaagatagtcaggttttgtgcgcactgattacgatcaagcccaactcgctcagcatcctgtggccgcagagtattttcaggcgcaatgatcggacatttattgatgtgcactagtttgatgggaacaggagactgatctggctgcaatttatcccggcgggtatacaaacgctcacgtaattcattagcatccagttccagcagaggcgaaatatccccagctaaatcgcacataataacggcatttctgtttgtcgggtgccatgctaaaggcgctatcaggctgatattactgcgtaaagatccgaacatgcctgatacatgcaccagaggtttcatttgtggaatatcaatctgattgctgactttctgcttatttcttagctggaaaaaataatcaaacaatttaggttgtgctgctttaaccagcttcgccatagcaatagtcgcgtaaacatctgacatggcatcgtgcgcatgagtatgctcgactccattcgcttttgtcagttgttccagcttaaaactgggtaatccatcatcattttccggccagataatgccttccggacgcagggcgtagcaggcgcgcaacacatcaagcagatcccagcgagaattacctttttgccagctgtaggcatagggatcataaaaattgcgataaaaaatattgcggctgacttcatcatcaaagcggatattgttatatccgaggatacaggtattgggtttgctgaattcagtgtggatcaggcgtgtaaactctgcctcattcacaccttttttcagggccagctggggcgtaattcccgtgatcatgacagcttcaggctcaggcagataatcatcagccggagcgcagtacaccactagaggttcttcaatgatattaaaatcactatcagtcctaacgcctgcaaactgtgcaggacgatctaaggcaggatgtatgccaaaggtttcataatcatgaaagtagaaagtggggtttttatcgttactcaaggcaattctgcatctgttgtctattggttggacgatatggtaaaccatatctgaaacaatctgaatactcgaataatatggagaatgaaagtaatgatagaagttaccgaagtgcttccgactgcgcaggaatatatcaagctgcgtgagcgggcaggcttatcggctaaatccattgaagcagccgaaaaaggattacccaat

SEQ ID NO: 913 - DNA, 3368 bp, Xenorhabdus sp.; identical to SEQ ID NO: 912
  CDS (3258)..(3368)

SEQ ID NO: 914 - DNA, 3368 bp, Xenorhabdus sp.
  CDS (226)..(1632)
attgggtaatcctttttcggctgcttcaatggatttagccgataagcctgcccgctcacgcagcttgatatattcctgcgcagtcggaagcacttcggtaacttctatcattactttcattctccatattattcgagtattcagattgtttcagatatggtttaccatatcgtccaaccaatagacaacagatgcagaattgccttgagtaacgataaaaaccccactttctactttcatgattatgaaacctttggcatacatcctgccttagatcgtcctgcacagtttgcaggcgttaggactgatagtgattttaatatcattgaagaacctctagtggtgtactgcgctccggctgatgattatctgcctgagcctgaagctgtcatgatcacgggaattacgccccagctggccctgaaaaaaggtgtgaatgaggcagagtttacacgcctgatccacactgaattcagcaaacccaatacctgtatcctcggatataacaatatccgctttgatgatgaagtcagccgcaatattttttatcgcaatttttatgatccctatgcctacagctggcaaaaaggtaattctcgctgggatctgcttgatgtgttgcgcgcctgctacgccctgcgtccggaaggcattatctggccggaaaatgatgatggattacccagttttaagctggaacaactgacaaaagcgaatggagtcgagcatactcatgcgcacgatgccatgtcagatgtttacgcgactattgctatggcgaagctggttaaagcagcacaacctaaattgtttgattattttttccagctaagaaataagcagaaagtcagcaatcagattgatattccacaaatgaaacctctggtgcatgtatcaggcatgttcggatctttacgcagtaatatcagcctgatagcgcctttagcatggcacccgacaaacagaaatgccgttattatgtgcgatttagctggggatatttcgcctctgctggaactggatgctaatgaattacgtgagcgtttgtatacccgccgggataaattgcagccagatcagtctcctgttcccatcaaactagtgcacatcaataaatgtccgatcattgcgcctgaaaatactctgcggccacaggatgctgagcgagttgggcttgatcgtaatcagtgcgcacaaaacctgactatcttacgtaacaacccacaaatccgtgaaaaaatagtcgaattattttcccaaccagaagaatttcctgaatctgataatgttgatgccaaactatatagtggcttcttcagcgatgcagataaaacagcgatggaaattattcgtgaaactacacctcaaaatctgcctgctttggatttaacatttcaggatcctcgcattaaggctctcctattccgttatcgtgccagaaattatccggcaacattggattatggtgaacaacagcgttggttacagcatcgccgggaaatattcactcaggaaaatatcactcaatactttgcaaatattgagcgtctttttattgaacatcaatctgatgaagagaagtgccgtcagttaaaagcattaatggcctatgcagttcaattagctgagtaaatttaaatcagcacagaaaaagacaagattttgtctttttctgtctttatccagccgttatccattattctgaccatgttggtgagtagaacaattatcaggacattgttctccctgcacttccccccaattttttaatttagatgttttaccaatacccggattcaaactgttagtaggatcattcatttgataaaactgcttaagttggggtttagctttatacagatgaccaacattatgttcagcaggatattcggctcctctctgatttaagatttccagcattttctctttcagtgccttaatatccctaccttttttgacaatatagtcctgatgaaatacatgacacataaagtgaccataatataaacgatgaactagtgattcattaatttctggtggcagatgctcaaaccactcctgatcattacgccgcagagcaatatctaacgccagaatatcctccacttcgtcactgtgtactgcctgataccggattgctgctcctgctgccgcaaagcgatgtaaaaacgctttagctccttcttccggcgtacaagaaaaataatctccgtcagcctgtttgaaataattttccagccattcactggcttcttttattccattaccagacattttaagcatcaagtgatgttcaaaacggtcacgataagttttaagtcgtgttggtaagtgtgaaggcagtaagccacttaaccactgcattacgcgatctattaaattaggaggcagaaaaggaatttttccgaatatggcatccagtcgtccctttatactgaaaaacatcggcattttatctgtaccgagtttatcaatcataacaaaagtgtctttaccataaatttcagcaatatcaaaaatatcccgatgcatgtactcaccagcaaccggcaagtgtttaaaattcgataaaatatgtctgcgtaattcggtcaaaacttctggctgattagtgccgatatagaatacctgagtatgtgactctgccggaaaggtatctaatcgcacggcaaaaacaacgagtttcccggcacatccggaagtttcaaataatctgcgctcatcagcattaaagcgcgatggagtatccgcctcaatatcacgaacacgatgagcatattcatgatcagaagccactctgctattttgttgaatatcttccgcacggtagcgccgctcttccagacaggtcagaatatcttccggtgagtcccccagagctatgcctaagtgattaataagttcagcttcgcctttctcattcactcgcccatataaagccatttctgtataagcagggccacgttgcaccagagagccaccagaattattacaaattccccctataaccgatgcgccaatgcaggaggaaccaatgactgaatgcggttcacgcgctaaaggttttagcactttttctaaatgccataatgtactgcccggaaaagcaacgacttgattggcagattcaagaaactgtatcttattcattctcagtgtactgataatgataatatcgcgatcataatcatcaccattgggggtagaaccttcggttaaccctgtattcgccgcctgcattaaaataattttgtctgcatctacacatgccttaaaaactttccattgctccagtaatgagccccggtgagacaacagcaagagcacttccttgcccagagcggaagcctgtgcgataacgctctgtt

SEQ ID NO: 915 - DNA, 3368 bp, Xenorhabdus sp.; identical to SEQ ID NO: 912
  CDS (3276)..(3368)

SEQ ID NO: 916 - DNA, 3218 bp, Xenorhabdus sp.
  CDS (2779)..(3216)
tgtcctctaaagaaactgggtttatgtcagcattgccggtttcggggggatgccaacacccgttaatatctttttagttgtcctgctggcggcttaccttgcgctttatccggctctgtttgccgggttacttaaccgctttttccctgcctcaaacgggttaaggctgctgattgccagccctgctctgtggcagttaacagaatttttacgtggctgggtacttaccggttttccgtggctacaatttggttacagtcaaattgatggcccgttaaaagccattgcgccggttttcggggtagaaggtattactttcctgttgatgattatcagcgggttgctggtttttgccaccgtacataaaaaaatcgtagctgccatcgctgccgttgctttactgatgttaccgtggccaatgaggcattatcagtggtataccctactaccggaaaaatcggctgatatagcactggtacaggggaatatccctcaggaaataaaatggaattcttcagcattgggcaaaacactggatatctatctggataacagccgcccttttattgggaaagttcccatcattatctggccagaagcagctattcctgatactgaacacgaccagagtctcttcctgaccaaactggatgcgttgctaaggcagtatcataccagcctgatcacgggtattcctgatgcccgtccgacattggatggatataaattctataacagcattattgtgttaggagagaaaacgccttaccagtatccagcggctgaccgctatgacaaacatcaccttgtaccgtttggtgaatttgtaccgctggaatcattactgcgtccattagctcccttatttaacctgcctatgtcctctttcagtcagggcagttatatacagcctcagctttctgttgctggttatgacattactgctgctatctgttatgaaattattttaggtgagcaagtccgcgataatttcaaacccagcacagaatttttgctgacaatttccaacgacgcatggttcggtcaatctattggcccgtggcaacacttccagatggcgcggatgcgcgcgcttgaactgggtcgcccattattacggggaaccaataacggcattactgccgtcatcagaccagatggttcaatacaggctgaaattccgcagttcacccgtcaggtcttggaagcagaagtcactccagccagcggggtcaccccttatttccgtattgggaactggccggtttggggaatgactgtattgtttattttgttcggattaaccagaaaccgtcgtctcacttagttaagtatttaacgatacccactaaaaaccctccaaagaataagttcagaatgtatttacatactgaacttattctttctcgtatatcattttaggtaatttctccaataccaatccctccatgagtttcatttctagaatattcacaaaaaacacaaaaacagtctaaaagatcaccgcactgcggtatttattcctaaaaagtgcaaactgtgaacaagattcaaaattatttgccacaaaatcacacttaaacaaaattgtttgtttatagttcgagttggctcgcaaaatgaaaacatgaatgtttcaaaaaagtaacattatgaattatttttttacgactcatatacaaaacaatattagaaatttatttccatgctaacaatttctgtaaaacagaaataaaagcatagatccaccccctgcaaacaaacccagttttgaataaaacaaccacataaaggagctgtatatgcgtaagttgatgttagccacaatgttgcttagcgcggtaggagctgcccatgctgaggaactgaccggcacattgaaaaaaattaaagacagcggtgttgttgctgtcgggcacagagaatcttctgttccatttgcttattatgatggaaaacagaatgttgtcggtttcgcccaggatcattccaatttaatcgtggaagcgattaagaaaaaaattggtgctcctgatctacaggtgaaattgattccggttacctcccagaaccgtattccattactccaaaatgggacttttgattttgaatgtggctcaaccaccaatactcccgagcgccaaaaacaagccgcattctccaatactatttttatcgtcaatacccgccttctgaccaataaagattcaggtatcaaaggatttgatgatctgggtggaaaaaatgttgttgtcagtgccggtacaacatctgaaatgctgctgaataagctcaatgacgagaaaaaaatgaagatgcgcattatcagcgcaaaagatcatggtgattcattccggacactggaatcaggccgtgctgtcgccttcatggttgatgatgcgctattggcaggagagcgcgccaaagcgaaaaaacctgaacagtggattatcgttggcgaaccgcaatctaaagaagcttatggctgtctgatgcgcaaggatgatcctcagttcaagaagctgctggatgaaacagttgcagaaatacagacgtcaggcaaagccgcagaaaggttcgatatctggttcaagcagccgattccacccaaaaatctgaatatgaattttactctgtctgatgagatgaaagagctgttcaaagcaccaaatgataagtcgttgaattaattataaacctaaaaccccgatttcattggcacgacgggtatgaggtagccgtttcctacctcatttttatgtttcagggagcatatgtatgtcaattgattggaactggggcatctttctacaggaagcgccttttggtaacaccacctatctggggtggatcatttctggatttcaggtaactgtagctctttcaatatgtgcctgggttattgcatttattgtcggttcttttttcggcattctgcgaactgtcccgaataaatttctttccgggttaggaacctgctatgtcgaactatttcgtaacgttccccttatagtccagttttttatatggtatctggttgttccggagtttctgcccaaaaatgtgagtgactggttcaaaatggacttagatcctaatatccagtttttcctttcctcattggtttgcctcggattattcaccgcagcacgagtatgtgagcaagtcagggctgctattcaatccctgccacggggacaaaaagccgctgggctggc

SEQ ID NO: 917 - DNA, 3218 bp, Xenorhabdus sp.; identical to SEQ ID NO: 916
  CDS (1788)..(2690)

SEQ ID NO: 918 - DNA, 3218 bp, Xenorhabdus sp.; identical to SEQ ID NO: 916
  CDS (14)..(1327)

SEQ ID NO: 919 - DNA, 4118 bp, Xenorhabdus sp.
  CDS (137)..(1510)
aatgattgtattagtaaaatgagtccttttccattacctatgttaccaagaggttgcttttcaaacagttctgtttgctcgcagaaatattccttgttttttctatcgtcaatttttcaattaaaaggtgtagtacgtgcagaaatatttaaatgaagcgcgtagtttgctcgctctggggatccccgtcattatcgctcagtcttcacaaactgcgatgggagtcgtcgatacagtcatggccggtaaagcaggtgcaatagagatgtccgctgttgctatagggacatcaatctggctgccagctattttgcttgctcaagggattttgatggctttaacaccgatcgttgcccatatgaatggctcaggtcagagaaaaaatgttgcaggccagatccagcaaggtttttggctggcgacatttctttctatctttgtaatgacgattttatataattgccgatttattatagaagcacagcataatgtagaccccgttctggcacaaaaatccatcgattttatccatgcaattatgtggggagcacccggttgcctgttctatcaggttttacgctgccagtgtgaagggctgtcaaaaaccaaaccagcgatggttattggcgttatcgggctattagtgaatatccctgtcaactatattttcatttacggtaagtttggcgcaccagaacttggtggtgtaggttgtggggttgcaaccgcgagtgtttactgggttatgtgtctgttactacttacctatgttaaacatgcaccatcccagaaagatattcatacatttgagaatttttctcgccctcactcgcatacacaaaaacgcattactctgctgggattgcctatcggtctggctatgttctttgaggtgacattgtttgctgttgtctccttactgctctcccctcttggagtagtggatgttgcagggcatcaaatcgcgctcaatttcagttcactgatgtttatgttcccactgtcatttggtatcgcagccactatccgggtgggttataacctcggacaaaaatcaactgaaggtgccaaagtatcagcttataccagccttgcgctcgggttaataattgcttgcatcaccgccgcattcacaacaatattccgtgaaccgattgctatgatgtataacgataatcctgaagtggtcatattagcatctaatctgatgctatttgctgctatttaccagctttccgattctgttcaagtcattggctctggtgtattacgtggatataaagatacgcgctctattttcgttatcactttcatcgcctattggattttcggattaccaagtggttatattctggcattgaccaatcttgttactgaacctatgggcccacaaggtttctggattgggtttattatcggattaactgttgcagcaattatgattggctaccggattttgtggttacaaaagcagcctgatcatgctgtcctcgctcgttctacccgttaatttagtacattaaattaatatctcaaggggaaaaagctgcaaattcacactaaaagatgtaaatgcgagcaatcaaacacgaatttgcattttttcccttgccagatagctcagcgatcgttaatattcgtccccgttgtcacccatagaaatttagattgcgtccgtagctcagttggttagagcaccaccttgacatggtgggggtcggtggttcgagtccactcggacgcaccaaatatctggttggcatagcaactcaaatttatgtgcgtccgtagctcagttggttagagcaccaccttgacatggtgggggtcggtggttcgagtccactcggacgcaccatacacttgatatcctcttttttattatctgtaataccaccgttgtttttcttataattactcacatttattataaaaacgcttttctcatccacaatattcaagccgctaaaaattattttttcactgttgcgcaacaactctctgatttttctgatatgaatatgctcattttttactcttatcagataaatttttccaagaatcactttttgattcatttcacagaaattagcctctataatacggccctgtcattagttgaatggtttcagccaattaatttaccgaatccagaaaaaattgcagatgattaatcgctctaaatccacatggttaatacatgcctggcttgatgaaaaacaaccaattgacacttttctgccatccgttttccatgtatgttgcgcaacttaaaatgccagactaacagagccaagtgacactggcatataatgtcaatggttggtaatacactctttttaatccattaaaaccagtagtagatagattgtcatgaaaaaaaccaaaattgtttgtactatcgggccaaaaactgaatccgaagaaaaactgaccgaactgcttaactcaggcatgaacgttatgcgcctgaatttttctcacggtgactacgaagaacatggtcagcgtattaaaaatatccgctcagtcactgcaaaaatcggtaaaaaagcagctatcttactggatactaaaggccctgaaatccgtaccatgaagctggaagatggcaacgatgtttccctgacagctggccagactttcacctttacaactgatcaatccactatcggcaatcaggagcgcgttgccgtaacctattcaggcttacccgccgatttatctgtaggtaatacagttttggtcgatgatggtctgattgccatgacagtaaaagagatcgccggcactgaagttatctgtgaagttctgaacaacggtgacttaggcgaaaacaaaggcgttaacctaccgaacgtttctattaacctgcctgcgctggcagagaaagataaacaggatcttatctttggctgtgaacagggtgttgattttatcgcagcctctttcatccgtaagcgttctgacgttctggaaattcgtgaacacctgaaagctcatggtggtgaacatatccagattatttccaaaattgaaaatcaggaaggtctgaacaattttgatgagatcctggaagcctcagacggtatcatggttgcccgtggtgatctgggtgttgaaatcccggtagaagaagtcattttcgcgcagaaaatgatgatagagaaatgtaactctgcacgtaaagttgtcatcactgcgactcagatgctggattccatgatcaaaaatccacgccctacccgtgccgaagctggtgatgttgccaacgcaattttagacggaactgacgcagttatgctttctggcgaaagtgcgaaaggaaaatacccagtagaagccgtttccatcatggcaactatctgtgaacgtacagatcgcgttatgggcagccggattgaaaataccaaaacacagaaattgcgtgtaactgaagcggtttgccgtggcgcagtagaaattgcggaaaaactggaagcccctctgatcgttgttgcaacttatggcggtaaatctgcaagatctgtgcgtaaatacttccctaatgcacggatcctcgcattaactaccaatgaaatcactgcccgccagttattgctggttaaaggtgtttctacacaggtagtcaaagaaattgcctctaccgatgacttttaccgtatcggtaaagaagctgcattagccagcggtatggcaagtaaaggtgatatcgttgtgatggtatccggtgcattagtaccaagcggcacaacaaatacatcttctgttcatgtgctgtaattatttttgattacaaagcagatcgctcagtaattgagcgatctgtacttataaataatccctccatatttttgtcccttcctccctaataaaaaaatgtgctcctgtaataagcgcaaaaaacagcaataaaagatgcataataaatgcactaattattttaaaattattgacgttaatacgcatcattaaagcattttactcacttaacccacggattctgccagagaaaaatgtgtcaaaataacaaaataggcaatgggatattgttggtttattacatcagtacagtgaaaaactggaagatacatcacgtaatgtttgagatttttctg

SEQ ID NO: 920 - DNA, 4118 bp, Xenorhabdus sp.; identical to SEQ ID NO: 919
  CDS (2374)..(3783)

SEQ ID NO: 921 - DNA, 2466 bp, Xenorhabdus sp.
  CDS (2248)..(2466)
agcccggtaggtcaccaaaactatcgtcataaggccgtatatccagttgcgccatgcccgatgaaacgttaataatattcggatattttttgtgtcccggtgtggtcaccaaattgatgtaagaacaggccgtgaatttgggctgcgccccctcccccacactatctttgcccacgatgccccaccagtcttcgcccacgttgtccggcaggattttgggagcataactgccctgaaatttacagccgtaaaaattcactttgcccgaactgttaccgtataccatgtaagtactccagcgtacccatgttttcggatcaaagtctgctggagcactcggcgttccagggtcattaactccctcacaaataaattccagtccggtacactccagtactcccccattttgtggggcggccgccatgttggcataaacctgaatgctttcgttataacccacctgcacataaatcttgggccggacaactgcatcccttacccaccaatggtaggaacgccgttccggggtcacttgaggaaccttatttccatcaatgtaggggtcaccatacgccagaatcttccgcgttgccccgttcgacacggcaaaactgggccagagatactcacccccacagcgtaaataaatattgttactctgatcgtccggtactttttttagtgcctcctgcagagtttttaacggctgcttctgcgaacccggatttttatcatcaccagctacggaatcgacgtacagctcggacacatccttcgacgcttgttgtccgtaatacagcccgtctggacgtagagtaagcaggttgcccttatccaatgacacaacgacactaagtggactggctgtcgtaccgttgccgcttaacgtgccgttggtactgaccgcaatcttattgttcaggctgttgatcagagtgttaatcacattggcgttcgctactaacgcgttcatgattttttgtaggtctagatccagacatgacccactctggccgttgccagtgataaagccactcccccccacacagacgctgattttatcggcaagtgcctgctggatagcagacatcggcagagtcactgcatcgcactggttatcaatcttaatgtgcagcccattgttgtccatcgtgatactgtcaatgactttccagcatacccggctaaaatccatattgagcggtacatcatcaccgttcccggtaaaagggctgtcgcggtcaattttcaccttacgcaatgcattggcgtcgattgtcactgtcgtgccgtctccgcgtaccagctcaatgtccccggcactgttgacactgccactgaccaactgggtgtccgccaagagggtttccagatccacattgacctgactaccgtccccgagcgtcaacaccagtgtattgtctttggtgagcaccgcattggtcagagtctttttcgctatcgcgtccgccactgctgcggtcagatccaccgtatgtacagtaccgtctttcatcgtcaacgatacgctgagggcactactggtcagactctgcggcgcaatagaagccagattaatatcatgagttacgcccgcctgatccactaaccggatatccgtgccgtcaaaggtcagcgcgtcaataccaggtatggctatctgtcctgattgaatggcctctttaactaacgcacttaagtcctcacaacgcacgatgcgcgtggctggtgccagcacgttgccttgacagttgagcaggcctgcctgtagttcattgcagataatcttctggttaattaccgactggatataatcgatgatccaccctgggttcatccctggcggacaacagttaaacatacctggattcatacccggtggacaagagttatacatggtacctcctacgttttttcataatcgtaattagtgtcaatttgatgtgtttttctactggacagaaaaaatagggaacctctaaaaacttttcacagccacaaaattgagtaaaatgtaggcacagtacctctctgcaaggtagcgccatcatgataccgcctcgttctgctttaaaaaaagacaaacaggcatccgaatatcaccgtcgaaaaatcgatgaattaggtgatccgctgcttgttcttgataaatatgttgatttcttggcactggctgacaccctagaccgtatcgtcccacgtattatttcccccaaagggggacgcccgccattcccgacggaggtgatggttcgcatcattatcctgaaacatttccataatctttccgatgaaaaaatggaatatcaattgcttgaccgaatgagctggcaacgtttttgtcgcttgaccgatgtcattaatattccagaccgtaacacgatttggtgtttcgaaaaacggattgggcaggaaggtgccagagcgttatttgaagaggcgaagcatcagctgtcctttagggca

SEQ ID NO: 922 - DNA, 2466 bp, Xenorhabdus sp.
  CDS (729)..(2465)
tgccctaaaggacagctgatgcttcgcctcttcaaataacgctctggcaccttcctgcccaatccgtttttcgaaacaccaaatcgtgttacggtctggaatattaatgacatcggtcaagcgacaaaaacgttgccagctcattcggtcaagcaattgatattccattttttcatcggaaagattatggaaatgtttcaggataatgatgcgaaccatcacctccgtcgggaatggcgggcgtccccctttgggggaaataatacgtgggacgatacggtctagggtgtcagccagtgccaagaaatcaacatatttatcaagaacaagcagcggatcacctaattcatcgatttttcgacggtgatattcggatgcctgtttgtctttttttaaagcagaacgaggcggtatcatgatggcgctaccttgcagagaggtactgtgcctacattttactcaattttgtggctgtgaaaagtttttagaggttccctattttttctgtccagtagaaaaacacatcaaattgacactaattacgattatgaaaaaacgtaggaggtaccatgtataactcttgtccaccgggtatgaatccaggtatgtttaactgttgtccgccagggatgaacccagggtggatcatcgattatatccagtcggtaattaaccagaagattatctgcaatgaactacaggcaggcctgctcaactgtcaaggcaacgtgctggcaccagccacgcgcatcgtgcgttgtgaggacttaagtgcgttagttaaagaggccattcaatcaggacagatagccatacctggtattgacgcgctgacctttgacggcacggatatccggttagtggatcaggcgggcgtaactcatgatattaatctggcttctattgcgccgcagagtctgaccagtagtgccctcagcgtatcgttgacgatgaaagacggtactgtacatacggtggatctgaccgcagcagtggcggacgcgatagcgaaaaagactctgaccaatgcggtgctcaccaaagacaatacactggtgttgacgctcggggacggtagtcaggtcaatgtggatctggaaaccctcttggcggacacccagttggtcagtggcagtgtcaacagtgccggggacattgagctggtacgcggagacggcacgacagtgacaatcgacgccaatgcattgcgtaaggtgaaaattgaccgcgacagcccttttaccgggaacggtgatgatgtaccgctcaatatggattttagccgggtatgctggaaagtcattgacagtatcacgatggacaacaatgggctgcacattaagattgataaccagtgcgatgcagtgactctgccgatgtctgctatccagcaggcacttgccgataaaatcagcgtctgtgtgggggggagtggctttatcactggcaacggccagagtgggtcatgtctggatctagacctacaaaaaatcatgaacgcgttagtagcgaacgccaatgtgattaacactctgatcaacagcctgaacaataagattgcggtcagtaccaacggcacgttaagcggcaacggtacgacagccagtccacttagtgtcgttgtgtcattggataagggcaacctgcttactctacgtccagacgggctgtattacggacaacaagcgtcgaaggatgtgtccgagctgtacgtcgattccgtagctggtgatgataaaaatccgggttcgcagaagcagccgttaaaaactctgcaggaggcactaaaaaaagtaccggacgatcagagtaacaatatttatttacgctgtgggggtgagtatctctggcccagttttgccgtgtcgaacggggcaacgcggaagattctggcgtatggtgacccctacattgatggaaataaggttcctcaagtgaccccggaacggcgttcctaccattggtgggtaagggatgcagttgtccggcccaagatttatgtgcaggtgggttataacgaaagcattcaggtttatgccaacatggcggccgccccacaaaatgggggagtactggagtgtaccggactggaatttatttgtgagggagttaatgaccctggaacgccgagtgctccagcagactttgatccgaaaacatgggtacgctggagtacttacatggtatacggtaacagttcgggcaaagtgaatttttacggctgtaaatttcagggcagttatgctcccaaaatcctgccggacaacgtgggcgaagactggtggggcatcgtgggcaaagatagtgtgggggagggggcgcagcccaaattcacggcctgttcttacatcaatttggtgaccacaccgggacacaaaaaatatccgaatattattaacgtttcatcgggcatggcgcaactggatatacggccttatgacgatagttttggtgacctaccgggct

SEQ ID NO: 923 - DNA, 665 bp, Xenorhabdus sp.
  CDS (501)..(665)
agagcaagaccttcgaggccagcaccggcgagccgggtgacaggggcgtcaagggctacaaaatcgaaggcccgatgacggtcatcggctccgcctatgaacttacgcgacatgatgacggcaaacgtgttgaccaaatctatctcttgaacgacgctgcccatggcatcaacgccaatagcgctttgctgagcaaggccgacgagcggacgcagcttttcacttcgctcaaggacaccgccgacagggacatcttggccaggcaactgggaaagccgggcagcgagctctaccaggacaaattcccagccttgccggactacacagccgccatcgatcggattgcaaaacgccaggaagttgtcgcggcacgtggcgaggagaaaacttccgccccgatagacctggcgccccaaacgccgcccgacgctgccgatgcggcagtcaataaccagaaaagaatcgtcgaggccctgcaggctggcgatcacaagaagctcgtggaaacgctcgccgcaaccggctcccttgtcgagaaggcggacgccgggtcggcgctgaaagcaatggcggatgcttacgaaagggatatcaaggcagatcccgaaaaggtccgcatgctctatgccaatcggcgcgttgatgtagatgcgctggccaaggag

SEQ ID NO: 924 - DNA, 4106 bp, Xenorhabdus sp.
  CDS (3)..(749)
taaagacactcattgtgccgggcttattgcggcaacaaaacagttatcaaaaactggctctgcttttcgcaattgttgctctcttcaatcatgggatatccctgaaatatcgggtgttccatgtcagtagtggccaaaatctgaccttgctgaatttaggttctatggtcagcttactggtctgtatcatcatgacgattgttgcctttcgtggtcgtgcctggtttttactaccgattgtttacagctttgccgtgataaatttgatactggcaagcatggtacccggagaattcattactcatcttgaaggaagcattggtctatttatacatattgggctggcattactggggtatgccacgttactgattgcagcactttatgcgctacagattagctggctggataatcggctgaaaaagaaaaagctcactttctcgccgggaatgcctccgttaatgactattgagcgcaaaatgtttcacattattcaggttggcgtagttttactaacattgacgttatgtacaggcatcatgtatatggataatgttttcaataaagaaaatatccataaatcggttttgtccctcctcgcatggtttatctatatcatgttgctttggggacactatcgtgaaggatggcgcggtaaacgtgttatttggtttaatttgattggtgcatttatcctgacacttgctttttttggtagcaggttgttgcaggaattcatgacttattaaacccgcagccagcttatataaacattaggaaggaactctgctttggagcatgtctcaacaggcacattaattattgttcttgtcatcatggttatcatttctgcctacttttctgcctcagaaaccggcatgatgacaataaaccgttatcgcttacgtcatttagctaaacagggtagcaatcctgcacggagagtagaatcactgctccgccatcctgacaggctcatcagcctgatcctgatcggtaataaccttgtcaatattctggcatcctcactggctaccattgtgggtatgcgtctttatggcgatgccggggttgcaatcgcaaccgggatactaacttttgtgattctggttttcgcggaagttatgcctaaaactatcgccgcgctatacccggaaaaagttgcctttccaagcagtttattattgcgcccactacagaaaatcatgctgccacttgtatgggcgtttaataagatcactttactgtttatgcgctgtctggggatcaaagcttctggcattcgtaatgattcagtcagtaaagatgaactgagaacgattgttaatgaatcaaacaccaacctctcacgccgtaatcaggatatgctgatctcgatactggatcttgagaaagtcactgttggtgacattatggttccccgtaatgaaattgtcggcattgatattaatgatgactggaaatccgttatacgtcagttgacgcattcgccacatggcagaattgtgttgtaccggaattcactggatgatgctattggcatcttcgtgtgcgtgaagcctaccgtctcatgatggagaaaaaagaatttacgaaaaaaaatctgatcagagccgcggataaaatttatttcattcctgtcagtacaccattaaatgctcagttggttaacttccagcgcaataaacaaaaagcaagtctggctgttgatgagtatggggacattcaggggctagtgactgtagaagatattctggaagaaatagttggtgattttactacttctatgtctccttctctggcagaagaagtcttacctcaaagtgatggtacggttctggtggacggtacagccaatatccgtgaattaaataaagcatttgactggacactgccggctgacggaccacgcacaatgaacggcatgattctggaagagttaggcgagatcccggagttgaatgttcaggtgcagattaacgattacaattttgaaattctttctgtcaatgacaatgttatcaaaaaagtacgtgtaaccccgatgaagaagggagcagctaaaaatactaaaaccagcagctgattgataacataacaaatctggccgtagaacggtatttttacggccagaataacaagtcttactatattcagcttaattcaactcacactacacttgcagttcaaccagtttttcttccggtaaagccagttcatcatttttattaacacgaacatctgcatccagaatgtggcgggcgatatcctgtgcttcctgcaaagaatgcatttcataagtaccacactgataaacattcaattcaggaatttgtttctgatcctggactttcagtacatcagccatcgcacctttccatgcttcagcaactttcgattcatctggagcaccaattaagctcatgtaaaaaccggtacgacaccccattggagaaatatcgataatttcaactccagtgccattcaggtggttgcgcataaaaccggcaaacaagtgttcaagtgtgtgaatgcctttttctggcatgacttctttgttaggaatacaaaaacgtaggtcaaatactgtgatggtatcaccgtgaggtgttttcatcatcttggcaactctaacggctggtgcagacatacgcgtatggtcaacggtaaaactgtccaataaaggcatgatcttaatctcctcagacatcagatttttttacgaaaaaaatttttcagataaatgaaacctttttaattacagcaggtcttaattaatgaagacgcgcaaaattgttatcatccttatttttctaagagacttttttaattcggccaccactcggtggccatttttatttttaagaccctgcatgtaattttagataatcatcaaaactcatgttgtcttgctgttccaaattacgttgtcgttctactgaagcttcacgctccgcagaaaaacgttcatcgttgagtatactatatggctcgttgactaactccagataatatttattagccaattccaatccaaaaccatcaatcccctgagttttcatccgttctaatacacgggcagaaaatgtcagcgatggatcttcaaacataccaaccagttccttacaaactgactgatattgtgactcagagcaactatccaggacctcagcaacacgttccagatctgcaaataattccagaccgactaccttgagcggttgcagttcaatcccatgaccaataccaacatgaagatccggtctacgcccttcaaggatcactttattccagtttttacggcaacaatccaattcttcactgctcatttcaggcgaatcagccactgcacaccatatcagaaataaatccagaaaacggatctgagtttcatcgacgccaatcgatgtgaatggattgatatctagagaacgaacttcaatatattccacccctccacgaagtaaggcatcagaaggcgtttctccctcttcagcaactcgtttagggcgtataggtgcatatagttcattctctatctgaagaacgttcgtattcagctgtagatacttaccgtcttttttaattcccagtgctgcgaactcatctgacggcttgtgaattgcttttttaagaccttttacatatgtatgaaggctattaaaagtaatattcagatcactctgtgatttgttggtataccctaagtcactcattctcaaagaagttgcgtaaggtaaataacaggttcctttttcagtctgctcaaaggataacgctgtatctctcccgcgtagaaacgaggaacaaattgccggtgatgcaccaaacaagtatgggattacccaaccgaaccgatagtaattgcggatcagtttaaaataccctgctgaaatttgttctttaccactttctgcatcttttacacctaaccatgcctgccagaagctgatcggtagtgaaaaattatagtgcacgccagagatggtctgcatcaatgcaccataacgatttttcaacccctccctatacagggtcttaaaacgcccgatattagattggccatactgcgccagcgtaatgtcatcttccttactaatgaagca

SEQ ID NO: 925 - DNA, 4106 bp, Xenorhabdus sp.; identical to SEQ ID NO: 924
  CDS (849)..(1574)

SEQ ID NO: 926 - DNA, 4106 bp, Xenorhabdus sp.; identical to SEQ ID NO: 924
  CDS (1574)..(2086)

SEQ ID NO: 927 - DNA, 4106 bp, Xenorhabdus sp.
  CDS (1418)..(1933)
tgcttcattagtaaggaagatgacattacgctggcgcagtatggccaatctaatatcgggcgttttaagaccctgtatagggaggggttgaaaaatcgttatggtgcattgatgcagaccatctctggcgtgcactataatttttcactaccgatcagcttctggcaggcatggttaggtgtaaaagatgcagaaagtggtaaagaacaaatttcagcagggtattttaaactgatccgcaattactatcggttcggttgggtaatcccatacttgtttggtgcatcaccggcaatttgttcctcgtttctacgcgggagagatacagcgttatcctttgagcagactgaaaaaggaacctgttatttaccttacgcaacttctttgagaatgagtgacttagggtataccaacaaatcacagagtgatctgaatattacttttaatagccttcatacatatgtaaaaggtcttaaaaaagcaattcacaagccgtcagatgagttcgcagcactgggaattaaaaaagacggtaagtatctacagctgaatacgaacgttcttcagatagagaatgaactatatgcacctatacgccctaaacgagttgctgaagagggagaaacgccttctgatgccttacttcgtggaggggtggaatatattgaagttcgttctctagatatcaatccattcacatcgattggcgtcgatgaaactcagatccgttttctggatttatttctgatatggtgtgcagtggctgattcgcctgaaatgagcagtgaagaattggattgttgccgtaaaaactggaataaagtgatccttgaagggcgtagaccggatcttcatgttggtattggtcatgggattgaactgcaaccgctcaaggtagtcggtctggaattatttgcagatctggaacgtgttgctgaggtcctggatagttgctctgagtcacaatatcagtcagtttgtaaggaactggttggtatgtttgaagatccatcgctgacattttctgcccgtgtattagaacggatgaaaactcaggggattgatggttttggattggaattggctaataaatattatctggagttagtcaacgagccatatagtatactcaacgatgaacgtttttctgcggagcgtgaagcttcagtagaacgacaacgtaatttggaacagcaagacaacatgagttttgatgattatctaaaattacatgcagggtcttaaaaataaaaatggccaccgagtggtggccgaattaaaaaagtctcttagaaaaataaggatgataacaattttgcgcgtcttcattaattaagacctgctgtaattaaaaaggtttcatttatctgaaaaatttttttcgtaaaaaaatctgatgtctgaggagattaagatcatgcctttattggacagttttaccgttgaccatacgcgtatgtctgcaccagccgttagagttgccaagatgatgaaaacacctcacggtgataccatcacagtatttgacctacgtttttgtattcctaacaaagaagtcatgccagaaaaaggcattcacacacttgaacacttgtttgccggttttatgcgcaaccacctgaatggcactggagttgaaattatcgatatttctccaatggggtgtcgtaccggtttttacatgagcttaattggtgctccagatgaatcgaaagttgctgaagcatggaaaggtgcgatggctgatgtactgaaagtccaggatcagaaacaaattcctgaattgaatgtttatcagtgtggtacttatgaaatgcattctttgcaggaagcacaggatatcgcccgccacattctggatgcagatgttcgtgttaataaaaatgatgaactggctttaccggaagaaaaactggttgaactgcaagtgtagtgtgagttgaattaagctgaatatagtaagacttgttattctggccgtaaaaataccgttctacggccagatttgttatgttatcaatcagctgctggttttagtatttttagctgctcccttcttcatcggggttacacgtacttttttgataacattgtcattgacagaaagaatttcaaaattgtaatcgttaatctgcacctgaacattcaactccgggatctcgcctaactcttccagaatcatgccgttcattgtgcgtggtccgtcagccggcagtgtccagtcaaatgctttatttaattcacggatattggctgtaccgtccaccagaaccgtaccatcactttgaggtaagacttcttctgccagagaaggagacatagaagtagtaaaatcaccaactatttcttccagaatatcttctacagtcactagcccctgaatgtccccatactcatcaacagccagacttgctttttgtttattgcgctggaagttaaccaactgagcatttaatggtgtactgacaggaatgaaataaattttatccgcggctctgatcagattttttttcgtaaattcttttttctccatcatgagacggtaggcttcacgcacacgaagatgccaatagcatcatccagtgaattccggtacaacacaattctgccatgtggcgaatgcgtcaactgacgtataacggatttccagtcatcattaatatcaatgccgacaatttcattacggggaaccataatgtcaccaacagtgactttctcaagatccagtatcgagatcagcatatcctgattacggcgtgagaggttggtgtttgattcattaacaatcgttctcagttcatctttactgactgaatcattacgaatgccagaagctttgatccccagacagcgcataaacagtaaagtgatcttattaaacgcccatacaagtggcagcatgattttctgtagtgggcgcaataataaactgcttggaaaggcaactttttccgggtatagcgcggcgatagttttaggcataacttccgcgaaaaccagaatcacaaaagttagtatcccggttgcgattgcaaccccggcatcgccataaagacgcatacccacaatggtagccagtgaggatgccagaatattgacaaggttattaccgatcaggatcaggctgatgagcctgtcaggatggcggagcagtgattctactctccgtgcaggattgctaccctgtttagctaaatgacgtaagcgataacggtttattgtcatcatgccggtttctgaggcagaaaagtaggcagaaatgataaccatgatgacaagaacaataattaatgtgcctgttgagacatgctccaaagcagagttccttcctaatgtttatataagctggctgcgggtttaataagtcatgaattcctgcaacaacctgctaccaaaaaaagcaagtgtcaggataaatgcaccaatcaaattaaaccaaataacacgtttaccgcgccatccttcacgatagtgtccccaaagcaacatgatatagataaaccatgcgaggagggacaaaaccgatttatggatattttctttattgaaaacattatccatatacatgatgcctgtacataacgtcaatgttagtaaaactacgccaacctgaataatgtgaaacattttgcgctcaatagtcattaacggaggcattcccggcgagaaagtgagctttttctttttcagccgattatccagccagctaatctgtagcgcataaagtgctgcaatcagtaacgtggcataccccagtaatgccagcccaatatgtataaatagaccaatgcttccttcaagatgagtaatgaattctccgggtaccatgcttgccagtatcaaatttatcacggcaaagctgtaaacaatcggtagtaaaaaccaggcacgaccacgaaaggcaacaatcgtcatgatgatacagaccagtaagctgaccatagaacctaaattcagcaaggtcagattttggccactactgacatggaacacccgatatttcagggatatcccatgattgaagagagcaacaattgcgaaaagcagagccagtttttgataactgttttgttgccgcaataagcccggcacaatgagtgtcttta

SEQ ID NO: 928 - DNA, 4106 bp, Xenorhabdus sp.; identical to SEQ ID NO: 927
  CDS (1)..(1245)

SEQ ID NO: 929 - DNA, 4947 bp, Xenorhabdus sp.
  CDS (2)..(628)
  unsure (1)..(4947): unsure at all n locations
tgaacccggtccggaagcacttattgggctggaagggttttgtgaattacgccgtgagctggataagcaaccgactcagttgcttgatagccgtatccgccgcttccagacctttgcggaaattaaaacagaaccgggtccacactttgggttaggttttgacgcatacgccacatggacgtcccctatccgtaagtacagcgatattatcaatcatcgtttgctgaaagccgttattcaacacactgaggcagagaaaccggctgaagagatctgtttgcagctgtccgaacgtcgacgcgcaaaccgtatggccgaacgcgatgttggtgactggctctatgcccgttatctcaaaccttatgctggcacagataaaatctttgctgctgagattattgatatcactcgtggtggtctgcgtgttcgtttggtcgacaatggtgcaattgctttcgttccgggaccattcctgcattccgttcgtgacgagcttcaatgcagtcaggaaaccggctctgtcctgattaaaggagaagcagtttatcgcctgaacgatattatcgatgtgcgccttgaagaagtcagaatggaaacccgcaatatcgtggcgcgtcctgttagttaacacaggatcaacataataggctattcccaataaaacggggatttccagaacataaacacactgccgctattataggcggcagtttcataacaaaacttaaatcatcatttaatttcatatgactacacaacaaatcatccctaaattcataccccaatttatacatggtgctgtaaccctcttacctttgctgagtaccctgataattttcccgtctcaggcatcttccgataacgttcagcaagagcaaataattaagcagcttactacgttggaacaaagtgccaatgggcatcttggagtggtcttaatcaatagcgcagacaattcaactatcggctatcgcacaaatgagcgttttccattatgtagcaccagtaaatttatggcagtttctgcgctactgaaaaaaagcgaaacagatgaaaatttgttaaagcaaagagttaattacaaacaatctgatttagttgagtacagtccgattactgaaaaatatattgaaactggtatgacactggcggagctaagtgcagcaactttgcaatatagtgataatactgccatgaacctgatcattaaccagttaggtagccctgaaagtgtgacaacatttgcccgaactctcggtgacacgatgtttcggctggatcgtaaagaaccagagttaaatctggttcagccgagtgatgagcgtgatacttcaacacctcaggctatggcagaaagtctatataaactgactttaggtgattccctcgcaccaaaacaacgtacgcaactggtggaattgctgaaaggaaacaccactggaaatgccagtattcgtgctagattaccaaaagattgggttgtcggggataaaaccggtcgctgtgattatggctcaaccaacgatattgccgtaatctggccgacgggaaaccgagcaccactggtattggtgacttatttcactcaacccggtgataaaaatgccaaagctcgccctgatgtactggcagaagcagcgcgtataatgattcaggctgaataagattctataacgggaattatgaacacaagctatgccataagtctgttacattgcatagcttgtgaagattgataaagtgagatgaaaagctaaatcagccaccagccagtttgactttcatgcctttcgcttccaataactgttttagtaaatcgcgtttatcgccctgaatttcaatctcaccatctttaactgaaccaccgcagccacattttttcttcaattctgcggctagcttagcaatagtttgatcatcagcatcaattccagtgataacacaaacgcctttgcctttacgtccgctggtctggcgttggatacgcacaatcccatcacctttaggacgagccgatggcgctttttcttcctgaatacggccgctatctgttgaataaaccagacgtgagttattatccatgaacaatcccgattgattcattaatttgctgcaatgccaatgccggattttcagctcgtgtaatcggacgcccgatcaccatataatccacaccggcctgaattgcctgtgatggtgtcataatacggcgttgatccccggcatccgaaccttcaggacgaatacccggagtaaccagtttgaattcctgaccacatgctgctttcagttgttgtgcttcatgagctgaacaaaccacaccatccagaccacactgtttcgtcagtttcgccagacgttcagcgtgctgagctggcgtcacatcaatccccgtgcctaacaaatcagactgatccatgctggtcaggacagtaacagcgattaacaatggcgcatctttaccataaggtaataaaatttctttagcagcggtcatcattctttccccgccaccggcatgaatattgaccatccaaacacccaattctgctgctgcagctacagctcttgctgtggtgttaggaatatcatgaaatttgagatccaaaaacacgtcaaaaccacgctggtgcaacatacggacaaactgcgggccatttaatgtaaacatctccttgcccactttgagacgacaagattgaggattaatcttatcgacaaatgccagtgctgcatcctgattgtcataatccaacgcaacaacaaccggtgattcaacttgcttacctaaagcttgacctgtatgggatgtcattttttagcctttaattttaaaatgaattttatttcgcgcataaaaattttataaataaaaaacgccaccaataaagtgacattgtcactgcccgtctaaacctcgaatgggtttaattgtgtcccacgaacgacatgaaggacaatgccaataaagtgaacgagaagtaaagccacacttatggcatcgataatcaggtttggttcggatctgttcacccaccatattacgcaaaagaagcaaactttctttggctcgcccttcttctgcatcaaccagatggtaatccatcaggcaataaaagagacgcatcgtaggatgacgttccaactgccgattaatataaatctgggctgtatcacgcccctctttttgttcaataatgtcggccagatggatctctgcaattgctccacaattttcttccacgcaacgccggatgaaagcttcccactcttccggctgaacaagatccctatagcactcctgcaacatcggcaaaacttcgctaaccagttgtttatcctgctcgagaactcgtttcagcacctcagttgctttggtatattctttctgtgccatataaatacggccaaacatgatcgatacacgggcacaatttttattcgcctgagcagccttattcaaatacccgatagcatcactgaaaccgtcttccctcattccctgtagagctaattcacaataaaaatgggcgatttcttcgcggaattgctgtttacccagcctgaccagtttctctgccacctcgatggctttgctccagtcactagttgattgatagatagtcagcagagaattaagtgcgctctcccgaaaatccttttcatcgattaactgaacaaacatattttctgcccgatcatataacccggcagccatgtaatctctaccgagctgctgagttgccagtaaacgctgttcaaatgtcagggaggcactttccataagggattggtgaatacggatggctctttcaacttcaccacgggagcggaacaggttgcccagcgttaaatgtgcttcaaacgcggaactgtcctcttttaacatatcaagaaacagatcgactgccttgtcctgttggttcgaaagtaaaaaattaaccccatcgacatattcacgtgacaggcggtctgccgattgttgcttatcttgttgagcacttctgcgtcccatataccagccatacgcggcagcaataggaagcaacagaaacaacagctctaacatggagtattattccttgtccaggaccactggagcttgagagacagtttttgtcgataattcaactggctgctccaactgggtctccaagcgcttaattttacgtttcgcgcgtcttagcgacatgctggtgcgcagataaaacccgccacaaattccccatccaagagcanaaccgatggcaaataaaaacgacagcanagtggatatcgaataatcacctttggcaatcaaataattgaaagttaccacttgattattatttgctcccagtgtcactgagataacaaaaacaaccagtgccagtaataagatcagaaaatatttcacattgtttcctgttatcgattgttgctgattgatatgccaaataacagacatagtggcttgctaaattagcatttctcatctacgcaaaggaagtattttattgcactaaaccaatatttcaccctttttgtgacaatattctactttgctgcctgtaattccgtcactgttttccgtcgaacaagcatatccaagtaaaacaaataactagatgtatcactgtatgtgaattttcaccggcataaaggcaccggatatgtctacaaaaatatgtttatagtttagcatgttaatattactgcaaaccgcaattgtctctcctgtgctttatccaaaaatccgacatatctttatctacgaacataagcataatttctgttatactcgcgatgcgtacatgcactgtaatcagagaaaatttttgcgtagttttagctgatttccaaactggtattgttctgagtatcgcaatattgtcattgtaacgagctaaatcaacatatgaatacaaacatacagctaacacgagctttagagcacatggtaggagc

SEQ ID NO: 930 - DNA, 4947 bp, Xenorhabdus sp.; identical to SEQ ID NO: 929
  CDS (804)..(1664)
  unsure (1)..(4947): unsure at all n locations

SEQ ID NO: 931 - DNA, 4947 bp, Xenorhabdus sp.
  CDS (2866)..(3189)
  unsure (1)..(4947): unsure at all n locations
gctcctaccatgtgctctaaagctcgtgttagctgtatgtttgtattcatatgttgatttagctcgttacaatgacaatattgcgatactcagaacaataccagtttggaaatcagctaaaactacgcaaaaattttctctgattacagtgcatgtacgcatcgcgagtataacagaaattatgcttatgttcgtagataaagatatgtcggatttttggataaagcacaggagagacaattgcggtttgcagtaatattaacatgctaaactataaacatatttttgtagacatatccggtgcctttatgccggtgaaaattcacatacagtgatacatctagttatttgttttacttggatatgcttgttcgacggaaaacagtgacggaattacaggcagcaaagtagaatattgtcacaaaaagggtgaaatattggtttagtgcaataaaatacttcctttgcgtagatgagaaatgctaatttagcaagccactatgtctgttatttggcatatcaatcagcaacaatcgataacaggaaacaatgtgaaatattttctgatcttattactggcactggttgtttttgttatctcagtgacactgggagcaaataataatcaagtggtaactttcaattatttgattgccaaaggtgattattcgatatccactntgctgtcgtttttatttgccatcggttntgctcttggatggggaatttgtggcgggttttatctgcgcaccagcatgtcgctaagacgcgcgaaacgtaaaattaagcgcttggagacccagttggagcagccagttgaattatcgacaaaaactgtctctcaagctccagtggtcctggacaaggaataatactccatgttagagctgttgtttctgttgcttcctattgctgccgcgtatggctggtatatgggacgcagaagtgctcaacaagataagcaacaatcggcagaccgcctgtcacgtgaatatgtcgatggggttaattttttactttcgaaccaacaggacaaggcagtcgatctgtttcttgatatgttaaaagaggacagttccgcgtttgaagcacatttaacgctgggcaacctgttccgctcccgtggtgaagttgaaagagccatccgtattcaccaatcccttatggaaagtgcctccctgacatttgaacagcgtttactggcaactcagcagctcggtagagattacatggctgccgggttatatgatcgggcagaaaatatgtttgttcagttaatcgatgaaaaggattttcgggagagcgcacttaattctctgctgactatctatcaatcaactagtgactggagcaaagccatcgaggtggcagagaaactggtcaggctgggtaaacagcaattccgcgaagaaatcgcccatttttattgtgaattagctctacagggaatgagggaagacggtttcagtgatgctatcgggtatttgaataaggctgctcaggcgaataaaaattgtgcccgtgtatcgatcatgtttggccgtatttatatggcacagaaagaatataccaaagcaactgaggtgctgaaacgagttctcgagcaggataaacaactggttagcgaagttttgccgatgttgcaggagtgctatagggatcttgttcagccggaagagtgggaagctttcatccggcgttgcgtggaagaaaattgtggagcaattgcagagatccatctggccgacattattgaacaaaaagaggggcgtgatacagcccagatttatattaatcggcagttggaacgtcatcctacgatgcgtctcttttattgcctgatggattaccatctggttgatgcagaagaagggcgagccaaagaaagtttgcttcttttgcgtaatatggtgggtgaacagatccgaaccaaacctgattatcgatgccataagtgtggctttacttctcgttcactttattggcattgtccttcatgtcgttcgtgggacacaattaaacccattcgaggtttagacgggcagtgacaatgtcactttattggtggcgttttttatttataaaatttttatgcgcgaaataaaattcattttaaaattaaaggctaaaaaatgacatcccatacaggtcaagctttaggtaagcaagttgaatcaccggttgttgttgcgttggattatgacaatcaggatgcagcactggcatttgtcgataagattaatcctcaatcttgtcgtctcaaagtgggcaaggagatgtttacattaaatggcccgcagtttgtccgtatgttgcaccagcgtggttttgacgtgtttttggatctcaaatttcatgatattcctaacaccacagcaagagctgtagctgcagcagcagaattgggtgtttggatggtcaatattcatgccggtggcggggaaagaatgatgaccgctgctaaagaaattttattaccttatggtaaagatgcgccattgttaatcgctgttactgtcctgaccagcatggatcagtctgatttgttaggcacggggattgatgtgacgccagctcagcacgctgaacgtctggcgaaactgacgaaacagtgtggtctggatggtgtggtttgttcagctcatgaagcacaacaactgaaagcagcatgtggtcaggaattcaaactggttactccgggtattcgtcctgaaggttcggatgccggggatcaacgccgtattatgacaccatcacaggcaattcaggccggtgtggattatatggtgatcgggcgtccgattacacgagctgaaaatccggcattggcattgcagcaaattaatgaatcaatcgggattgttcatggataataactcacgtctggtttattcaacagatagcggccgtattcaggaagaaaaagcgccatcggctcgtcctaaaggtgatgggattgtgcgtatccaacgccagaccagcggacgtaaaggcaaaggcgtttgtgttatcactggaattgatgctgatgatcaaactattgctaagctagccgcagaattgaagaaaaaatgtggctgcggtggttcagttaaagatggtgagattgaaattcagggcgataaacgcgatttactaaaacagttattggaagcgaaaggcatgaaagtcaaactggctggtggctgatttagcttttcatctcactttatcaatcttcacaagctatgcaatgtaacagacttatggcatagcttgtgttcataattcccgttatagaatcttattcagcctgaatcattatacgcgctgcttctgccagtacatcagggcgagctttggcatttttatcaccgggttgagtgaaataagtcaccaataccagtggtgctcggtttcccgtcggccagattacggcaatatcgttggttgagccataatcacagcgaccggttttatccccgacaacccaatcttttggtaatctagcacgaatactggcatttccagtggtgtttcctttcagcaattccaccagttgcgtacgttgttttggtgcgagggaatcacctaaagtcagtttatatagactttctgccatagcctgaggtgttgaagtatcacgctcatcactcggctgaaccagatttaactctggttctttacgatccagccgaaacatcgtgtcaccgagagttcgggcaaatgttgtcacactttcagggctacctaactggttaatgatcaggttcatggcagtattatcactatattgcaaagttgctgcacttagctccgccagtgtcataccagtttcaatatatttttcagtaatcggactgtactcaactaaatcagattgtttgtaattaactctttgctttaacaaattttcatctgtttcgctttttttcagtagcgcagaaactgccataaatttactggtgctacataatggaaaacgctcatttgtgcgatagccgatagttgaattgtctgcgctattgattaagaccactccaagatgcccattggcactttgttccaacgtagtaagctgcttaattatttgctcttgctgaacgttatcggaagatgcctgagacgggaaaattatcagggtactcagcaaaggtaagagggttacagcaccatgtataaattggggtatgaatttagggatgatttgttgtgtagtcatatgaaattaaatgatgatttaagttttgttatgaaactgccgcctataatagcggcagtgtgtttatgttctggaaatccccgttttattgggaatagcctattatgttgatcctgtgttaactaacaggacgcgccacgatattgcgggtttccattctgacttcttcaaggcgcacatcgataatatcgttcaggcgataaactgcttctcctttaatcaggacagagccggtttcctgactgcattgaagctcgtcacgaacggaatgcaggaatggtcccggaacgaaagcaattgcaccattgtcgaccaaacgaacacgcagaccaccacgagtgatatcaataatctcagcagcaaagattttatctgtgccagcataaggtttgagataacgggcatagagccagtcaccaacatcgcgttcggccatacggtttgcgcgtcgacgttcggacagctgcaaacagatctcttcagccggtttctctgcctcagtgtgttgaataacggctttcagcaaacgatgattgataatatcgctgtacttacggataggggacgtccatgtggcgtatgcgtcaaaacctaacccaaagtgtggacccggttctgttttaatttccgcaaaggtctggaagcggcggatacggctatcaagcaactgagtcggttgcttatccagctcacggcgtaattcacaaaacccttccagcccaataagtgcttccggaccgggttca

SEQ ID NO: 932 - DNA, 4947 bp, Xenorhabdus sp.; identical to SEQ ID NO: 931
  CDS (2133)..(2873)
  unsure (1)..(4947): unsure at all n locations

SEQ ID NO: 933 - DNA, 4947 bp, Xenorhabdus sp.; identical to SEQ ID NO: 931
  CDS (906)..(2048)
  unsure (1)..(4947): unsure at all n locations

SEQ ID NO: 934 - DNA, 4947 bp, Xenorhabdus sp.; identical to SEQ ID NO: 931
  CDS (606)..(872)
  unsure (1)..(4947): unsure at all n locations

SEQ ID NO: 935 - DNA, 4658 bp, Xenorhabdus sp.
  CDS (2736)..(3275)
gtcctttaaagtcactgcaagctatacgccttctatcattgatccgattatgcagagcttcacacaggatgcggctcagatgatggcgcccggttaccatgtgaatgtgctctgtaactacttttttagtcttggcgctacatttggtgtcattttaatctgctggttcatcacagagaaaattgtggaaccctggttgaataagaactgccctgtttcaaccaatattgaaacagatactgacaaagatctggaaagaattacacctgaagaaaatcgtgcatttcgaattgccggatccaccgtgttattgctgggtataggtcttattgccttattatggccagaaacatcgccaatgcgggcaccggatggcagcatgaccagccctaaagcccctattatgcagatagttgtcccgcttttattcctgtttttcgcagtgccgggtatcgtttatggctatttaactaaatcctttacctcaagccgtgatgtcgttaaatcaatggaaaacatcacgcagtcattaatcccatttattgtttttgtgttttttgccgctcagtttctgtattcatttcatcattcaaatctgggtacattattagccttatccggcgcagaactgctacgtacactcgaaatgccatccggtctgaccgtactcggtgtgatcatattaacggctatcattaatattatgatcacgtcggcaacttcgaaatgggcaattatggcaccagtgcttgtaccgatgctaatggccgtcggtatttctcctgaattaacacaagccgcttttcgggtgagtgattcagctatgaacgtcagtacaccaatgttcccgttctatcctttgattctcatgtattgccagaaatactataaaaatgcgggtatcggcactttatgctcaatgatgctcccattcaccattggcttgctgattattttaacggcaacactctatgtgttctgggcatttgatattccgattggtttcgacagtggttacacatggcaccctgcacaatagggttgtcatatattgaatacaagagggaagaaaaaatgaatgaattaggtcaacagcttgaacaacgtttctaccgctatttagctattgaaagccagagtgatgcctccagcattattgtaccgagtaccgaagggcaacgtaagctggctgaattattagcgaaagagctggaaggttatggcctcgctgatatttatattgatgagcacgctattctttatgctgtgcgtcgtggtaataaaccatcagcccccaagattggttttgtggcccatctggataccgttgatgtcgggttgtcggcagtaataaagcctcagaccttgctttatgaaggaaaagatttatgcctgaatagccaagaagatatctggtttaaaacgagcgaacacccggaagctgccccttatatcggtgagccaatcattttcagcgacggaaccagtgttcttggtgcagataacaaagctgcggttaccgttatcatggagctgatggataaattacagcaggcggaatttgactatggtgatatctatgtggcttttgttcctgatgaagaaatcgggctacgtggttccaaattgatggatttatcccgtttcaatgttgattttgcttatacaattgactgctgtgcactgggggaagtcatctatgaaaccttcaatgcagcctctgtcgacattacaatcacaggcattaccacacatccaatgtctgcaaagaacgtattactaaacccaatcagggtcgcatatgattttatcggctgttttgataaatatgatacacctgagcatactgaacatcgggaaggttatttttattttacgaacttaatcgccaacccagataatgcaaaaatcaaaatggccatccgtgattttgaccgcaatagctataaagaacgtaaaacttatgttactcagtcaattgaacttatccgtgcccgtcaccctcgagcaaaaatagattataagatcgaagatgtctacagcaatattagcgactcattaggtgacgaccgtaccgcgattgacctgattcttgaagcactcaaaattcagggaattactgctaatatcattccgatgcgtggaggcacagatggctcggctttatctgcaagaggtattctgacaccaaattactttaccggagcattgaatttccattctcgttttgagtttttgccgattagcgcatttgaaaaaagctatctggtcacggaaaccatttgtcgcttagttgggaaaaaataaaaaactgatttaaataataaacagccatcatctggcaaattggtggctatttaatcacaagagtaaataaccttatagattaacagcaattatcttcacaacggaaataattacaaatgatatatccttagtaacaactttaattaataaaccgaattcataaatacgaaatctcgcttaattaatttaagttatctttatatatctaagatgaatatatttattccattttattttatccaataagaaaaggaactcattaaattcattattgataaattttgatattcttaaacaaattatttgtctgaaattcacagaaaccgtaccaaactttcatctattataatgcttgggattttcatttatgtttatatcctgtattagtcgattgtattttttttagtgatcaaaaataaggaaacgatatgctattaaaaaacacttccagacaatttggtcatgtctctgttttgatccactggttaattgctcttgctgtttatggaatgttcatgctggggttatggatggtgacattaagctattatgatagctggtatcatagtgcacctgaattgcataaaagcattggatttatgatttttatcgtcatggtcattcgtgttatctggcgatttatttcacccccaccaaaacctctgagcagttacagccagcttactcggatcagtgcaaaactggctcatctcaccctttatatcatcctgtttggcattttattcagcgggtactttatttccaccgctgatggtcaacccatcagtgtttttggctggtttgaaatccctgccacactggcaagacaaggagtacaagcagataccgcgggtattatccacttatatcttgcctggctgattgttgtactttcccttttgcatgggcttgctgctttaaaacatcactttattgatcgtgatagtacgctaaaaagaatgtttggtttcctgccagacacaaaataaattttggagaatcattatgttgaaaaagacgttaatcggcctgactgcgggtgttttatttatgggtgcaagctcagcaatggcatccaactataaaattgatactgccggccaacacgcttttattgagttccgtattcagcatttaggtatgagctgggtttatggtaatttcaaaaaatttgatggtgattttaccttcgatagccaaaatccgactgctgataaagttagtgtcaccattaaaactgacagtatagataccaaccatgctgaacgtgataagcacttacgtagtgctggttttttaaacacagcaaaatacccggaagccaaatttacctcaaccaaagtggaaaaagtgggtgaacagtacaaagttatcggtgaactgacactcaatggtgtgaccaaaccagtcacactacaagcgaagctgatgggagaaggtaaagatccgtggggcggttatcgtgccggatttgaagcgaacggtaaaattaaattgaaagacttcaatattaaaaccgacttagggccaaaatctcaggaagttgagttaatcatttctgtggaaggggttaaggaataagtttggtattctccttaactacctatccccttcttttcattttccaagttgcagatcaatagctctgcaactccaaatctcttagtaatttaaatctgcgatgcaattaatgtattgacgtggtgtgtaattgtttccaaagcattatgagccgcataatcagccttaagtctctgcgcctgctgataccattctcctgaggagaggatacgagttactgcctgatatatctgctgtttactcggggtatctgtattcaagctgatgccacagcgcgcccaaatgacacgagcaacagcctccagcttaccatctcctgtacccgccacaaccatagggacaccatgacgaatagcggcattgagagaaccgtaaccaccattagtgataaaaactaccgaacgaggaagccagtactcaaaatcaagatactctactaccctaacattatctggtatagatttacctagtatttcgactggcctccctgcagtaatagccaaaacccgtacaggtaaacctgatagtgcctgtaaagtcggtattattaattgagtaaaatcaacattggctagcgttccttgtgtgacaataacaagtggtaagctttcatctgaccacttcagctgagttttatcatcccgcacatcaactgccagcgaaccaataaaatccagcgattcaggcaaatcatcacgtggaaactcaaacaactgagtagccaattgtagaaaacgatctgattgttcacaatcacatcactttagagc

SEQ ID NO: 936 - DNA, 4658 bp, Xenorhabdus sp.
  CDS (31)..(681)
gctctaaagtgatgtgattgtgaacaatcagatcgttttctacaattggctactcagttgtttgagtttccacgtgatgatttgcctgaatcgctggattttattggttcgctggcagttgatgtgcgggatgataaaactcagctgaagtggtcagatgaaagcttaccacttgttattgtcacacaaggaacgctagccaatgttgattttactcaattaataataccgactttacaggcactatcaggtttacctgtacgggttttggctattactgcagggaggccagtcgaaatactaggtaaatctataccagataatgttagggtagtagagtatcttgattttgagtactggcttcctcgttcggtagtttttatcactaatggtggttacggttctctcaatgccgctattcgtcatggtgtccctatggttgtggcgggtacaggagatggtaagctggaggctgttgctcgtgtcatttgggcgcgctgtggcatcagcttgaatacagataccccgagtaaacagcagatatatcaggcagtaactcgtatcctctcctcaggagaatggtatcagcaggcgcagagacttaaggctgattatgcggctcataatgctttggaaacaattacacaccacgtcaatacattaattgcatcgcagatttaaattactaagagatttggagttgcagagctattgatctgcaacttggaaaatgaaaagaaggggataggtagttaaggagaataccaaacttattccttaaccccttccacagaaatgattaactcaacttcctgagattttggccctaagtcggttttaatattgaagtctttcaatttaattttaccgttcgcttcaaatccggcacgataaccgccccacggatctttaccttctcccatcagcttcgcttgtagtgtgactggtttggtcacaccattgagtgtcagttcaccgataactttgtactgttcacccactttttccactttggttgaggtaaatttggcttccgggtattttgctgtgtttaaaaaaccagcactacgtaagtgcttatcacgttcagcatggttggtatctatactgtcagttttaatggtgacactaactttatcagcagtcggattttggctatcgaaggtaaaatcaccatcaaattttttgaaattaccataaacccagctcatacctaaatgctgaatacggaactcaataaaagcgtgttggccggcagtatcaattttatagttggatgccattgctgagcttgcacccataaataaaacacccgcagtcaggccgattaacgtctttttcaacataatgattctccaaaatttattttgtgtctggcaggaaaccaaacattctttttagcgtactatcacgatcaataaagtgatgttttaaagcagcaagcccatgcaaaagggaaagtacaacaatcagccaggcaagatataagtggataatacccgcggtatctgcttgtactccttgtcttgccagtgtggcagggatttcaaaccagccaaaaacactgatgggttgaccatcagcggtggaaataaagtacccgctgaataaaatgccaaacaggatgatataaagggtgagatgagccagttttgcactgatccgagtaagctggctgtaactgctcagaggttttggtgggggtgaaataaatcgccagataacacgaatgaccatgacgataaaaatcataaatccaatgcttttatgcaattcaggtgcactatgataccagctatcataatagcttaatgtcaccatccataaccccagcatgaacattccataaacagcaagagcaattaaccagtggatcaaaacagagacatgaccaaattgtctggaagtgttttttaatagcatatcgtttccttatttttgatcactaaaaaaaatacaatcgactaatacaggatataaacataaatgaaaatcccaagcattataatagatgaaagtttggtacggtttctgtgaatttcagacaaataatttgtttaagaatatcaaaatttatcaataatgaatttaatgagttccttttcttattggataaaataaaatggaataaatatattcatcttagatatataaagataacttaaattaattaagcgagatttcgtatttatgaattcggtttattaattaaagttgttactaaggatatatcatttgtaattatttccgttgtgaagataattgctgttaatctataaggttatttactcttgtgattaaatagccaccaatttgccagatgatggctgtttattatttaaatcagttttttattttttcccaactaagcgacaaatggtttccgtgaccagatagcttttttcaaatgcgctaatcggcaaaaactcaaaacgagaatggaaattcaatgctccggtaaagtaatttggtgtcagaatacctcttgcagataaagccgagccatctgtgcctccacgcatcggaatgatattagcagtaattccctgaattttgagtgcttcaagaatcaggtcaatcgcggtacggtcgtcacctaatgagtcgctaatattgctgtagacatcttcgatcttataatctatttttgctcgagggtgacgggcacggataagttcaattgactgagtaacataagttttacgttctttatagctattgcggtcaaaatcacggatggccattttgatttttgcattatctgggttggcgattaagttcgtaaaataaaaataaccttcccgatgttcagtatgctcaggtgtatcatatttatcaaaacagccgataaaatcatatgcgaccctgattgggtttagtaatacgttctttgcagacattggatgtgtggtaatgcctgtgattgtaatgtcgacagaggctgcattgaaggtttcatagatgacttcccccagtgcacagcagtcaattgtataagcaaaatcaacattgaaacgggataaatccatcaatttggaaccacgtagcccgatttcttcatcaggaacaaaagccacatagatatcaccatagtcaaattccgcctgctgtaatttatccatcagctccatgataacggtaaccgcagctttgttatctgcaccaagaacactggttccgtcgctgaaaatgattggctcaccgatataaggggcagcttccgggtgttcgctcgttttaaaccagatatcttcttggctattcaggcataaatcttttccttcataaagcaaggtctgaggctttattactgccgacaacccgacatcaacggtatccagatgggccacaaaaccaatcttgggggctgatggtttattaccacgacgcacagcataaagaatagcgtgctcatcaatataaatatcagcgaggccataaccttccagctctttcgctaataattcagccagcttacgttgcccttcggtactcggtacaataatgctggaggcatcactctggctttcaatagctaaatagcggtagaaacgttgttcaagctgttgacctaattcattcattttttcttccctcttgtattcaatatatgacaaccctattgtgcagggtgccatgtgtaaccactgtcgaaaccaatcggaatatcaaatgcccagaacacatagagtgttgccgttaaaataatcagcaagccaatggtgaatgggagcatcattgagcataaagtgccgatacccgcatttttatagtatttctggcaatacatgagaatcaaaggatagaacgggaacattggtgtactgacgttcatagctgaatcactcacccgaaaagcggcttgtgttaattcaggagaaataccgacggccattagcatcggtacaagcactggtgccataattgcccatttcgaagttgccgacgtgatcataatattaatgatagccgttaatatgatcacaccgagtacggtcagaccggatggcatttcgagtgtacgtagcagttctgcgccggataaggctaataatgtacccagatttgaatgatgaaatgaatacagaaactgagcggcaaaaaacacaaaaacaataaatgggattaatgactgcgtgatgttttccattgatttaacgacatcacggcttgaggtaaaggatttagttaaatagccataaacgatacccggcactgcgaaaaacaggaataaaagcgggacaactatctgcataataggggctttagggctggtcatgctgccatccggtgcccgcattggcgatgtttctggccataataaggcaataagacctatacccagcaataacacggtggatccggcaattcgaaatgcacgattttcttcaggtgtaattctttccagatctttgtcagtatctgtttcaatattggttgaaacagggcagttcttattcaaccagggttccacaattttctctgtgatgaaccagcagattaaaatgacaccaaatgtagcgccaagactaaaaaagtagttacagagcacattcacatggtaaccgggcgccatcatctgagccgcatcctgtgtgaagctctgcataatcggatcaatgatagaaggcgtatagcttgcagtgactttaaaggac

SEQ ID NO: 937 - DNA, 4658 bp, Xenorhabdus sp.; identical to SEQ ID NO: 935
  CDS (3313)..(3888)

SEQ ID NO: 938 - DNA, 4658 bp, Xenorhabdus sp.; identical to SEQ ID NO: 935
  CDS (1075)..(2307)

SEQ ID NO: 939 - DNA, 4658 bp, Xenorhabdus sp.; identical to SEQ ID NO: 935
  CDS (2)..(1039)

SEQ ID NO: 940 - DNA, 4568 bp, Xenorhabdus sp.
  CDS (3700)..(4302)
gcataagctctttataatatctttaacatgaatatttttattatcataatggcccaaatttttaaaagccatcattaaagccacagatgtcaaatcatcatcacctaaaaaaagaattttttgtttgaatactatcgggtttttgagtaacagcattaccctgcgcacagatgtatccaaagtggcatgagcctgatccagcaatacattgacgcgagggcggctatcatatataggagcaagtaaaccggctaaatcatttttaaatttttcacattcctcttctgaggataatgaattatataattcagaatcaacaagcttataattaagttcattctgaatatattggttaccctctaatttgagtttaaacacccctttattttccgcaaaatttaattttattagttcttttttaaatgcggatacaagaggaataggcaaccctatttttaatgataattctttatttgacacacaatcatctaaatataaataagaaagtaatttttccagcacttcaataggttgttctaacttcatattattttttatagtacagagtatattcattttaatctcttatatggcgttcagtccttcatatcaaaaatataataaaaatgattacctattaattgagttatcagtaacatcgatattataatttattagcaatctatgttaaataatttaactttgcaataagaatatttaccaaaaatggataaaaaacatttacgttaagtgattacaacctaatgatataatttcattctttaaaatttaaacaatataaacttatatttcattaatcaataagcagtgaaaatggcatttattttgaataaaaaaagattaaaacagaatttaatattgaaaaatataacaaataatcacaagttaattgaaatataaccattttctatttataaataaaggtgatatcttcaattcaaaaaatcacgaagattctctaaattgccacgtcattatgtaaggcatgagtaaaactagagggttatattcggactatatacgaactaaaaatggcattcatatttacactgaggatatctaaagtaaattggaaaattttcctataaggacatgaggataaagaagtataagtaattgtattaaacaaccattaaaaatatatacaaaatgaatttcaaaatgcatcgaggtggccatgaagcgaattttcaaagaaataggtaactatgtgactgaactaagtaaacacagcctatcaagagggaaattgaaagaggatctatattcatattctgaggactagttcccttatcctcagatcctgttttaaaaatccatagcgaataaattcagataatgaatttgttattatcaagcacaatagtattgccaaagaataactttcctccctgaaaaattaagtctaaatggtgactgcctacttctcctccacctaatccaagatgtaacccgggatgcctttcttcaaatcccgcatttaatccatatagcttctccacaccacagttggtcccgataccaaattcttcaatggtgctgttactggagctagtcgatagatatttatcaaaatctttcgaaaattcagcggattgacaggtaaaatcgataattttgctatttttgattgtcaggttgaagaaatcactgacaacaccatacttaattgcaaaaggtattgtactcaaaaacgcaccactgaaactgatagagccttccagattatgtagttttgttgcaatttcacccggtgtcagatcataattaccaatgccatcaattgatgtccaggattggttttcactaaaggttgcagtaagcatatgctcatcatcctgctgatagattacttttttactactattagccagattaattaaaaaattattcctatctttgataagatttagctcttcagagaatgcttcataaaaatgctcaccataatctttaaacaaaacagactttcgccagttttctcgcataacttttcttattgctgacaaaaactcaggtccggatgatttaaagggttttaatgttgaagaaagatagaaaaatacgtataaattacaggattcaatttccttaactaaaatatcagaaggggttacttcaagggataatgaagatatatttaaagtaggaaactctggcaagactgttataatatcttcaacaatatttttgtgctctttatcccatccaacgagtatattaattttattctctttacgttttccttctttaatagaaggatgatgcaacaagcaagtcaacatgttttttatgttttttcttttttcattaatggataacataataacctcttgataaataacggggaataatatccccgttaagttgtcagaaatttaatttatataatactaaacaggccacattgcagttccaactggaacaacagctttttgttgcattatttcaacagcttcttcaaaggtttcctcttcaaaccattcattcagttcgatagcattattttccattaagtcagacagcataaatatatcataaacaaatttgatatatttttggaatagtagttatatcacccattattcttaaaaaaatacttaatcttattactggacttttattatctggctggaaagttgctgcaaactttgagagacaacttctgtaagaaagtctaccaccttccttattttcaacgaatatgccaaatccgcctgaataacaatccaaagaggttgatctaatcccagttcaggagaaagacaaataagatcagcagaatcagcaataaaatgaggtaaaattgccaatcccaaacctgctttgaccgctgcaacctgagctgagagtgaagtcgtcgctatagaaagcggacgcccattcagggttttctccatccatttgtacattggaagttgctggtactcatcagtccagccaataaaatgagcatgattataagcttcatcagatatctgcgatgaatagttttcgcagtattgtttactggcatataacccaaaacccaatattccaatctgacggatagtaacatggccttgttccggcctgacaaggcgaagagctaaatcagcatcccggcgatgaaggttgacagtacgtgaatcagtaataatttccagtgccaaatccggatattttttctgcaaaaccgacagattaggaataattaaattgctagccagcatttctgttgttgcaagacgcactttaccagtgatttttgtacgtacatcaacttctgtcaaaaatgagtttgctgcagtttccactgcttctgctttttccaacaatccctttccatcttctgttagctggtagccagtctgatggcgaaagaacagaggcattccaaaagtttcttccagcctttcaatttttctggacactgttgcaataccaaccccaagaagggttgctgcattactgatagttccggtctgagccactgccagaaatacacgaatatcatcccaaataagtgattgcatattatgacttccatttttggaaaattattttctatttatctctaaatatcttttttttcgactatgccacaatcaccctgataaaaaaacaatcaatttgatttaatgaaaatttaaccgagtcaataatatgcgtatacgaaatacaccacagttagcgattgttctgacattaattgcaacatttttttggggttcaaattttcaggtaacaaagattaccctgatgaatctgcctccgtggactgcttctgctgaacgctttgcttttgctgccttatttattttcctatttatgacatccagaaaaaaatttaacattggagtactcagaaaaaactggcttacttttattctccttggaggaattggagttgcaggattcaatggtgcattatttgttggtctccaatatgcaacccctgttaatgctgcattaataatggcaacaacacctgtcactaccaatattttagaggccatcattaatcgccgtccccctgatatagtacgtataaccggaatgatactcagtttgtttggtgtgatcctagttgttaccaatggacaatttatgttgggtaatacaattcatattaataccggagaattaattatcttttcgggttctctgggctgggcaatttataccattgggatccgcacatttgttatagaatcaacacctctggaaaccactggctggacgatgttttttggcacaatgatgggaacctctaaaaacttttcacagccacaaaattgagtaaaatgtaggcacagtacctctctgcaaggtagcgccatcatgataccgcctcgttctgctttaaaaaaagacaaacaggcatccgaatatcaccgtcgaaaaatcgatgaattaggtgatccgctgcttgttcttgataaatatgttgatttctcggcactggctgacaccctaaaccgtatcgtcccacgtattatttcccccaaagggggacgcccgccattcccgacggaggtgatggttcgcatcattatcctgaaaca

SEQ ID NO: 941 - DNA, 4568 bp, Xenorhabdus sp.; identical to SEQ ID NO: 940
  CDS (4345)..(4566)

SEQ ID NO: 942 - DNA, 4568 bp, Xenorhabdus sp.
  CDS (4047)..(4568)
tgtttcaggataatgatgcgaaccatcacctccgtcgggaatggcgggcgtccccctttgggggaaataatacgtgggacgatacggtttagggtgtcagccagtgccgagaaatcaacatatttatcaagaacaagcagcggatcacctaattcatcgatttttcgacggtgatattcggatgcctgtttgtctttttttaaagcagaacgaggcggtatcatgatggcgctaccttgcagagaggtactgtgcctacattttactcaattttgtggctgtgaaaagtttttagaggttcccatcattgtgccaaaaaacatcgtccagccagtggtttccagaggtgttgattctataacaaatgtgcggatcccaatggtataaattgcccagcccagagaacccgaaaagataattaattctccggtattaatatgaattgtattacccaacataaattgtccattggtaacaactaggatcacaccaaacaaactgagtatcattccggttatacgtactatatcagggggacggcgattaatgatggcctctaaaatattggtagtgacaggtgttgttgccattattaatgcagcattaacaggggttgcatattggagaccaacaaataatgcaccattgaatcctgcaactccaattcctccaaggagaataaaagtaagccagttttttctgagtactccaatgttaaatttttttctggatgtcataaataggaaaataaataaggcagcaaaagcaaagcgttcagcagaagcagtccacggaggcagattcatcagggtaatctttgttacctgaaaatttgaaccccaaaaaaatgttgcaattaatgtcagaacaatcgctaactgtggtgtatttcgtatacgcatattattgactcggttaaattttcattaaatcaaattgattgtttttttatcagggtgattgtggcatagtcgaaaaaaaagatatttagagataaatagaaaataattttccaaaaatggaagtcataatatgcaatcacttatttgggatgatattcgtgtatttctggcagtggctcagaccggaactatcagtaatgcagcaacccttcttggggttggtattgcaacagtgtccagaaaaattgaaaggctggaagaaacttttggaatgcctctgttctttcgccatcagactggctaccagctaacagaagatggaaagggattgttggaaaaagcagaagcagtggaaactgcagcaaactcatttttgacagaagttgatgtacgtacaaaaatcactggtaaagtgcgtcttgcaacaacagaaatgctggctagcaatttaattattcctaatctgtcggttttgcagaaaaaatatccggatttggcactggaaattattactgattcacgtactgtcaaccttcatcgccgggatgctgatttagctcttcgccttgtcaggccggaacaaggccatgttactatccgtcagattggaatattgggttttgggttatatgccagtaaacaatactgcgaaaactattcatcgcagatatctgatgaagcttataatcatgctcattttattggctggactgatgagtaccagcaacttccaatgtacaaatggatggagaaaaccctgaatgggcgtccgctttctatagcgacgacttcactctcagctcaggttgcagcggtcaaagcaggtttgggattggcaattttacctcattttattgctgattctgctgatcttatttgtctttctcctgaactgggattagatcaacctctttggattgttattcaggcggatttggcatattcgttgaaaataaggaaggtggtagactttcttacagaagttgtctctcaaagtttgcagcaactttccagccagataataaaagtccagtaataagattaagtatttttttaagaataatgggtgatataactactattccaaaaatatatcaaatttgtttatgatatatttatgctgtctgacttaatggaaaataatgctatcgaactgaatgaatggtttgaagaggaaacctttgaagaagctgttgaaataatgcaacaaaaagctgttgttccagttggaactgcaatgtggcctgtttagtattatataaattaaatttctgacaacttaacggggatattattccccgttatttatcaagaggttattatgttatccattaatgaaaaaagaaaaaacataaaaaacatgttgacttgcttgttgcatcatccttctattaaagaaggaaaacgtaaagagaataaaattaatatactcgttggatgggataaagagcacaaaaatattgttgaagatattataacagtcttgccagagtttcctactttaaatatatcttcattatcccttgaagtaaccccttctgatattttagttaaggaaattgaatcctgtaatttatacgtatttttctatctttcttcaacattaaaaccctttaaatcatccggacctgagtttttgtcagcaataagaaaagttatgcgagaaaactggcgaaagtctgttttgtttaaagattatggtgagcatttttatgaagcattctctgaagagctaaatcttatcaaagataggaataattttttaattaatctggctaatagtagtaaaaaagtaatctatcagcaggatgatgagcatatgcttactgcaacctttagtgaaaaccaatcctggacatcaattgatggcattggtaattatgatctgacaccgggtgaaattgcaacaaaactacataatctggaaggctctatcagtttcagtggtgcgtttttgagtacaataccttttgcaattaagtatggtgttgtcagtgatttcttcaacctgacaatcaaaaatagcaaaattatcgattttacctgtcaatccgctgaattttcgaaagattttgataaatatctatcgactagctccagtaacagcaccattgaagaatttggtatcgggaccaactgtggtgtggagaagctatatggattaaatgcgggatttgaagaaaggcatcccgggttacatcttggattaggtggaggagaagtaggcagtcaccatttagacttaatttttcagggaggaaagttattctttggcaatactattgtgcttgataataacaaattcattatctgaatttattcgctatggatttttaaaacaggatctgaggataagggaactagtcctcagaatatgaatatagatcctctttcaatttccctcttgataggctgtgtttacttagttcagtcacatagttacctatttctttgaaaattcgcttcatggccacctcgatgcattttgaaattcattttgtatatatttttaatggttgtttaatacaattacttatacttctttatcctcatgtccttataggaaaattttccaatttactttagatatcctcagtgtaaatatgaatgccatttttagttcgtatatagtccgaatataaccctctagttttactcatgccttacataatgacgtggcaatttagagaatcttcgtgattttttgaattgaagatatcacctttatttataaatagaaaatggttatatttcaattaacttgtgattatttgttatatttttcaatattaaattctgttttaatctttttttattcaaaataaatgccattttcactgcttattgattaatgaaatataagtttatattgtttaaattttaaagaatgaaattatatcattaggttgtaatcacttaacgtaaatgttttttatccatttttggtaaatattcttattgcaaagttaaattatttaacatagattgctaataaattataatatcgatgttactgataactcaattaataggtaatcatttttattatatttttgatatgaaggactgaacgccatataagagattaaaatgaatatactctgtactataaaaaataatatgaagttagaacaacctattgaagtgctggaaaaattactttcttatttatatttagatgattgtgtgtcaaataaagaattatcattaaaaatagggttgcctattcctcttgtatccgcatttaaaaaagaactaataaaattaaattttgcggaaaataaaggggtgtttaaactcaaattagagggtaaccaatatattcagaatgaacttaattataagcttgttgattctgaattatataattcattatcctcagaagaggaatgtgaaaaatttaaaaatgatttagccggtttacttgctcctatatatgatagccgccctcgcgtcaatgtattgctggatcaggctcatgccactttggatacatctgtgcgcagggtaatgctgttactcaaaaacccgatagtattcaaacaaaaaattctttttttaggtgatgatgatttgacatctgtggctttaatgatggcttttaaaaatttgggccattatgataataaaaatattcatgttaaagatattataaagagcttatgc

SEQ ID NO: 943 - DNA, 4568 bp, Xenorhabdus sp.; identical to SEQ ID NO: 942
  CDS (2560)..(3216)

SEQ ID NO: 944 - DNA, 4568 bp, Xenorhabdus sp.; identical to SEQ ID NO: 942
  CDS (2020)..(2154)

SEQ ID NO: 945 - DNA, 4568 bp, Xenorhabdus sp.; identical to SEQ ID NO: 942
  CDS (1033)..(1938)

SEQ ID NO: 946 - DNA, 2689 bp, Xenorhabdus sp.; identical to SEQ ID NO: 40
  CDS (374)..(1054)

SEQ ID NO: 947 - DNA, 2547 bp, Xenorhabdus sp.; identical to SEQ ID NO: 164
  CDS (1118)..(1255)

SEQ ID NO: 948 - DNA, 2547 bp, Xenorhabdus sp.
  CDS (59)..(1117)
caaaacatccttttcgaaattgaagtgtgggaaatagaccctcagttggaggaaaaccatgcaaatattgctggctaaccctcgtggtttttgtgctggtgttgatcgtgccatcagcattgttgagcgtgcattagaactctatggcgctccgatttatgttcgtcatgaagtcgttcacaaccgttatgtggttgacaatctcagggctcggggtgctatttttattgaagaaatctcagaagtccctgatggtgcaattctgattttctccgcacacggtgtctctcaggctatccgtacagaagcccgctcccgtaacctgaccatgttgtttgatgccacctgtcctctggtgacaaaagtacatatggaagttgcccgggcgagtcgtaaaggcaaagaagccattctgatcgggcatgccggccatccggaagtagaagggacaatggggcagtataacaaccctgaaggcggtatgtatctggtggagtcaccggaagatgtgtggaaattgcaggtcaaggatgaaaataacctgtgttttatgacacagactacgctttctgtagatgatacctcagacgtcattgatgcacttaatacccgattcccgaatattattggcccacgtaaggatgatatctgttatgccacaactaaccgtcaggaagcggttcgtgatctggcaaccgatgccgatgttgttcttgtggtaggctccaaaaattcatcaaattccaaccgtttggctgaactggcacaacgcatggggaaacccgcttatttaattgattctgccgaagatattaaagaagagtgggttgataatatcagcgctattggcgtcactgccggtgcctctgccccggatattctggtgcagcaagtcattgagcgtttgaaaacgctgggagcaaaaacagttaatgccggtggcggtttccagtacatcccacacatcacgggtgcggtgcgcatgcagctcatcgacaatgccgcaatggatattgaggccgtcaaggttattggcatcactggacagtggctcaaacttggaagacgactgctcctgataaatcgccagcttattaaactcaaacaaccggcctaacgtgggtcgggcctgcttgatcatgctctttgcatcctcaaacacgatacgggcctgatcgcgggtcgtcgccgccgaatacacctccgccccaccttcgctgtcggccccggtcatgtacagcccgatgccggacgacagcgtagacttggcatttttacgcgccacttcgttaaccgcgagcatgtcggttcttgccttgttggtgagcctgccagccggtatgcagatggtcaggacagtagccgctgcgatctgttgtcgtcttggggcaaccctgcttacggcaagctcggggaatacggggtggcataatttcacctcattcagcatattcaactggtctgatttatataaccccgtcattttttagccgggagtcagtcaaaacagagataaaactctgcacaatccattcaatgaatagactgttcagaatttgccgtctctccggctgtcacatcacttggcctgcctacagcggatgttgctgataatgacctgttattctcaggggcatgggttatttttgattctgtcagtacgctcgatgaaaaggagacatgtcatagctaataccgacagacggcgataacccggtgaaaataaaaatgccgccagttcgtgtgcgtagagtacgcggtgagaacgaagtggcagcatgagttatctgtattcctttaaccactcagggagtgggtaaagaaatattgatctcaacttcgaacgttaacgaattgttaaattcagttcacgtattattcagtagggataagataattaggcttatccattttttgttaataacgttataaacggagagtcaaatgaaaaaatatttgcttctttgcttgctggcaggcgtaacactttccgcctcaatgcaaacttatgccgcctgtgcttatattcatgacgaaaaagcaaggaaaatttgcgaggagtcatgcaaggtatttgcagatccagttagaggaatatgtgtcggacacggacatcatcaataatactaagaggacggtttattcccaccgtcctctcacccacactgcgtcctaacatactcctgcaaatatctcagttttgcccggtcgttgatgatgtcttctcggatatcgagaacagcttgtccagtttctctagggagttcgacggtggttgcatggcccacgctgccggaggaagtggcctcacgcacaggacaggtggctttgatgcgcagcttgcgacgaccagcggcaatatcagcccgaagagtgttgatttcagtcttggcattggcgagttcctgagtgtgtttgctgtctaactcatgcagcatatcaatgcgcgtgttctgatagttaattcggtcggtcagttgctggatttcggttagctggtcgttattgataccaagctgtttcttatacccagagcgatagaggtta

SEQ ID NO: 949 - DNA, 3821 bp, Xenorhabdus sp.; identical to SEQ ID NO: 41
  CDS (185)..(727)

SEQ ID NO: 950 - DNA, 3821 bp, Xenorhabdus sp.; identical to SEQ ID NO: 41
  CDS (1803)..(2144)

SEQ ID NO: 951 - DNA, 3821 bp, Xenorhabdus sp.
  CDS (2011)..(2097)
aaaccgacgcgcctggtcgcttgccgtatttggcgttgtattcaaggctggcttcaccacgtccgcctgctgggaagaactgcccgtccgaggatgatacatgaccatccccccagatagtggcaaaaggatgttcctgctgcgcatcgaccagtaccgaggttgcaaatgcataggtttcagcgcgtaaatgacgatccaccattaacatcatctggtgaatggtgacaccacgtgaactctgtgccattcgttctgctccagcattagtcgcatcggcaaggatcgctgccataagcgctgcttcgtcttctgcctgttctccggtgcggtagtgggtgaaacaatcgagaaaattggtccagccatgcacttcagccagcaggctggtgatcctgatgcgagggaccagcatgtaaagcttacggctgagagtcgtaattctgtcgctgtcttcctcgcgaaccggtgaaacagacagccctctgtcggaaagttctgcatcgggtatggcattattagcggcggcttttgctagcgctttaagttttgcgttgagcgtggcggttcgctctgcccgccattccgcaaaattgtccggaatggcaagtccgagtctggattctgcccgcatctggtcgaaaacatggcgcggcagaagataatcctcaaaacttcgccaggcccggctgccatcaacccatatgtcaccggttttcagccgatcccgcaggtgaacgaatacggcgacctcccacgcctgaagatctgtattttttcccaccgggctgacacgccgctgccatttgcgggacataaaatcgagcgggacccggttgggtaattttcgtccgcaatagagcgcccgcagatgtccgacagccagcaacactggttcatccgggcgaaacgccctgaaagaaaaggtaccgaaaatgagccgccccagcttacgtaatgatttgtgccgtcctataagctcatcaaattcggtattgcgttggggagatgctacagaagccgcagccgccatactggcgatcaaaccttcccagccgagtgatgcagttatcgctgatgcaaaatctgtattgccgtcacgggcagcaagaagcgcctgacccagctttatatgatccagagccacgacttcaagcacttcagcggctttcagtcgacgctccttctggcttatctctgccttacgcctcgtgttgccaatcaatttgcagaacatatcgatagccagatcggtaattgcagcctgcttttcgataacgaaggctgccagcgtggcgtggcggcgttcggacgccagacgttgtatctcacgtgcatgtaaaacacgagagtcgcgggcaataataccgtacggtttacatggatcctcttgcgttgctcatcggagattcccgctgcccgtaatacctccagccgggcaatcagtcccctgagattcttgagtttcacaccttccggcgcttcagctacccagccaagaaggctcctttcaccggctctttcggtaagcagttgctcaagtgcggtgatggatcaaggctccatattcgttataagctcatggtaggctaaccagccgtttgatggtcgagctaccgtcgccatcataatacagtgctcgaaactgctcctaagtggctggtttgtcctcttagcttatcgagaaaccgctctggtgatcggcagtccccgttcggtggttgctgcctcgcgtgcggccgcaagaatgagcattctgtaatcgctgacccgaacggaacgaagacccagagcagagataatttcgcgggcatgctccctacgtgtctcctcgcgttgggcgtaaaacgtaaaaactgctgggtcaatatccagttgctccgcaacaacagcaataactgcctccgtgggaacctctcctgcacgcagtgtacgaccgaggtcgcggattaagtgcgagctgaatagcaaaaccaaggcggttatgagaccgacgatgcgatctggcgaatgcaacatcctcgcaggacagtgcaaaccgggaaagcgcttcctcataaagctcaggcagcgcaaaaagggtatcgtgcgatttagcgtcaagaaaggacatcggtctggtctgctttcaaattgcaggatccaggtccggtccagccgattcgccgcagcgtatcgatgagtgtcgagcgcggcaccctgaatgtgcgacacactgacgctttactggcaccggcttccagagccgtgaggatctgctcaaccttttcggcatctatcgccggtggtcttccaccttttcgcccccgccgacgagctgcagccaggcctgcattaacacgttctgtgataagcgttctttcatattcagcgagagtgccaaaaaggttaaagaggaacgagccgtgtgacgttgttgtatcaatggcttcagtcaatgactgaaaggcaacaccgcgaattttcaggtcttcaacaatccggatcaaatgtgagagtgagcgcccaagccgatccagcttccagactatcagcacgtcaccttcacgcacctcagcaagacaggccttaagtcccgggcgatcatcgcgcgcgcctgatgcatgatcctgatgcaaatgacgggggtcaactccggcagcaatcaatgcgtcacgctgcaaagcaacagactgacgttcatcattgcttgatactcgcatatagccaatcaacatgtacgacaaaccttaaaattgagcttgtcgtacagtgtctcattccgacagtgtttgtcacgtaaaaaataacaggtttatgccttcaattttctccagcggcaggatctgacggaaaacaagtgatttccgtcagggtgaaaatcgcttagcgggtgttattgcagaaatgaccactggacccctataacggagggctctctccggttgaatatgaacgatggtgggaaaaggctaaaacagtgtccaatatttattgaccccaacatagagctgcaatctaccttcaatgccacaatcacttttgtcttgcaaacgggatgcgttcatatagagagagcataagtgcccaaggttttatgctctctttttttactttataacttttttgaattaacatttattatttcgtctaggctgttatcagcctgtttatacataatatcttgagctctattaaggtaattgacaaattttttaccgcgttcactatcttgttttaatgatgattcatcaagacccgaagtgaagctattataggtaaaattaaatttaatttttttcgtatcagagcatgcggttttaaactcattttgttctgaagttactccaacatgataatatttaacttttggataatatactatttttccatctacatctatactttcgtgacactgagaaagtattactaattcgaatttttgactatcgtttctccacaacacacgcaaactactagcaactctctttaaaaattcaacaacaggattaataattgattccggtgtaatattcgtatcaaataatattttgacaaattccgagctgaattcatgtaaatattgttcatgtgtataattagcttttatgtgtttaaatcctgttaatccaccagctttttgaagtaatgtgtccatataatgtgttacacatatatcccatcttgatgtaggcttcttaggaaccatatcatcaatagggataattttacttggatcttttaacagtaaggcaaaagtattatctcgtaaggtactataaaaatttagtactttatcacatataaccctccctgttttatattctggtctttagagcaca

SEQ ID NO: 952 - DNA, 3493 bp, Xenorhabdus sp.
  CDS (871)..(1656)
aaaaataatcaatcaatcaaatcctgtttattcaggaaatccattggttttattttctgtttctaataatagaaaaaacagcttaattaataatgaaaacattgcactaatagcagatgaaattttaaaaaaacaccctactgcaaattttattatctctgctttcccaaatgatataaatgtagctgaagatctagtttcccgtataaatggaaatagccaaatcgttatgtgcaattcattagattctttcttatcattattaaatgaaatgactttaatcgtcgttggtgatggtggcatttgccacttagcagcagcactaaagaaaaaacttgttgcactttatggtgtcacaaaacctgaaaattggtccccactggcatcaaaagatatgtgtattaccttatatgattccaaaaatgttaacaatatccctttagctcaagtcactgatgaaatattttatctcattgataattaaaatcatttaataatttacaatcataaataaacttccccgttgcaaataacggggcttttctccatcttcagaaattaaaagatgacgaataggtattatatccattctaaacattaccaatagcatagataaacagaccggaacagatctaagtcacatagatatactttcacttgaaataataataacagcaataatgatattacagctttaattttgagtgttttttatcgatcaaaacattgactatataaatacacagtgtaattatttagtaacatttcaaaaatgcatatccatgatatttaaaattatggaatatatttataagaaaatattgagaaaccaacatgacaagaataagcctggatgaaaaaattcaaatttttagccaattacacgaagaaggaaaactcatattagccaattcatgggatgttatgagtacccgcttagcagaacaatcaggagccaaagccattgcaacaaccagtgccggaatatcctggagcttaggctatccagataatcaactggctgaccgaaaaatcgtaatgaaggcactgggtttaattacttccagtaccaatatacctgtaacagcggatattgaagatggtttattagcgcctgatgaaaatatggatgatcttgttgaagatttatattttgtcggatgtgttgggattaatattgaagattccaacaatggcaaatcaaggtctatcaatgatggtgctgaacgtattgcgtctgtacgtaccgcagcaaataaaatacattacagtttatttatcaatgcacgtatagactcatggattcgtggagaagataccaatcccgagcatttaatttcccgtgctaatacttatcttgctgccggtgccgatggtatttttatccccggattaaccgatctatcagtatgccgtgctatcagctcccgcataaatggcccattaaatattatggctcaagccggaggacctagtgtaaaagaattttttgctgccggagcaagaagggtttctggcggatcattctttgccgaacaagcctatggatctacattgacgagtatggagcattttttacgggatggtttgttgcagaatagtgagcagtcaaagttaagctatgcctcgttaaatgccctacttaattcaaaataatagcaatcagataattgactaaaaggaatgctctactgagtaatgctttattacaaaataagacagttcaaatttattgtctgctgaggatgtaatgtttaaacgtatagttgctactattttcctgtttctatgcttttctgtgaaaatcagcgcatcagaaaatataggtttccgggaaatatttttagataagaacactgaacgtccattacattttgtgatgtggtacccttccaatgatattggacatactataattgttggtgaacatcccacttattatggtatttcagtaataaaaaatgctattcctgatatagaaaaacatcctcttgtcgttctgtcgcacggatatgggggaaattggcgaaatcttaattggcttgcaggataattagccaaaaagggctttatcgtggctgctccaaatcatccaggcacaacaacagaagatagaaatcctctatcagctgcacaattatgggaaagaccgagggatctcagccgtgttattgactttatcctagagcaatctgattttgccgagttagttgataaagaacgaatagcagcaattggtcattcattaggtggctggtctgttgttgaactcacaggcgctagattcaactcagatttattagttactgactgcaaaactaataaaattcttgcttcttgcaacatatcatctgaattaggaataggtaaaaatgaaatcaccaaagcaaaattagatggtgatttgggtgaccagagagttaaagccattatttcccttgatctggcactaaccagaggctattcacctcaaagtttaagcatggtacatataccaacactcgtgatagccgctggtgttgatgtgggagatatgcctgctgaactggaatctgagtatctggctaagaaccttccaaaagagaaatcaaaatacatcgttattgacgatgcaatgcattttagctttaggccgaattgtaaacccaatgcaatcgctcttattgaaaaaaataatccaaagggcggagttatttgtaaagatggtggagatagaagccgggaaaaaattcataatgagaccctgaatcatatccttatctttttccaacaagtattccctaaataaaaaaatcacctatttcaaaataaaaatctgttaattaaataaaaaactgtctttaaaagaggcagtttttctttttccaattaaaaataaatttctcttaaagttcgaattttttcacaaagataacctatcctcaaataattatctttatacaaaaaagatatctaacaaaaatatttccatttaaaacaaaagattaaattaaaattaaccactaaaataccaattaatgcacataaatatgtacaaacataaaacgcacatagcgttgtacataaaaaaatcggcgactcctcaatatcaaaaattccctatagctaattcacacctccgtttgaaacggaaggattaagccaaagtgaggaccacggaataatcaaggggttaaaaggggagaattgtcctatttagataagtgattgattttgcttaattcctgcatggtgacagaaaatagataaatcaatgggttaaacgaatgtggatggctgaatgaattgatgggggggttgtgtggggaatagaataattggggaagtaagagtaatgttacctgcatgaaaaaaccgcacgagaccggcttggcattatccatgattgtatagcgtgtaagttctatctaaccatacaatgaaaaaagtagaatcacgcctatacccaaccataggcttcatcccactgatctaaaagagataactttagagc

SEQ ID NO: 953 - DNA, 3123 bp, Xenorhabdus sp.
  CDS (2992)..(3123)
taaagaacataggtcgtggcatgatagttcgggtaacgagttttttggcgaaaataagagaccaaattatcatgccacccaattcccttcgagcaaacgtcagcacgcccacatatagtgaacatataagaatattagtgtataaaaccagttagataaaaacgactaaacggagaatgcgtgatgagtccattgaaagccggagataaggcaccacaattcagcctacctgaccaagatggtgaaaacattaacttatctgacttcaaaggtcagcgtgttttagtttatttctaccccaaagcaatgaccccaggctgcactgttcaggcatgtggtttgcgcgatacgatggatgaactggaaaaaattaatgttgccgtattaggcatcagtacagatgctcccgagaaattatcccgatttatcgagaaagaaatgctgaattttactctgctttccgatgttaatcatcaaattgccgaacagtttggtgtttggggtagaaaacagtttatgggcaaagtctatgatggcattcatcgcatcagttttctgattgatcctgcgggcaatattgaacacgtttttgataaattcaaaacaagcgatcatcatcaagttgttctggattatctgcaacagcattcatcctgaaacctagatgtagctggtagctggtagcaaggcaagtaacacactcctccgtctgactgacggaggatgccacagactcctatagactcaacaaccaccgactaaagtcggtgggttagtgattaacggactgaaagtccggatacgcatcggctaaacgatgcgtcaattatccagcctgaagtgatcattcgggttcggttcaaaatgatgcgccagataggcctttatcatctcttccgttaactgacctaccgtcgcacaaaaatagcctctgccccaaaaatgctgaccccagtaacgctttttcaagtgagcaaactcttcaaacaacttacttgctgtccttccctttattcgcctcatgatttctgagggcgctaagctcggaggacaactcaccagtatatgtacatggtctttgctcacgaccccttctactatcctgatttcgaacgcttcacaggtctgacgaactaactctctcacccgtaaaccaacttcacctgttagcactttgcgcctgtattttgttacccacacaaaatgatactcaatctgaaataccgtgtggctgccatatctgtaatccatattgcacctctcgtgcaacacagtatcgcagctaaagctgaccgactaaagtcggtggttttaaccttttatatggaaaaataaaaggataaattatgtctgaaccttacattcgtattaatcagttttttgccaattcttctggtccaggacaaaaatcagtgctcggtcatgctaattattcattttttgatgccaatggagtatataaaggtacgtatggttccaatttaaaatctgatgatggcagaccttccggggtaagaagggaagatgaagataatgctagaagaatacaaatgggctccccttatgctgaaaagcgcctcaaactcacacaggtggattttaataacgctttagattttgcaaaaacggcgcacaatgagagtgtcaaaggcaatctcaaatatgcgttggcttgtggtaactgtgttgatttcggtatccagatttttgataaaacacagcatggtcggaggcaattcccaaactacctacaacctaacacaggactttacgcttatagctatgccagtaacttaatatgctcaggcgatagcttccaaatgaaagaaatgaataaggttttattaaccccagataaatggcgtaatgagcgcttacccagctgggccaaaccttgcacagatgctgaagtaccaactaagtattgcggaaaatcaaatgattcctgggatgtgatcaaagcagtaaccacagaattgggtacctgtgaagcacctgtcaaaaaatacgtagttcaacgccttacaatttgctctcctatcgtcattaatcttgatggaaaagggattcagacaacatctatttttgaccagtccgttaagtttgatttattgggaaccggtcaaaaagttacaaccgcatggataacgccgtcatcgggttttttagtttggaatcaagatggggttgatgaggtgaatagtgttgccgacttgtttggcggcattgacagaatggaaggatttttaaaactgatggatcttgataagactcataaagggtatattagccaagaaaacgaaatttatccatcattacgggtatgggttgataaaagcatgaatgggcgccttgaatcaggagaattatttactttgcctgagctgggaattgaaaagcttttcgttaatttcgatattgtcgatattactgatgataatgaaaatttaattggtgaaagatcccatgcagtaataaatggcattgaacacgaaatgtctgaagtttatttcaagtataattattaaaaataaaatcccggataaaaataaattttccaaaaaagtcaaaaggggatcaattgatctccttttgctgaattcatatagagtatttgatgaatgtaatgaacgctataggcaaggttgcagcacttttctctgtttaggagtgattgatcctctgatggttcttaggcattctttcgtcctgatatttggttcgcaaacaaacaactgtaattctatagcagaatcatattaatatgattctgctatacaccatcaaaagtgacatttctacattgtaggactggtgacattttaacgttgcaataacacccaattaagctcttactgccaatttgtggtttcgggcaattgagtgcagccgacttttgacattccgtgcagtcgtcttctgaaaatgacactatatgaagttagcctattttcggacatattaattccgtatgtccgaaattgttcctttatggacagtcctattggtgagaacatttcctaccatgatgcttggcaagtgaccctgaagcttccagatacgatattgcaccaagtccgccaagaatttggtagttttggggctattaacgatcctgttact

SEQ ID NO: 954 - DNA, 3123 bp, Xenorhabdus sp.; identical to SEQ ID NO: 953
  CDS (1551)..(2528)

SEQ ID NO: 955 - DNA, 3123 bp, Xenorhabdus sp.; identical to SEQ ID NO: 953
  CDS (181)..(657)

SEQ ID NO: 956 - DNA, 3254 bp, Xenorhabdus sp.
  CDS (2478)..(2894)
gctctaaagttgatgatatatgaaccttcttttaattgactaaatgccgaaaggtttaacacaccgcgggtttcagacgtgctgggaagtaagttaattaataccttacagtcagaaaggaactctccaagttgttcttcaccataaaaattttcaacgccggtcagttcttttggagtcctactccaacaacgtaccgtaaaattaaactctgccaatttctcaatcacacagcgccccaaaaccccggcacccagtacaccgataacaaattcttttcgatcgtgaggagataatggctgccagatgcgctgctcctgattacgtttatattcatccattcgccggaaataatgtaacactgcactcactgcatattcctgcatctgataccccattcccgtatcttcgaggcggattaacgggacattcgctggcaaagctccggggttttccaactcttgctgaagaatagaatcaacaccagcgcccagagagaatattcccttaagatctgagcgctcagtcaacatttcatagggaggatgccaaacaagggcataatctgcgggagcgttatctcccttagcccactttctcactttagcatcaggtaaacgttcagttattccttgaacccacttatcggcatcagacgcaggactaaaaaaaatgatgttcatataatcttatccctttttattttttaatagattaaaactatggccgaaaggtgaaatgtcaagaaaaacatagctgaatgtcgtacattcgctcaccaatatctactattcaattgaattgaatcaatttatattcctgctgttttcgtgtactgaagattattttagcagtaatgctatttttatggccttttcagcattgcagttagtgacgcactaccagccacacaaatggctcccaaaagaagcatgacgacaaacacagataataatatgccaaagtgagatatttctgccgcaattaatggtccgatactggcaccaataaatagaatgaatccattaagcgccattcctgcacctcgattgggtgctgatagagaaccaaactgcgtgatcatcgcaggaatagcaagggctataccgataacaaaaaccagactaccaatggcaatgccagtcagggattgtgacaatatagcttccagtgacaacccgacagctgcagtaatataaccaatgatggcaattgcaggcatactgattctacgagctaatactccaaccagcagtgccgcaaacatgcccggtaatccaattaagcacagtaaaattactttatccggcatcaggcccaactcccataaatgggttcctaatgctatatacatggcgacaaatgataacaacagcgtaatatgcgcacatgacagaagtaaacccgccgggcgaacaataattcgtcctaatgctatgaatcggtgcccaagatgcccctcggtaacaatgcgttttggttctttgacaaccttaataaacaacgggatcatcaccattagaaacgcgccagtcaccagaaagactccgttccaattccatcttagatctatccaagccgctaaaacctgaccaaaaatgcctgccacaagaaacgacgtggacatagttccaattgccgtagcacggtaacgctcaggtactgtttcagccagatatgccagcgctatgggagcaaaactagatgctgccagtccctgaatcacccgcaaactggtcagccatgatagtgacggagcaaacgaacatgcgagggtagcaactgatattgccatcaatccccataacatcacaacgcgacgaccatactgatccgatattggtccccaaatcaggaatcctatggcataagccagactaaaacttgtggcaagcgcaaatgtaacttctcccgaatctaccaaattaaaattctgactgacaggcactagcagagggatcgccagataaagctgagttaagacaaacaatgctattaccgccaacaacataaccacgccggtaccggctacatagatttgttcggatgaagcgatctggttgtttatattgccagcagcctcttttatatgttctatctgattattcacaatctactgcctccgattctggtactgctgatgggatatccaccccgccaaagcagaggggaatagtatgtaatacctgagctaagccggttaattagtatcgagagtgtcaccacttaatttccaactaaaacgttggagtttattatagtattattttcgtaatggcaacaactgattaataggaaagcaaattatggcttgggatacagaggcaacaaagcgcaggattttagaagcggcagtaaaagagtttgcccgccttggacccgatggcactactatcgacaagattgctaagttggccggagtaaataaagaacgcatttacaattactttggtgataagcggtcattattttcaactgtgctacgcagtgaattagccagagtcgctcaggaagtaccggttaagcctttcacaattgaggaaatcgcagaatatgccggtaaagcctacgattatcaccgcgaacatcctgagttaagccggcttatgcgctgggaagggcttgttttcgatggtgaagtaccggacgaggagcaacgacgcaaatactataattccaaggttcaggctgtcgctgatggacagcagcagggttcaatcacccagactctggctcccgaccatctggcattcttgatattgtccctagccggatggtggtcagcagtacctcaggtagcacgtatgctcactggctcagatagccagcaagaacatgccagacgtcgggcttctgttgttgcagctgcccggcgcttagcatcagccccctaaatgacaaaaaaccatcagagctttgaataaacatccccgccgcaagcagcctgtctcttgatcatatttcataggtcaagagacttggacagtaaataaccgtcaaggatggtttgtaacatgaaccatccttcccacagcctttcccatcctactcggccatttcgtttagagtcataccagcccgccagtttgcccaaattaatataggcccaataaatgcttggggctgtcttagggagttttttcttctcttgctttgtccacaataacttccacgctaacgggcttaataacgtttcacaactttgtttctccgcctctgatttattgagtctttagagcacatggatggagcat

SEQ ID NO: 957 - DNA, 3254 bp, Xenorhabdus sp.; identical to SEQ ID NO: 367
  CDS (2572)..(3252)

SEQ ID NO: 958 - DNA, 3254 bp, Xenorhabdus sp.; identical to SEQ ID NO: 367
  CDS (1238)..(2389)

SEQ ID NO: 959 - DNA, 691 bp, Xenorhabdus sp.
  CDS (2)..(346)
gtgctctaaaggtgcgttgagcgtttatggctacaccaccaagcgtagtttgagtggtatgggcagcttcctgtttatggggctgattggtatcgttctggcttctttggtcaatatctggctgaaaagcccggctctgatgtgggcaatcacctatattggtgtgctggtttttgccggcctgacagcctacgacactcagaaactgaaagaaatgggtgccgagctggatgtcaatgataaagagaacatgcgcagatactctattactggcgcattaaccctgtatctggacttcattaacctgttcctgatgctgctgcgcattctgggtgaccgtcgctaattgctgacaatttccccgctgttctgatatgtgaaaggctctgtttagcagggcctttttgctaaaattccctttttatcggagtattatttgtgcatcaaagtagtgctgtcattattcgtatttcagcaaaagctatcattattcacaaagagaagagcttactcgtcaggtataaatcagattcagatgaatggtataccttgcccggtggaggacaactgtttggagaaacattgactcaaaccttaattagagagtgtcttgaagagactgcatataagattgaaccgtcacggctggtatttgttagagaatatataggccataatcatgaatttgctg

SEQ ID NO: 960 - DNA, 4177 bp, Xenorhabdus sp.
  CDS (3953)..(4171)
ctctaaggattggttgctttgaccacgccctaatctgccatcgattgtaaaggcagtgaagatgggttttgagttgtcggaagccagccatacaccggttatgttgcagatgcgtattcgtgcctgccatgtacatggcaggtttgtttgtgctgataatcagttaccgatattcagggttgaaaatgcgctggaaaatccgatccgtgacctcaaccgtattgttctgccgcctgccagttttttgcatgaaaaaaaaaaaactcaggaacgctggcctgctgccgtgcattttattcagcagaatgcgttgaatgagttctttgctgaaggggcggatgatataggtattgctttacagggaggttgttataacaccgtgatccgagcgttgaatttactggggctggcagatgtatttggagaaagccggattccgttgtatgtgatgaatgtggcttacccattaatagatgaggagtttgcacgtttttgccacggtaaacgggctattctggttctggaagaggggcaacccaattttgtcgaacagaatgtcgccagtatcctgcatcagcacgatatttcggttcggttacacggtaaggatctactgccaatggagggggaatatgatacagccacggtattggcaggaattcgtgcttttctggagcgttatgaccggattgaagccaaagtaccggcagttgcctgtcaggtgcaaatcccatcagtgactttaccggatggagaaacggaaggcgcggatgcaagacatgaaatatcagataatgcggttcatgcccgtccccccggtttttgtaccggttgcccggaacgcccgatttttaccgcgatgaaactgttagaacgggagttggggcagcatcatattagtgcggatattggctgccatctgtttgctattctgccgccatttaatctgggcaataccacaatggggtatggattaggtacagccagtgcttcagcactgagtgcgtcagcctcagataagcgggcaatttccgtgatgggtgatggtggattctggcataacggtttgacgagcggtattgctaatagtgtttttaaccgtagtgataatctgactgttattgtggataacagctatacctctgccactggcgggcaggatattccatcttcagctgcctttaattccagtcgcagcacggggcatggcatcgaaaaagccgtcaaaggggtcggggtgaaatgggtacgcacaatcaggcgtacctatgatctcaaacgcatgatcaaaaccttacgagaggcactgacaaccaaagaacagggcccgaaagtcgtggttgcgcaaagtgaatgtatgctgaataaacagcgccggataaaaaaagaaaacaaagaaatgctggcagccgggcggagagtggtacatgagcgttttggcgttgaccctgatacctgcacaggtgatcactcctgtattcgtttgtccggctgtccttccctttccattaaatcaaatcctgatccgttacgtactgaccctgtagtcactgtattgaacagttgtgtgggatgtgggctgtgcggggaaatatcccatgcagctgtgctatgcccctcttttttcagggccagaattgtgactaatccctcccgctgggatctgctgctgtaccgtattcgcaaaggtttcatccattacctgcaacgccgggatataaggcgtcgtgaacaagataagttttaacaaactgtcgctgtcatccctgagggggaaaccatgttggtatcaccatccatgaattcgttgatgatgaaaatgaaaacccagcctatcaaaattgccattctggcaatggggggtgagggtggaggtgtgctggctgactggattgtcagtctggccgaggcacatggctactttgctcaggcgacctcagtacccggtgtcgcgcaacggacgggagccacaatatattacgttgaactgttccccggttcggacgatcccgatgcgccggctccggtgctggcattaatgccgacagccggtgatgtggatattgtgctggcctctgaattaatggaagccggacgtgcagtccagcgcggttttgtgactccggatcgtacaacgctgatcgcctcaacgcatcgggctttcactatgcaagaaaaatcagcaatgggtgatggacgggtagatagccgtcggttaatccgacagtcacagcaggcagcccgctgttttatccattttgatatggcgcagatggcggaaaagtgtggcagcgtcatgagttctgtcctgtttggagcactctgtggcacaggtctcctgccattcagcagtattcagtttgaacaggcgattatcaggggcggagtcgggataaagcccagcttacaggcatttggtctgggactgagccgggcacaggcaaccctttccggtgggcagcctgctggctgtaatcacccttccgggcgcagtgattcggcgcataaaaatgatgccagacatgacatttttgttaaacataacggttcgaccaataaccattccgctaataacaagcccattaataatcatgatgtgaacgcgctttcattgcgtattgaggaaaatctaccgtcctgtattcataaaatggcgctcaaagctgtcaggcgattggtagattatcaggatacggaatatgccagtttatatcttgaccggctgcaacatttggtcagtcaagctggagagagtaaccaacagttactgcgtgaagcggcccgtcatctggcactctggatgacttacgaagacatcatccgtgtggctgatctgaaaacccgcgccagccgtttcaaacgggttcatcaggaggtacgggcaaacaggtatcagctcgtcgaaatcaatgaatttctacaccccagagcagaagaaatctgcgacaccttaccggccggttttggccgctggttatcccgtcctcacactataaaccggatactgataaagctgttcagtcgcggttacgtcattaagaccagctcaatatggggatatttcctgctttacatgctggcgggtttacgtcggatacgccgccgtaccctgcgttttcaacgtgaaacggcaggaattgacaactggctacgacgcattgtggcagcagcaaaacatgatccggcactggctgtggaagttgtgaagtgtcagcaactgctgaagggatatggtgatacgcactcccgtggtctgaaaaattttcagactttgatgaactttgtcgattgccatcggaaaaagctgtcggcacacaatctgagacaattacgtgaagccgcactggccgatgaggatggacgccagttgcatgaatatcagcagcatcttgaaactaacatcctgaaaaagaacggaggaggagtcagtaatgagcctgcataagtttatacagcctcacaaaattcggttttctgaatgtgatccggcgggaattgttttttatccccaatattttgtgatgttcaacaacttgctggaagattggttcgatgagctaacgccagagggatatgccgcttacattgctaagcaccgtttcggtttacccacagtacatctggaagcggagtttaaggcgatcagcagaatgggcgataaagtctggctggaactgaatgttgaagagattggtaaaaaatcacttaagctacgtcagcgttgtttcagtcaggaaggcgaattaagaatgagtgcgattcagacttatgtcacgacctcgctggatacgcatcaggcaatacccatacccgatgaattttattatccattaattaaccagccattaattatctagccaatcattcatccaataaccattcacccaataaccatgccttaacccgtgcccataagaggtgtgacaggagaaccagcatgaacaaaaaaaatatgaacatcgtgtgtattggcggcgggcctgcgggtttatatttcggtttgctgatgaagttacaaaatcctgataaccgtgttgtcgtgattgagcgcaatcgcccctatgatacttttggctggggagtggtattttcagatgccacactggaaaacctgagtatggctgatccggtatccgccaaatctattagtgcagccttcagccgcctttagagcaca

SEQ ID NO: 961 - DNA, 4177 bp, Xenorhabdus sp.; identical to SEQ ID NO: 960
  CDS (3519)..(3857)

SEQ ID NO: 962 - DNA, 4177 bp, Xenorhabdus sp.; identical to SEQ ID NO: 960
  CDS (1877)..(3445)

SEQ ID NO: 963 - DNA, 4177 bp, Xenorhabdus sp.; identical to SEQ ID NO: 960
  CDS (56)..(1747)

SEQ ID NO: 964 - DNA, 5835 bp, Xenorhabdus sp.
  CDS (780)..(1199)
tttacccactccaaatttctaattcataacgatttggtttcaccagccatggcgttgctttgaggccggctgcaaatgcttcacggctactgtcaaaaataatacagggacaacattgctgtaactgcttcatccagtcggtaaatgattcaggcgaaactccctcaggcaagctaccgctaaccacaaccatatcaaactgccccagccatgagagagaatcagtaacaaactgctcccattctttttctgtcacatggaaacctgagaaattaaaatcggtcacatcaccatatttttcagtcagtttcacattgatacgtgttctgccagaaactaaatgaaaacggttaatcatcttgttttcatcgaaaaaatgctgaaatccgtcctgattttcttttcccagaaaaccgctgacggtgacatcaatacccaaatcccgtagtaccttcgcaacattattaccttttccggcagcatgcagccctgcggtacgtacgcgattaacggttcctttaacaatatctggacacaggccaactaaatcataagctggatttaaggttattgtggcaactcgacggctcatcttgcccagtatctcctgaataaatagtcataaatcacattaaaattcctcgactatttataacatcaaaattgaatcgtttcagttaaatttaatatcagattggtcattgtgttatctcaatccaaaagtaaaaatatcggcaaccgataattttttatccgatgaagaaaaaaggaataaatcaatgtcagtggttgttggagttggtgtcattatcattaatgataaaggtgaaattttactgggaaaacggacaggtaaatatgccccgtactggtcaatatttggcggacatgttgatcccggtgaaacatttgaagaatgtgctatccgtgaaattcaggaagaaattggcttaaaaattcaaaatccgcaggtttatgggatctgtaataacatccaaacctaccgtgaagaaggaaagcatactatttctgtctgcctgatagcccaccatcccggcggagaaccgcgcttaatggaaccagaaaaatgtaaccaacttatctggtgcgatcctaataaccttccagagcctcattttgaagccagccgcaatgcaattaaactctggcaagagaaaaagttctatttgcctgcctgacatacagatacactgccaatatcgacaaaaagcagtgtatctgaaaccaaacaaaatccatttacatattccttgattaattgtttacacatgttcctgattgatgtatcgtcgcgctagtacaaaggtaacacttattcatcaggagtctatatgaccattgaggtaacgcaaaattttaaacgcccctctatattaggcggagcaatgatcattgccggtactgctgtcggtgctggtatgttttccattcccatcgtcacttcaggtgtatggtttacaggatcaataattttgctggtttacacttgggtctgtatctatttctcaagcctgatgatcttggaagccaatatgaattacccctgtggcgctagctttcataccattaccaaagatttgctgggcaaaggctggaatgtacttaccgggttatccattacctttgttttatatattctgacttatgcttatatctcagctggcggctcgattatttttcgtaatctcaatagcattattcctctgccacaagccggaactggcctgattttttcctttattgttgccttcattgtctggttatcaaccaaagccgtagatcgcctgagcacgattttaatcggtggtatggtcatcacatttatcatgtcagtgggaggaatgtttactgaagtcaaacccgctatattgactgatcagacaaataccgaaaccagttacctaccttacgctttaatggcattgccatatctgctgacttcctttggctatcatggcaacgtgccggggttagtgaaatattataataaggatgtcaaagccattacccgcagtatgctctatggctcgctgatagcgctgaccatctacattttgtgggcagtttgccattcagggaaatattccccgtgaagcatttaaacagatcattgctgatggtggtaatgtcagcgatttactgaaccaaatggataatgtgtctggcaatgagacgataaatcaattgttaaatgccttctcatatatggcattatccagctcatttttaggtgtttcgcttggattatttgattatctggctgattttttcggatttgatgatagccatacagggcgtttaaagacggctgtaataacgtttatcccacctaccgttctagctttactcttcccgaatggtttcctgtatgcaatcgggtttgcaggacttgcagccactatctgggcagttatcgtgccggcactgatggcacgtgccagtcgtcggcgccatccacaagccagttatcgggcccccggtggcaatatcctgatagtttttattatcctgtttggtctaatcaatgcagtcgtacacattctgtctttatttgaccttttacctgcctaccgctgattctgactaaattcccctgccccggtaaaaataccggggcattcatttcttgcctaatctcctgactgcgagtaattttgtcgccactaaaatccttattccactgtattacagaaggtatctatggctaaagccaatgaaattaaacgcggaacagcaatcaatcacaacggaaaactattattagttaaagacattgatattcagtcacccagcgcacgcggcgctagtacactgtataagatgcgctttaccgatattcgtaccggtcagaaagtggaagaacgcttcaaaggtgatgatattctggaaacgattacattaactcgtcgtagtgtcagtttttcgtacatcgatggcgatgaatatatcttcatggataatgaagatttcacaccgtatcactttaaaaaagaacaaattgaagaagaattgctgtttatcccggaagaaggtttaccgggaatgcaagtgatgacaatggaaggtcaactgttggctctggaattaccacaaactgttgatatggtcattgaagaaactgctccgggaattaaaggcgcatcagcaagtgcccgtacaaaaccagcaaaaatgagcacagggttgtcgattcaggttcctgaatacctgagttccggagaaaaaatccgcattcacattgcagaacgtcgttatatgggacgttgcgattagttcagtgtttttggatataagttgctcctttctgataaaagagcaacttattatctgtttaaattaaaaataatccacattaataattgccaaacgctttttattatcagtccatttcactttagtaacacctatattaccaggaaggataatgcttccgggattttttgctttgtagactgaaacaacctgttttaccgtaatatttttaccctttctatagcaggagatattggcctgagcatttgatacaacaacctgacaccctggatcaacaatagagcctgaaaagtgtatttttccacttgtagattgtgcatatccataagaaatccatgaaaacaacaaaacgctgattaatagtttaagataattttgcatggtgacctcacttcgtttgtccattaactaaaactcagttaccttttattcctttatcttcataataaatatttaatgtgaaaataatacgacatcaataccttttattgatttatatcaaaggtaaatttatagctaaaaagaaagatgctatttttattaattaatttgaagcactgttattaacaactaatacttgagttaaatttcatatgaaatttaaaataaatcacaaaattttaaaattagcgaaacaaggaaattagaaaattgttatataacatttagtgataagttatagtgacaaatcctaattcttatttgctccaatctatcttactccctttgccctaatacatattggtcattaagatggattgccactattcttctgggaattgtattattttttcttatgaattgactgttgtggtgcttatgccagcttactgttttttcagtttctctatttcgattatcagatatacaagggggatcagcagcaaaatcataggatcgagaggtatccggtttgaattttaaatccggaggataatgagccaatacaggataagataaaaatataaacaaaaatatgactatgttctttaacataagcatttaacctctgcaaccggtatcactacctttctcagttttaaccccatgccaatccctaaaccagacaatggtttaacgctctgctatctatataacgatacaacggaaaatgaaacaatttctttatatactttatttatcccaaccacaattcgacataatatactaacaaattaggatatgaaaaaatcaataattaattatttaataatagtcagtgctcaacaattacaccaaatatatattatcgttactgaggtaaccatttaactatttttccgatatcttgatattattcatgtgataatgatataaaatgcaatcaattgaaaatatgaatatataaatactatacagattacatattacacagccgaatgattactcttttccctaatttttgttatagtgccctgaccctcaatctagctgccaaaacccattgtcgcattaaaataggtaacacatgacccgtagtcgctcactaactatacttatactcaatatgcttggtttcgccctgtttttctcatggtatttacctgagaatcacggcttttggtttcatattgactccgccatttttcattactttaatgaaaaactactgccaaattcaaaatttgcattatttgtcgctatcgtaaatataagagcatttgacgtcatctcactcttatgtatgggtttactttattatagcgcatttcgtaaacaaaattacgcaggcaaacgccgtctttttatgattggtctggtcatgctgataaccgccgtgatcataaatcagattggtcatcagatccccgttagccgtccaagcccgactttaacatttgaaaacgtcaatcgtgtaagcgaaatgacaagctggcataccaaagatgcttccggtgatagcttcccgggggatcacgggctgatgctgctaatttttagctgttttatccttcgatatatttcccgtggggcattctttatcgctttactgattatgatcgcttttgctctccctcgtattatggctggtgcgcattggtttacagatattgctgttggttcattatcactcactttagttggagtgagctgggcattattgactcctctgagcgacactttggcagattggttagataaaaaattaccgcatatcggtcgtactcgctaaaaagatgatcattatcggggagatactcactatctctccgataatatagactttttctccaacggagaaaaaacaaacaaaacaattctaacctattagtttataatctaattttttgtaaataattatttttatctctcgcttttttctcacggtttctgtactcttccgctagtcctttttattaaaatactccttttgtaaagatattaataaaatgtgtggcttcacacactttagggacgaaaagtttgtcaattcgctactttatactagcctttaaagcgtttagtgtttttggggtggcgataagtcacattaaggactgcaagggaaattaatataatgggcaaatctcaacccatact

SEQ ID NO: 965 - DNA, 5835 bp, Xenorhabdus sp.; identical to SEQ ID NO: 964
  CDS (1356)..(2114)

SEQ ID NO: 966 - DNA, 5835 bp, Xenorhabdus sp.; identical to SEQ ID NO: 964
  CDS (2227)..(2598)

SEQ ID NO: 967 - DNA, 5835 bp, Xenorhabdus sp.; identical to SEQ ID NO: 964
  CDS (2719)..(3294)

SEQ ID NO: 968 - DNA, 5835 bp, Xenorhabdus sp.; identical to SEQ ID NO: 964
  CDS (4787)..(5467)

SEQ ID NO: 969 - DNA, 5835 bp, Xenorhabdus sp.
  CDS (5244)..(5834)
agtatgggttgagatttgcccattatattaatttcccttgcagtccttaatgtgacttatcgccaccccaaaaacactaaacgctttaaaggctagtataaagtagcgaattgacaaacttttcgtccctaaagtgtgtgaagccacacattttattaatatctttacaaaaggagtattttaataaaaaggactagcggaagagtacagaaaccgtgagaaaaaagcgagagataaaaataattatttacaaaaaattagattataaactaataggttagaattgttttgtttgttttttctccgttggagaaaaagtctatattatcggagagatagtgagtatctccccgataatgatcatctttttagcgagtacgaccgatatgcggtaattttttatctaaccaatctgccaaagtgtcgctcagaggagtcaataatgcccagctcactccaactaaagtgagtgataatgaaccaacagcaatatctgtaaaccaatgcgcaccagccataatacgagggagagcaaaagcgatcataatcagtaaagcgataaagaatgccccacgggaaatatatcgaaggataaaacagctaaaaattagcagcatcagcccgtgatcccccgggaagctatcaccggaagcatctttggtatgccagcttgtcatttcgcttacacgattgacgttttcaaatgttaaagtcgggcttggacggctaacggggatctgatgaccaatctgatttatgatcacggcggttatcagcatgaccagaccaatcataaaaagacggcgtttgcctgcgtaattttgtttacgaaatgcgctataataaagtaaacccatacataagagtgagatgacgtcaaatgctcttatatttacgatagcgacaaataatgcaaattttgaatttggcagtagtttttcattaaagtaatgaaaaatggcggagtcaatatgaaaccaaaagccgtgattctcaggtaaataccatgagaaaaacagggcgaaaccaagcatattgagtataagtatagttagtgagcgactacgggtcatgtgttacctattttaatgcgacaatgggttttggcagctagattgagggtcagggcactataacaaaaattagggaaaagagtaatcattcggctgtgtaatatgtaatctgtatagtatttatatattcatattttcaattgattgcattttatatcattatcacatgaataatatcaagatatcggaaaaatagttaaatggttacctcagtaacgataatatatatttggtgtaattgttgagcactgactattattaaataattaattattgattttttcatatcctaatttgttagtatattatgtcgaattgtggttgggataaataaagtatataaagaaattgtttcattttccgttgtatcgttatatagatagcagagcgttaaaccattgtctggtttagggattggcatggggttaaaactgagaaaggtagtgataccggttgcagaggttaaatgcttatgttaaagaacatagtcatatttttgtttatatttttatcttatcctgtattggctcattatcctccggatttaaaattcaaaccggatacctctcgatcctatgattttgctgctgatcccccttgtatatctgataatcgaaatagagaaactgaaaaaacagtaagctggcataagcaccacaacagtcaattcataagaaaaaataatacaattcccagaagaatagtggcaatccatcttaatgaccaatatgtattagggcaaagggagtaagatagattggagcaaataagaattaggatttgtcactataacttatcactaaatgttatataacaattttctaatttccttgtttcgctaattttaaaattttgtgatttattttaaatttcatatgaaatttaactcaagtattagttgttaataacagtgcttcaaattaattaataaaaatagcatctttctttttagctataaatttacctttgatataaatcaataaaaggtattgatgtcgtattattttcacattaaatatttattatgaagataaaggaataaaaggtaactgagttttagttaatggacaaacgaagtgaggtcaccatgcaaaattatcttaaactattaatcagcgttttgttgttttcatggatttcttatggatatgcacaatctacaagtggaaaaatacacttttcaggctctattgttgatccagggtgtcaggttgttgtatcaaatgctcaggccaatatctcctgctatagaaagggtaaaaatattacggtaaaacaggttgtttcagtctacaaagcaaaaaatcccggaagcattatccttcctggtaatataggtgttactaaagtgaaatggactgataataaaaagcgtttggcaattattaatgtggattatttttaatttaaacagataataagttgctcttttatcagaaaggagcaacttatatccaaaaacactgaactaatcgcaacgtcccatataacgacgttctgcaatgtgaatgcggattttttctccggaactcaggtattcaggaacctgaatcgacaaccctgtgctcatttttgctggttttgtacgggcacttgctgatgcgcctttaattcccggagcagtttcttcaatgaccatatcaacagtttgtggtaattccagagccaacagttgaccttccattgtcatcacttgcattcccggtaaaccttcttccgggataaacagcaattcttcttcaatttgttcttttttaaagtgatacggtgtgaaatcttcattatccatgaagatatattcatcgccatcgatgtacgaaaaactgacactacgacgagttaatgtaatcgtttccagaatatcatcacctttgaagcgttcttccactttctgaccggtacgaatatcggtaaagcgcatcttatacagtgtactagcgccgcgtgcgctgggtgactgaatatcaatgtctttaactaataatagttttccgttgtgattgattgctgttccgcgtttaatttcattggctttagccatagataccttctgtaatacagtggaataaggattttagtggcgacaaaattactcgcagtcaggagattaggcaagaaatgaatgccccggtatttttaccggggcaggggaatttagtcagaatcagcggtaggcaggtaaaaggtcaaataaagacagaatgtgtacgactgcattgattagaccaaacaggataataaaaactatcaggatattgccaccgggggcccgataactggcttgtggatggcgccgacgactggcacgtgccatcagtgccggcacgataactgcccagatagtggctgcaagtcctgcaaacccgattgcatacaggaaaccattcgggaagagtaaagctagaacggtaggtgggataaacgttattacagccgtctttaaacgccctgtatggctatcatcaaatccgaaaaaatcagccagataatcaaataatccaagcgaaacacctaaaaatgagctggataatgccatatatgagaaggcatttaacaattgatttatcgtctcattgccagacacattatccatttggttcagtaaatcgctgacattaccaccatcagcaatgatctgtttaaatgcttcacggggaatatttccctgaatggcaaactgcccacaaaatgtagatggtcagcgctatcagcgagccatagagcatactgcgggtaatggctttgacatccttattataatatttcactaaccccggcacgttgccatgatagccaaaggaagtcagcagatatggcaatgccattaaagcgtaaggtaggtaactggtttcggtatttgtctgatcagtcaatatagcgggtttgacttcagtaaacattcctcccactgacatgataaatgtgatgaccataccaccgattaaaatcgtgctcaggcgatctacggctttggttgataaccagacaatgaaggcaacaataaaggaaaaaatcaggccagttccggcttgtggcagaggaataatgctattgagattacgaaaaataatcgagccgccagctgagatataagcataagtcagaatatataaaacaaaggtaatggataacccggtaagtacattccagcctttgcccagcaaatctttggtaatggtatgaaagctagcgccacaggggtaattcatattggcttccaagatcatcaggcttgagaaatagatacagacccaagtgtaaaccagcaaaattattgatcctgtaaaccatacacctgaagtgacgatgggaatggaaaacataccagcaccgacagcagtaccggcaatgatcattgctccgcctaatatagaggggcgtttaaaattttgcgttacctcaatggtcatatagactcctgatgaataagtgttacctttgtactagcgcgacgatacatcaatcaggaacatgtgtaaacaattaatcaaggaatatgtaaatggattttgtttggtttcagatacactgctttttgtcgatattggcagtgtatctgtatgtcaggcaggcaaatagaactttttctcttgccagagtttaattgcattgcggctggcttcaaaatgaggctctggaaggttattaggatcgcaccagataagttggttacatttttctggttccattaagcgcggttctccgccgggatggtgggctatcaggcagacagaaatagtatgctttccttcttcacggtaggtttggatgttattacagatcccataaacctgcggattttgaatttttaagccaatttcttcctgaatttcacggatagcacattcttcaaatgtttcaccgggatcaacatgtccgccaaatattgaccagtacggggcatatttacctgtccgttttcccagtaaaatttcacctttatcattaatgataatgacaccaactccaacaaccactgacattgatttattccttttttcttcatcggataaaaaattatcggttgccgatatttttacttttggattgagataacacaatgaccaatctgatattaaatttaactgaaacgattcaattttgatgttataaatagtcgaggaattttaatgtgatttatgactatttattcaggagatactgggcaagatgagccgtcgagttgccacaataaccttaaatccagcttatgatttagttggcctgtgtccagatattgttaaaggaaccgttaatcgcgtacgtaccgcagggctgcatgctgccggaaaaggtaataatgttgcgaaggtactacgggatttgggtattgatgtcaccgtcagcggttttctgggaaaagaaaatcaggacggatttcagcattttttcgatgaaaacaagatgattaaccgttttcatttagtttctggcagaacacgtatcaatgtgaaactgactgaaaaatatggtgatgtgaccgattttaatttctcaggtttccatgtgacagaaaaagaatgggagcagtttgttactgattctctctcatggctggggcagtttgatatggttgtggttagcggtagcttgcctgagggagtttcgcctgaatcatttaccgactggatgaagcagttacagcaatgttgtccctgtattatttttgacagtagccgtgaagcatttgcagccggcctcaaagcaacgccatggctggtgaaaccaaatcgttatgaattagaaatttggagtgggtaaa

SEQ ID NO: 970 - DNA, 3209 bp, Xenorhabdus sp.
  CDS (2)..(3208)
gttccacagtaacactattgacagattcattgccaattatgaagctctgcttgctggtattgttgaagtgatggcagatgtctcagccaataaagaaccctctgttcatgaattaccaatcttgagtgatacggaaaaacaaaccttactgcatcaattaaatggtcgacaaaagcatgtccaacaaggatgttgcttccatgagctatttgaagaacaggtggcgaaaactcctgaaaaaacggcgctggtttttggcgatgatactttaagttatcaagtcgttaacgcgcaggctaatcaattggcacattatttgattgagcagggtattcagccagatgttctggttgctatttgtcttccccggtcattacaaacggtgatcacactactgggtattcttaaagctggtggggcttatgtgccgttggataccagttacccgcaggcccgtttgcaatatatgctggaacacagcgaagccgaatttattctcaccgatacatcactggttgataaattacccatcaatcagcaacgtgttatttgtttggatacggaaacggtacgttcatatgtgcgaaatttacccacagctaatattactcatcgtccgttccccctgactgaaaatcatctggcctatgtcatttatacctccggctctaccggccgtccaaaaggagcgatgctggagcataaaggctgggtgaatctggcacaggcgcaagctgaattattcgacgcaaatgcggatattcgcgcattgcagtttgcctcctggagtttcgacgccgccgtactggaaatggcaatgacgctggcttatggtgccacgctatatctgatttcagaaacacatcgtcgttcccctgaatggctggatgagatagttgaaagacaccgtattactcatgcagtgctcccgccggcactgttaccacatctggattttaacaaatggcgcacggtttcaaccttattattggctggggaggctgtggccccacatattgtagaagagtggtcgcggggcagaaaactatttaatgtttatggtccaactgaatgcacttcaattgtaaccagcgccttactgacagtagataagcgaataacgattggaaaaccgttaccaaatactgtcatgcgcatcctgaattctgatagcaatctggtaccgttcggggcggttggagaactgcatattggagggattcaattagcacggggttaccgtaatgcaccagatctcacggaaaaacaatttatccatgatcctttcagtaccaacccggcagaccgattgtaccgcactggcgatttagtacgctggacaccagaaggtgaattggaatttattggccgacttgattcgcagattaaaattcgcagccaccgtattgaactgggagaaatcgaggcggttctggcggggcaggagattttaagtaatgcagctgtaatcgttaatggtcatgacagtgaagacaaaaaactcattgcttatgtctgtccaagtaccaattggctggcggagaaagctactgagtttaatgtcgattaccttgaaagttggacagaaatttttgataaccagtatcgtcaggaactagcagaaaatacgactactgacactattgataagtgcgatgatgacagtgattttagcggctgggtgaacagctatactgaacagccgattgccttggaacaaatggaagagtggcgagcggggaccatgcagcggataaactctctgcaatcccgacgattattggagattggctgtgggtccggcttattgctgtatcgctatgctgagcaatgtgaatcagtattagcgactgacatttcagccgaagtattggcacgtcaccagaatattttgcaaaaacgtggttggtcgcacgtagaattaagaagaggtgatgctctgaatttaggtgtaatcactcctgatcagtttgattcggtcgtaattaactctgttgtccaatatttccccaatgttcaatatctggaaaaagtcattacgcagttattacctgcggttgaaaatggcgggaaaattcttctgggggatattcgtaacttagatttattaactgcacatatcacagctattgagagagatcgtctgaatgaccaacatatttcggtaggtacgttggcaaattacattcaacggcgtttacagcaagaaaatgagtttttaattagtccgacctattttgcacaattgccgacacgttacccggaaattggaagagtcgatattctggttaaacgtggtgtgggtgacaaccaaatgctgcgttatcattatgatgtcatattatataaatgtgataaaaatacagaattatgttgcgatccaaccaggatttggaaagattttaattctcttgaagatcttcggaatacgttagaggtaggcgaattcgatacatttggtgtctcaggtattcctaatgcccgcatcaaagatgattttgatttagcggaagggttacgccattggtcatctgatcagattatttttccacccaaaaatgccggcagtttttctcctgaaatagcagagcaggtttctgctcttgaatctttactgcaatatgcagaacagtgtggttaccagtgtgagcttacatggtcacaacaacaacctgatttactcgatgtgattttcagccgtagtgacttaccccaaatacaagcacgttcagattacaatcaaactcatttggccaattatccacagcttcctgctattggtggagaacttacggagctactggagtcggctctgaaaaagcaattacctgattatatgatcccgagcctctatatcccgttagagcgtattccactgaattttaataataaagtggataaaaaagcgttacctatcccagatgaaagtgatttacatcgtcaggtttatatcgcaccgagagatgagattgaagaaaaacttagtcagttgtggcaagagcatttaaaaatcaatcaagtgggtatttatgatcatttcttttcgctcggaggccattcacttctggctgttaaaatagttgcttcaataaaaaatacgttagacaaaaatttcaccatgcatcagttatttgccaatccaaccattgcacagattgcaagtctgattcgtcatagtaataggcatgaaatgtcttctttagagcaca

SEQ ID NO: 971 - DNA, 3685 bp, Xenorhabdus sp.; identical to SEQ ID NO: 166
  CDS (637)..(999)

SEQ ID NO: 972 - DNA, 3685 bp, Xenorhabdus sp.; identical to SEQ ID NO: 166
  CDS (2118)..(2441)

SEQ ID NO: 973 - DNA, 3685 bp, Xenorhabdus sp.; identical to SEQ ID NO: 166
  CDS (2569)..(3252)

SEQ ID NO: 974 - DNA, 3685 bp, Xenorhabdus sp.; identical to SEQ ID NO: 166
  CDS (3468)..(3683)

SEQ ID NO: 975 - DNA, 3796 bp, Xenorhabdus sp.
  CDS (3)..(239)
gcactttgggcaaagttcaggtcagaatgccggaagaagtggaagctcttgaacagcagcgccgtgcagaagcagagcgtctggcaagccagcagcacttaagccatgaagttgagcaaggagctttgatgtcagaagccgaagcacaaatggcaagcggttcccgtaaagttggacgtaacgatccttgcccatgtggctcaggcaaaaaatataagcattgccacggtcgtttataattaaagtcagtataaacagccagagataaattctctggctgtcagcagtctgaagcggtgccattgtcaccgcttcaatcagggcggaacttattatttcttatcggctgcgatacgattgcgaacgtgttcagcacgttcctttgacggtgggtgtgaatcaaacatactggtttcaccactgcctagcttagccagtttttcaaagctggttgctaaaccttcagttttgatattgcgttttttcagcagttcataagagaagtcatcagcctgactttcctgatgttgtgaaaactgcgagttgagcagcttttgccccagatctgcaagttgagaatcgcttaactgtgctgcgacaccaccggctgatgctgctgcggtacgggcagcaacggctgcataggcaacctgcattgctttacgcgagtggcccaatgcaacgtgccccatttcatggcccagaacaccttcgacttcattatcgttcatcatattcatcaggccgctgtatacgcgtacacaaccattagccattgcccatgcgttaacatcatcagtcagataaaccttgtagttaactggagtaccattaatttcgtgtcctaatgctttggcaattttgtccagacgcttagtgtattggctggatgcgggggcaattttattctgtgcatccatatctctacatgattggtcagatagctgtttaacatcagaatcatttagcgtcgcggctttgaataattgcatcccagagctggccagcattccatgatcaagattctgacaacccgccagcattacagctgaaacagctacagcaacaagagctttcattttcataacgttgttttttcctttgtaatacacgtagccctaatatttttagggtataaaaagatgatgcattttgctaaaaatagtaatgcgaataaactctaataatagtgattatgtgaatttgataacgttttaagcaaaataatcaaaccataagaagagtaatttagtttaaattaacttaacaaatatagcacagtatgcgttacccttttatcgtaaatgatcgtcggttagaaaaaataatgctgatagccagaatgggaacgtccatgacgatggccctctctaacagtggtaataaggtcgcagtgttagctcatatcggttactgttcttggaaatttattctggtgatgagataaataataaccatagagataggaaatgagatcaatatccaatttagagactgatctttaaaaaaacgggaaatggttgaaaagttcaggatgtaaattagtgtaatagcattatttatgacactgattaaaataacagaaagaataatgtataaacttttctttgatttatttcgaaacaaaaaaatagtaatgcagaaaagaaacagtgaattgttagtcagcattaaataatcagtgctacaaataagaaaggatagttcatctaagatgtattcattgcttgaccataaagttaaaatctccttaatagttaaatcgatagaaataaaacctatgttactaataatgaataaagatattattagtaatgtataaaataatgacttaatccacattcaatcctccttctgttcttttttgaataaattatcagtaacacatttgtttttaaaactaatcagtattcacattaattaaatacaactttacgttattaaatattcgttgaatgactgtctctattagcaatgataaagttactgtcttaaaggaattttatacttaacttgtaagagcagactacttctaaattaaaatagcgatagggaattttatgcgagtccaaaaaccgatcaactcaggatttagttcatcatcgacagcctcggatgtacttaaaggtattgatattaaaggtaagacagcttttatcacaggtggacattcgggactgggatatgaggccaccaaagcactatcagaagcaggcgctcatgtggtcgtgggggcaagggatatattgaatgcttctaacgccctaagcaaactaagcaatattacagttcttccacttgatctttccgacattaattctgtcaggaaattagcgaattatatctatgctaatagatgtctctttgattatgtgatttgtaatgcaggcattatggcgtctccagaaaaacgggttggcccgggatgggaatcacagtttgccacaaatcatgttgggcattacgtactggtaaatctcatatggaataatattcgagtaggagggagagtagtgtgtgtttcatctgctgggcatcataactctccaatcagatgggatgatattcaatttactagcggttatgacaagtgggtggcatatgcacagtctaaaactgcaaatatactttttgcattacagctggatgaatatgggaaagataagaatatcagggcgttttctctgcatccggggaaaatatttaccccacttcagcggcatttgtcttatgaagagatggaaagcgagggatggatggataaggatggcaatccaattgacccaacctttaaaactccggcacaaggtgctgcaactgaggtatgggctgcaacaagctcagctttgaatggactgggagggctttattgtgaagattgtgatgttgccgggcttgcatcagattataaagagccttttgccggtgtttgtgagtacgcaattgatctatcagaagccttaaagttgtggaacttcacagctaatctcactggtgtaaatacatttgtaaccaaagaataaattaaaaagtgaagaccataaaaaacggatattgcatttagaataaatgctaaataagccagatgtatggggagcattaaatgaagcaattcaataaaaatgcaatagcttatgatgctgtcagaggcaagattacttatcctgacaagttgtatcattcactcgtagctcgcgcaccaacgaatgaagcagcattagatattggttgtggtaatggtgtttctacgactcgtctgaaaaaatactttgcatacgttgaaggggttgatctgggtgatgaattgattaaacgggcgcgtcataattacctgtatgaacgcctccccgtttgcaaggcttccgttgttttaacattgacgagtagttgcagctctgtatccggccttattgcagccagcgctgcgggccactatgagattcgctgacctgatccttattcctctggcgggctttatgccctggcaattattcaggtttctcaggtcacggtcttaccgtctttgtcatcactctggctgccatagcaactttttagcattcacccttttctaacgagttaatatttatccgtatccgcgattaatatggcctgatactgacatgatttttttcgtatttacggtcatgagcagctattgcccatattgttcgcgccagtttatttgccatcgccacgattgccacactggtcggacgtcgttttttcagttctgttatccatggactcggttctttagccagtaaggctacagccctagcacctttagagcaca

SEQ ID NO: 976 - DNA, 3796 bp, Xenorhabdus sp.; identical to SEQ ID NO: 975
  CDS (1343)..(1447)

SEQ ID NO: 977 - DNA, 3796 bp, Xenorhabdus sp.; identical to SEQ ID NO: 975
  CDS (2052)..(3023)

SEQ ID NO: 978 - DNA, 3796 bp, Xenorhabdus sp.
  CDS (2763)..(3464)
tgtgctctaaaggtgctagggctgtagccttactggctaaagaaccgagtccatggataacagaactgaaaaaacgacgtccgaccagtgtggcaatcgtggcgatggcaaataaactggcgcgaacaatatgggcaatagctgctcatgaccgtaaatacgaaaaaaatcatgtcagtatcaggccatattaatcgcggatacggataaatattaactcgttagaaaagggtgaatgctaaaaagttgctatggcagccagagtgatgacaaagacggtaagaccgtgacctgagaaacctgaataattgccagggcataaagcccgccagaggaataaggatcaggtcagcgaatctcatagtggcccgcagcgctggctgcaataaggccggatacagagctgcaactactcgtcaatgttaaaacaacggaagccttgcaaacggggaggcgttcatacaggtaattatgacgcgcccgtttaatcaattcatcacccagatcaaccccttcaacgtatgcaaagtattttttcagacgagtcgtagaaacaccattaccacaaccaatatctaatgctgcttcattcgttggtgcgcgagctacgagtgaatgatacaacttgtcaggataagtaatcttgcctctgacagcatcataagctattgcatttttattgaattgcttcatttaatgctccccatacatctggcttatttagcatttattctaaatgcaatatccgttttttatggtcttcactttttaatttattctttggttacaaatgtatttacaccagtgagattagctgtgaagttccacaactttaaggcttctgatagatcaattgcgtactcacaaacaccggcaaaaggctctttataatctgatgcaagcccggcaacatcacaatcttcacaataaagccctcccagtccattcaaagctgagcttgttgcagcccatacctcagttgcagcaccttgtgccggagttttaaaggttgggtcaattggattgccatccttatccatccatccctcgctttccatctcttcataagacaaatgccgctgaagtggggtaaatattttccccggatgcagagaaaacgccctgatattcttatctttcccatattcatccagctgtaatgcaaaaagtatatttgcagttttagactgtgcatatgccacccacttgtcataaccgctagtaaattgaatatcatcccatctgattggagagttatgatgcccagcagatgaaacacacactactctccctcctactcgaatattattccatatgagatttaccagtacgtaatgcccaacatgatttgtggcaaactgtgattcccatcccgggccaacccgtttttctggagacgccataatgcctgcattacaaatcacataatcaaagagacatctattagcatagatataattcgctaatttcctgacagaattaatgtcggaaagatcaagtggaagaactgtaatattgcttagtttgcttagggcgttagaagcattcaatatatcccttgcccccacgaccacatgagcgcctgcttctgatagtgctttggtggcctcatatcccagtcccgaatgtccacctgtgataaaagctgtcttacctttaatatcaatacctttaagtacatccgaggctgtcgatgatgaactaaatcctgagttgatcggtttttggactcgcataaaattccctatcgctattttaatttagaagtagtctgctcttacaagttaagtataaaattcctttaagacagtaactttatcattgctaatagagacagtcattcaacgaatatttaataacgtaaagttgtatttaattaatgtgaatactgattagttttaaaaacaaatgtgttactgataatttattcaaaaaagaacagaaggaggattgaatgtggattaagtcattattttatacattactaataatatctttattcattattagtaacataggttttatttctatcgatttaactattaaggagattttaactttatggtcaagcaatgaatacatcttagatgaactatcctttcttatttgtagcactgattatttaatgctgactaacaattcactgtttcttttctgcattactatttttttgtttcgaaataaatcaaagaaaagtttatacattattctttctgttattttaatcagtgtcataaataatgctattacactaatttacatcctgaacttttcaaccatttcccgtttttttaaagatcagtctctaaattggatattgatctcatttcctatctctatggttattatttatctcatcaccagaataaatttccaagaacagtaaccgatatgagctaacactgcgaccttattaccactgttagagagggccatcgtcatggacgttcccattctggctatcagcattattttttctaaccgacgatcatttacgataaaagggtaacgcatactgtgctatatttgttaagttaatttaaactaaattactcttcttatggtttgattattttgcttaaaacgttatcaaattcacataatcactattattagagtttattcgcattactatttttagcaaaatgcatcatctttttataccctaaaaatattagggctacgtgtattacaaaggaaaaaacaacgttatgaaaatgaaagctcttgttgctgtagctgtttcagctgtaatgctggcgggttgtcagaatcttgatcatggaatgctggccagctctgggatgcaattattcaaagccgcgacgctaaatgattctgatgttaaacagctatctgaccaatcatgtagagatatggatgcacagaataaaattgcccccgcatccagccaatacactaagcgtctggacaaaattgccaaagcattaggacacgaaattaatggtactccagttaactacaaggtttatctgactgatgatgttaacgcatgggcaatggctaatggttgtgtacgcgtatacagcggcctgatgaatatgatgaacgataatgaagtcgaaggtgttctgggccatgaaatggggcacgttgcattgggccactcgcgtaaagcaatgcaggttgcctatgcagccgttgctgcccgtaccgcagcagcatcagccggtggtgtcgcagcacagttaagcgattctcaacttgcagatctggggcaaaagctgctcaactcgcagttttcacaacatcaggaaagtcaggctgatgacttctcttatgaactgctgaaaaaacgcaatatcaaaactgaaggtttagcaaccagctttgaaaaactggctaagctaggcagtggtgaaaccagtatgtttgattcacacccaccgtcaaaggaacgtgctgaacacgttcgcaatcgtatcgcagccgataagaaataataagttccgccctgattgaagcggtgacaatggcaccgcttcagactgctgacagccagagaatttatctctggctgtttatactgactttaattataaacgaccgtggcaatgcttatattttttgcctgagccacatgggcaaggatcgttacgtccaactttacgggaaccgcttgccatttgtgcttcggcttctgacatcaaagctccttgctcaacttcatggcttaagtgctgctggcttgccagacgctctgcttctgcacggcgctgctgttcaagagcttccacttcttccggcattctgacctgaactttgcccaaagtgc

SEQ ID NO: 979 - DNA, 3471 bp, Xenorhabdus sp.
  CDS (376)..(480)
caaaccttcctgcccgatccggggtatcgccataaaaccaaaaccgttaccgttccagccctgtgccacgcgtacccagcacgatgccccatcatccggtgggtcgtagcggttccagtgaaaatgcactttaatcgcaccgtctttattgacgaagatttcttcccctttcggaccgaccacaatggcggtttcatccccgtctgccagcggtttatagtggaaaggcggacgccagtcggcaaggccgtcgataaaactgaaatgattactgagtgtggtgccttcaccgccactgtcgcccagtgcctgcgggcaacgcccgtggtggctgatgccgaccacctgccagcgcacattcagtggcttatgggggtgattttttatctcgaagattttacccggcatcagtttgatgcagttactgctgccgctaccggtctgtttctggttgtccagtgcttcctgccggtattttaaaaacgggatagccgccgcatctttctgaaaacgtccgtaactttcaaacacggtatagggggtctggctgccgaaatcgcggaagccttcgctgctgtgcatatgcgagaggtgataacgcggctctgccggattgaaatctttatgcaggctgcgctgcggactcataccgacacccaaccgtacctgataaatcgtatcggttccgtaggcggtttccggctgtggctggtattgcaacggcagcccggcggtcatccccagatggctgtcgctgaaaaacgccgtttcatcctcaaaccagaagctgatgccttcttccgctgccagacgactgaaaaacgcataatcggattcacgtttttgggtcacgtactcccggtcctgatgtgcatcgtagagcttagaatcggcctgtacccggtgttttttcagcaggctgtttaaaatcgcggggacattctgccgatggtaaatccgactgtcctgattgagcgtcagccgccagcaggcaggccgcaccgtcagagtatagagtgttttgttgccatcggtgccaacccagtcagcatgggaaacaatgccggtgattttacgttgcagcctgtccccgttaaacacctgcaacaccgcttcctgcatcaacagtgaggccaaatcaatgtcagtctgtggtctgaacggattcgcgttaccggctctgaccagcgtcatgttcagggtaaagagttcagataatccctcttgcagggagaattccccgacagcaaacgtgtctgccggcacaccggcgatagtgcagacaaaacgtaatccacttttcatattgattctttccttatggttcctgtcatgtattccttaatccattacatttccgggcgtagtccatcgacatgccagaactgccacagcaccttgtgactgtccggcgtaaaaatctccagcatgacaaacgcagactgggtgataaaacaggccagcgcctgattgattaaccggcagaaacggtacatttcccccggattacggtagcagtcggaattcagcgtcagcgcgagtaaatgcccgcgcacagaacgccccagtcgcatccggtcagtcaggcgctcttcggcctgcacaataccgtcaatgtgttggcggaactggcggctcaggggacgatgcgtgttggcatacgggtcaaacaaccggagaaactgtttcaggctgtcggtggcaaacagcatcattggcgggctggagaggcaggacagcagcggccagccgctattttcctgcaacagcggcgggtaatcggtcatgaccggcgtgatattgtggacgctgagatgagacggtgcgccttcctgcgtcacggtaatcgtgccctgcttcaatgccggtgcttgttcatggtagccggtgaaagaacacaaaaccgcaatggcgggtaagtcgttggccggtttgcccgtcaaatcaaaaaagtgcagccggtgctgggttctgccgagaaaatcgggttcggtctggagctggtaataaaacgtgtcgggttgctcattttcatcccgaaaatgcccggcgggagtaaactgttcaatcggcagccagtgatacggtgtcccgcgttgctcactgtcaccgggctgttccacaacctcaatatcccccagccggaacaacttcacagattcccccaatggcagaggataacggtgattaccggcctccagcgcaatcggtaagctgacgcggttttccagatgaatggccggcacacagcccaataagaatgcttcatcgacattatccagcggcaattcaccctcgaaacgaaaaatcagctcaaatgtaccatccgcattcaggggtacttttgtacaacttttgctgatatccagtgtgataaagttatacagtggggacagggcataatattccaccaacggttgcagaccagaatacgtatttttgggcacaggcagcaccggactatcaagcagatcatgccagccataagggaaaccgcgcagctttcgctgcttgccctgcgtgttcaggctgacctcataaatatgttgatccagccacagactgagctgggcggccttttcggtgtccgtgccgaggaaaaaagttaatgcaccactttgccagaccggagataccgtgccggtctggcacagggtcagcataatttcactgtgagtgccggtttttttcaccgtgcgttgttgtacgaccagaggttcaatatgcagcggacggcgggttttaaacgtcattaactgcccgttgtggtgagccgaaacggcggtatccaccggaatatctgtgcaaccctgatgttcaccatcggcgggagaaaattgcagtatcgtggtgggcggaaggggacacaaggccagtggccagatgcgcgacagaatcccgtgcgtgatttcggggagttcgtcctccagtttagcccggacactggcaatcaacagggcaaaggcttcaaaaagacgcgtaatatcgggatcatgggaggcaatcagaaaatcggccagatgcggtgagtctttcgccacgcgttgcgccagttcccgcagataggcacgttcgcgcaggtacagtgattccttgttgttgttcattgaatttcacttatgtcttatctgtcagggagcggttctgtgctgagttaaaataggtatccagtctataaaggtggcttattgtacacatttaccaataaaattaattaaccaattaaatccaatttttgtctgattttagccaaatatggggagatttgcagaatccgcacgggaattcagacaaaagggaacctctaaaaactctcaatacaaaaaataagatcaattttgaactcaccaataactgaccttattgtgtatgactttttcttgcttgttcaggggaaaaaaacaaacgcatcactttttcatcacatctcgaaattaaaaagcatgaatacccgattttccgaaataaact

SEQ ID NO: 980 - DNA, 3471 bp, Xenorhabdus sp.
  CDS (2167)..(3471)
agtttatttcggaaaatcgggtattcatgctttttaatttcgagatgtgatgaaaaagtgatgcgtttgtttttttcccctgaacaagcaagaaaaagtcatacacaataaggtcagttattggtgagttcaaaattgatcttattttttgtattgagagtttttagaggttcccttttgtctgaattcccgtgcggattctgcaaatctccccatatttggctaaaatcagacaaaaattggatttaattggttaattaattttattggtaaatgtgtacaataagccacctttatagactggatacctattttaactcagcacagaaccgctccctgacagataagacataagtgaaattcaatgaacaacaacaaggaatcactgtacctgcgcgaacgtgcctatctgcgggaactggcgcaacgcgtggcgaaagactcaccgcatctggccgattttctgattgcctcccatgatcccgatattacgcgtctttttgaagcctttgccctgttgattgccagtgtccgggctaaactggaggacgaactccccgaaatcacgcacgggattctgtcgcgcatctggccactggccttgtgtccccttccgcccaccacgatactgcaattttctcccgccgatggtgaacatcagggttgcacagatattccggtggataccgccgtttcggctcaccacaacgggcagttaatgacgtttaaaacccgccgtccgctgcatattgaacctctggtcgtacaacaacgcacggtgaaaaaaaccggcactcacagtgaaattatgctgaccctgtgccagaccggcacggtatctccggtctggcaaagtggtgcattaacttttttcctcggcacggacaccgaaaaggccgcccagctcagtctgtggctggatcaacatatttatgaggtcagcctgaacacgcagggcaagcagcgaaagctgcgcggtttcccttatggctggcatgatctgcttgatagtccggtgctgcctgtgcccaaaaatacgtattctggtctgcaaccgttggtggaatattatgccctgtccccactgtataactttatcacactggatatcagcaaaagttgtacaaaagtacccctgaatgcggatggtacatttgagctgatttttcgtttcgagggtgaattgccgctggataatgtcgatgaagcattcttattgggctgtgtgccggccattcatctggaaaaccgcgtcagcttaccgattgcgctggaggccggtaatcaccgttatcctctgccattgggggaatctgtgaagttgttccggctgggggatattgaggttgtggaacagcccggtgacagtgagcaacgcgggacaccgtatcactggctgccgattgaacagtttactcccgccgggcattttcgggatgaaaatgagcaacccgacacgttttattaccagctccagaccgaacccgattttctcggcagaacccagcaccggctgcacttttttgatttgacgggcaaaccggccaacgacttacccgccattgcggttttgtgttctttcaccggctaccatgaacaagcaccggcattgaagcagggcacgattaccgtgacgcaggaaggcgcaccgtctcatctcagcgtccacaatatcacgccggtcatgaccgattacccgccgctgttgcaggaaaatagcggctggccgctgctgtcctgcctctccagcccgccaatgatgctgtttgccaccgacagcctgaaacagtttctccggttgtttgacccgtatgccaacacgcatcgtcccctgagccgccagttccgccaacacattgacggtattgtgcaggccgaagagcgcctgactgaccggatgcgactggggcgttctgtgcgcgggcatttactcgcgctgacgctgaattccgactgctaccgtaatccgggggaaatgtaccgtttctgccggttaatcaatcaggcgctggcctgttttatcacccagtctgcgtttgtcatgctggagatttttacgccggacagtcacaaggtgctgtggcagttctggcatgtcgatggactacgcccggaaatgtaatggattaaggaatacatgacaggaaccataaggaaagaatcaatatgaaaagtggattacgttttgtctgcactatcgccggtgtgccggcagacacgtttgctgtcggggaattctccctgcaagagggattatctgaactctttaccctgaacatgacgctggtcagagccggtaacgcgaatccgttcagaccacagactgacattgatttggcctcactgttgatgcaggaagcggtgttgcaggtgtttaacggggacaggctgcaacgtaaaatcaccggcattgtttcccatgctgactgggttggcaccgatggcaacaaaacactctatactctgacggtgcggcctgcctgctggcggctgacgctcaatcaggacagtcggatttaccatcggcagaatgtccccgcgattttaaacagcctgctgaaaaaacaccgggtacaggccgattctaagctctacgatgcacatcaggaccgggagtacgtgacccaaaaacgtgaatccgattatgcgtttttcagtcgtctggcagcggaagaaggcatcagcttctggtttgaggatgaaacggcgtttttcagcgacagccatctggggatgaccgccgggctgccgttgcaataccagccacagccggaaaccgcctacggaaccgatacgatttatcaggtacggttgggtgtcggtatgagtccgcagcgcagcctgcataaagatttcaatccggcagagccgcgttatcacctctcgcatatgcacagcagcgaaggcttccgcgatttcggcagccagaccccctataccgtgtttgaaagttacggacgttttcagaaagatgcggcggctatcccgtttttaaaataccggcaggaagcactggacaaccagaaacagaccggtagcggcagcagtaactgcatcaaactgatgccgggtaaaatcttcgagataaaaaatcacccccataagccactgaatgtgcgctggcaggtggtcggcatcagccaccacgggcgttgcccgcaggcactgggcgacagtggcggtgaaggcaccacactcagtaatcatttcagttttatcgacggccttgccgactggcgtccgcctttccactataaaccgctggcagacggggatgaaaccgccattgtggtcggtccgaaaggggaagaaatcttcgtcaataaagacggtgcgattaaagtgcattttcactggaaccgctacgacccaccggatgatggggcatcgtgctgggtacgcgtggcacagggctggaacggtaacggttttggttttatggcgataccccggatcgggcaggaaggtttg

SEQ ID NO: 981 - DNA, 3471 bp, Xenorhabdus sp.; identical to SEQ ID NO: 980
  CDS (365)..(2122)

SEQ ID NO: 982 - DNA, 2979 bp, Xenorhabdus sp.
  CDS (13)..(249)
tctaaagtgcatattcagagaaaagcggcacgtaataagcccttatcacactgccaaaaaggccgaaataagaaaatagcgaaaactcgggcacgcgtagaacatatctttggctcactctctcagatgggtgaaaaaattattcggacgataggccagctgcgagccaattttgcgatgacgatgaaggcaacctgctatgatttgcaacgtttggtttatttcggaaaatcgggtattcatgctttttaatttcgagatgtgatgaaaaagtgatgcgtttgtttttttcccctgaacaagcaagaaaaagtcatacacaataaggtcagttattggtgagttcaaaattgatcttattttttgtattgagagtttttagaggttccctgtagtcaactctattgaaaatgaaaccggtttatttaagcaaaggctttgctcatctggaacgcatctttattaactataattgaccaacatatccgggcacatttattgacataagcgacccacgccttattaaatcctcgacggttaaccaaagactgcatccaatcaccgagtgcatcatgccgtaacgccctacgttgtatggcggctctggcaccatgaattaaaatcccgcgtaggtgacgattaccatttttagtgattttgcctaattgtgttttcccaccactgctgctctgtcgggaaacaagtcctaaccaagcggccatttgcctgccgttattaaattgttttccatcaccgatatacgcgaccattgcggaggcaatcagtgggccaataccgggaatagattggagttgttgccactgagccgtctgtgatgatagcgacttgagggtttcttctattttttctgtctgctggatcagcttcagccattcttcatagagttatttcagaaccctgcgtgcaatcatcgttaatccattatcggcatcttcaagtgcctcgttcgcagtgactgcctaagagccgcagagcgttgcggaaaaataatgccgtattctgctgccagtcctctgatttgattagagatagcaatgcgtttttgaactaatgactgccggacattatggagaacaccgaggtcttgttgatacagattttttaccggaacaaaatgcatacccgaccgattgcagtttcacagattgccagcgcatcattagcatcatttttatggtttttaacgaaagctttcacatgctgaggaggaataaggcaaactttaaaaccgagattttcaatcgttcgtgcccaatagtgggcggtactacaggcctccatcgcaatcaaagtcccggattccatttgtctgacagtatccactaatcgacttcggatcatttttttattaaatacaatgtgattatcgttaagcaaacaaagctgaaaaacagatttagcgagatcaataccgagaattttatgatacatgatggacgcccccataaaatgaatatgtttacttcattttggtacaattgacgccatacgggacgcccatctcatcagattaagtctgaactactacaaataagcattttattcgcacaatcattttgacctatccagaatgatactgacgcgctgcgcttgtcttctccatgttaccgagctaatacattaacccggtaacatggagagccgaaaaaatacctgccagaaaaatatttcctcacctgctcctcactttttattttcctcactgtgaaaacaggtgaggaattggtgattttttatccttaaagatcaatgctttttgtgctcctcactttttccgtatataggcgagaaaagtgaggaatacggtgagcagtaaaatccctttcctcaccattcctcactttctgactcactttttaatcttcattattctggttaacaatagtgagttcctgcccgtgacgggtaatcatcccgtcctgctctaacttggttaaccagcggctgaaattcttcacattcacgcccatcgattttaaatcatcacgcacaagggcaatactgcaaggctctttcagggccgtgcgcgagcggatacactgccacagtgccgtatggttatcggttttattggaaacatggctgatttcttcctcttcaaccggatcgcgtggcctgtcaatcagcaccagtgacgtaatatcttcaccgtccttgtcggtaaaaagttccaccacacgcatatcataggctttggtgtccggctcttcggcatctttcattttggtgcaggtgataaccagcgagccgccttttttcccttcccggttgattttgtattcaacatccaacgcggcacggagggcgctggaacctctcgcgcctttactttcgtctttgccggagtggtgaaccacgagaatacttgcccctgttttggctttcagttcgtcacagccccgaacgaacgcacccatatcttttgaatcattttcatccgcgccaccaaaacagcgggctaacgtatccagaataatcaggcgcaccggctgacctgtttcagcttcaacttgccgtgcggcaatgaccagctcatgaacttcggcaggcgaggccggaaaaacgggcgtattgatcagatacatattttcaaccgtctggttgttgacgatttcccatgctttgatgcgccgtggcacgccgatcccaccttcacgggttccgccgaagaacccccaaaagtgacgattctgcggtcatgacttccagaatgcctgttttaagtgttgttccaacagctcagccagtgcagcaacatcaatggatgttttgctcgccttcttgaaactgtaacgaccagtaaagaacaagtgctgccaggcaatcggcgatattctcgcaaatttttccagtatttcttccggcacaccttcaaataccatctttttatacactcgatttaggatcatggcgttgtacgccacaatacagttggcgactaacctggcagcatgggcg

SEQ ID NO: 983 - DNA, 2979 bp, Xenorhabdus sp.; identical to SEQ ID NO: 43
  CDS (77)..(262)

SEQ ID NO: 984 - DNA, 2979 bp, Xenorhabdus sp.; identical to SEQ ID NO: 43
  CDS (602)..(1102)

SEQ ID NO: 985 - DNA, 4356 bp, Xenorhabdus sp.; identical to SEQ ID NO: 127
  CDS (3838)..(4356)

SEQ ID NO: 986 - DNA, 4490 bp, Xenorhabdus sp.; identical to SEQ ID NO: 369
  CDS (1)..(555)

SEQ ID NO: 987 - DNA, 4490 bp, Xenorhabdus sp.; identical to SEQ ID NO: 369
  CDS (561)..(1355)

SEQ ID NO: 988 - DNA, 4490 bp, Xenorhabdus sp.; identical to SEQ ID NO: 369
  CDS (1443)..(3314)

SEQ ID NO: 989 - DNA, 4490 bp, Xenorhabdus sp.; identical to SEQ ID NO: 369
  CDS (3415)..(4080)

SEQ ID NO: 990 - DNA, 3416 bp, Xenorhabdus sp.
  CDS (978)..(1247)
  unsure (1)..(3416): unsure at all n locations
tgcgctctaaagacgtgatttgctcaacaagataaagatagtgggtgtgtaatctcatcagcaaccggctcaaataatcgggaatgtcgtgttccgcaagtacccgtgataagcgtttaatgaccgcctcgccttttggcaggctgataccgaactccagcaaaaaggcctgcatttggttagtcgttttgactttatcccggatgagtgagtctctgacacggtgtagcgctctcatgccctgttgagtctctgttctcggctggacaaaacgcatcgatggccgtgaggcggcttcacatatcgcctctgcatcaataaaatcatttttattacttttgacaaacgggcgcacaaattggggagagatgagtttggcttcatggcctaaaccgacaatccggcgtgccataaagtgagcgccagcacaggcttccatcaccaccgttgcgggagagcaatcggctaagaattccatcaatttagttcgggtgaattttttacgtaacagggctttccctgattgatcctgacaatggatatgaaaggaatgtttgccgagatcaatgccaatcagtgtggtggtattcatgatggtagcctctaatcaaagataatcaccctgctaatatactgcgattagaatgaggggaaccatctcattaaactgccatcgatataccaggtttgtgcggccgcatcccagtgtgcgcccagctttctcactgtctcatactcatcatcagggacgtgtaaatcaatccgcagcatattattccttcattgtgaaatcattaatcaaataaattagtcagactatttagctaattttcatcaaagcataaagagtttattactgatctgatttagaaaacaccgcatcctcgcactcggagtttatgataaggggagtctttatgcgttgttgcttttcgatatccggtgcggcctgtctgctgggattgactgtattgtgcatgccgctggctcaggcggcggagaaagatgagctggccagtgccaagcgtctgattgatcaggtactgatagcactggagcgcgccagcatcgccgaaaagcaatctgacccgtcagaacatcctcgttatcactttgattattcacgcatcagggcggacctccataccctcaaagccggtatcgaccgctatctgagtccttcccgcgatcagccccgtgttcccgtccccctctccggcgattaccgtcaggaacatccacaatgacctctacccagcgccaagcctttgaagtggcctcaggacactttgatatttattttctgtctctggtgtgtgtcggcttttttctggccacgctgtttttgtgggcggcctgggcggcggtggaggtctggaacggctgggcgaatgaaaaagtgcgtaatcagaccctcaggcagtttgctcttcgaaccgcagtattgctggtcgtggctgtctggatgtttgccagttgagttaataaacataacaaaaaggaactgaatcactatgaaacgagtttttaccacctgccgtcagttcagcacaaacctgatggcccggatcagcacttttctgttgctgctgggtgtttcctgtgaatcggcctgggccgatttgccttcgattgaaccgccctcaagtggaggtcgtggcggattaatggggcaggtaaaagggtatgcgcaggatggcattgtgattggcgggctgatcctctctgcggttgcgttctttaaagtggcctcggcggcggtggaaaccttctctgaagtgcgtgatggcaaagccacgtggacccagttcggctcgattatcgtggtcggtattgtgttgctggttgcggtgatctggttgctggcaaaatcggccaacattattttttaaggtgccgcggatgcagacgatcccctttttacccgatcgcttaaacgctgaacccgtcgtatttcgcggcttcaccacgccggagatggggctggccgccatcgcagggctggccctcggtctggggggcagccttccctttattccgtttgccggttgggtgatgctgccgaccggcatgctgatgatgccgttgttactgctgagtgttggcgggcgctggcttgccaccttaaaacggggcaaaccggaaaactatctctggcagaaactggccgagaaaaaacgccggttagggctgggtgacccgaccttgattatcgcggcgcagggctggtcactacgccgcagcaggcaagcgcaccgcaacaggagaggcgtgtgatgagtcgctttcgtcatgcggtcagaaaccgggaccagcatattctgaccctgcgggtggcgtgcggcattctggtgggagtgctgctgataagtctgctgggctggatggcatccccacgcaatctgaccattcataatccgccggatttacgcagtggcagcacccgggcgtggtgggaagtgccggctcccagtgtctacagctttgccttttatattttccagcaactgcatgcctggccgaaaaacggggcgcaggattatccggccaaaattgaggccttatcgccgtatctgacgccggcctgtcaggattttctgcgtgtggatgcccgaacccgggctgacagcggtgagctgctcgaccgggttcgggtggtgtatgaagtgcccggccggggctatgagacgcgcagtgtgacggtgcgtgaccgcgataactgggtggtgcgactggatttggtggcggatgaatattatcacgctgaaccggtcaaacgggcattggtgcgctatccgctgaaagtggtgcgctgggagggggatgcggagcgtaaccccttcggtctggcactggattgctacgacggaatgccacagcggctggaagccctgccaccgccagcggaagagaaaaaaggcgtatttcaatgagaagagatgtatttgactggcgcggtgtcgggctggggctggtcagcttcctgctgttctgcgctggcgcaaaagctgatgagctgctgacatgggagcgtattccgttatcgattacgcttcaggttggtcaggagcggattatttttgctgaccggaatgtccgagtcggttttccgcccttactgaatgataaattacgggtacagagcacgggcggcgcggtttacctgaaagccaacagtgcattcccgtcaacccggctgcaattgcaggacagtgagaatggcgaaattatcttactggatgtgaccgccggcaaaaccggggccagcgagccggtgcgtattatttacccggttgaaaaatcaacggattcaaaagataaaccgcactcacagagcaaaccatcattgtctgcgcctactcccgtgctgttaacccgctatgcggcnccagcaaccttagagcacatggtccgag

SEQ ID NO: 991 - DNA, 3416 bp, Xenorhabdus sp.; identical to SEQ ID NO: 990
  CDS (1244)..(1480)
  unsure (1)..(3416): unsure at all n locations

SEQ ID NO: 992 - DNA, 3416 bp, Xenorhabdus sp.; identical to SEQ ID NO: 990
  CDS (1668)..(1892)
  unsure (1)..(3416): unsure at all n locations

SEQ ID NO: 993 - DNA, 3416 bp, Xenorhabdus sp.; identical to SEQ ID NO: 990
  CDS (1978)..(2277)
  unsure (1)..(3416): unsure at all n locations

SEQ ID NO: 994 - DNA, 3416 bp, Xenorhabdus sp.; identical to SEQ ID NO: 990
  CDS (2385)..(2933)
  unsure (1)..(3416): unsure at all n locations

SEQ ID NO: 995 - DNA, 3416 bp, Xenorhabdus sp.; identical to SEQ ID NO: 990
  CDS (2930)..(3415)
  unsure (1)..(3416): unsure at all n locations

SEQ ID NO: 996 - DNA, 607 bp, Xenorhabdus sp.; identical to SEQ ID NO: 449
  CDS (2)..(316)

SEQ ID NO: 997 - DNA, 4006 bp, Xenorhabdus sp.
  CDS (47)..(313)
cctcaaaacccctctgaacacggactggaacggtagaacaacaccgatggaacaatatcgccaggataaaagcacaatgctgctggctcttatcgttggattggcaactcacggcactttttcagcattttttaattcggcggtacctttttcaattttcccgattatcacacttgcactatctttgtattgtttccatcagcgttatttaaattatcctatggctgagggattaccaaaactggcatttggttgtttcttcttacgcctttttgcctataacgcaattattcgggttaaccatccggaattggctctaacttcctgtctgttgtggttggaacggcattagtcttctggctttacaggaagataaaagggcgcagacaacaggcaactctgtcagaaaaacataactgatgactgtttgagaaacatgttatgaaaacgccataataatcagttatggcgtttgtaagataaaaacgggttagtaataacaatagagttaatcgattttttccagtaataccccacactccatatggtgggtataagggaactgatcaaaaagagccagcttgctgactttgtgggtttgcgacaatgtttccagattctggcagagcgtttccgggttacaggaaatgtacagaatgcgtgggtatccctgtaccattttcaccgtttcctcatctaaaccactacgcggtggatcgacaaaaatggtttcacactgataactcttcaggtcaattccctgaagacggttgaattcccgctctccattcattgcctgagtgaattcttctgcggacatacggataatctgtacgttatcaatctgattggcttcaatattaaactgagcagcagcaacggaaggtttagcaatttctgtcgccagcacacgcacaaagttctgagccaatgccagagaaaagttaccattaccacaatacagttcaagtaggtcgcctttggcgtctttggtgctgttaatcgcccactccagcatatggatattgatactggcgtttggctgggtaaagctgttttcaacctgccggtaagtcattgtcttaccggcaacaggtagctcttcatctatatagtcatgatcaagcataattttggtttttgacgcacgaccaataagctgaacatcaaagccttccgcttttagctgagcccgcaatgcagttgcttgttcacgccattcatcccccagttttttatggtaaaggagggaaacaatgattttgttgctgcgagtggcgagataatcagcctgaaacagtttgtggcgcaatactgaattattttttacgccggcaataatggcctgcatcatgctattaatgagttggcaggctacgggaaactgatcaatccggatacgctgcttagtttgttgatcaaacataatgtggtagaggtcatcttcctcatgccagatacggaattctgcacgcatcctgtagtgagatgcgggggaacggaaaacttcaggctcgggcgcactaaaggaaaccatcatttctttcagacgatggactttctccatcaattggttttcataatcttccgttggcaagagattctgcattatctggttctcgtatgatcacattaagaaaaatttccgagcggcattgtagggaaagtacaaaggatgtccagttttctggttcattacccggcttttttgataggaaggtattctggactctattcagccttcatcgtagcatggctctttaatagtaagacgccattctctcccatgataaataaaaaacacacttttatatccgccactttcatggtggtgttttctggctggagcaatttctccgccgcagataatcaggactcgctggtggtgacagccaaccgctttaaacagcccgtttcttctgttctggcaccagtaacgatagtgacccgtgacgaaatagacagttggcagtcaaatagcttggttgatgtactgcgccgtttaccgggagttgatatttctcaatatggtggaatagggcagagttcttctttatttatacgcggttcagattcacgccatgttttgattttggtcgatggcattcggttaaatcaagcaggcattacaggctcttctgaccttagccagatcccgcttagtttagtgcaaaaaattgaatatattcgcggtacacgttctgctgtatatggctcagatgcgattggaggagtactcaatatcatcacaacgcgagagcagcaagggacgacactcaatgcaggggtcggttcgcatggataccagaattacaatggttcaactcagcagaaattgggtgaagataccgcactgagtgccgcagcgagctatacctataccaaaggatttgatgtggtggcgggtagagggaccaacgagccggatcgagacggatttatgagtaaaatgctatggctgggcattgatcataaatttaatgaccaactcagcggatttgcccggacatatggctacgataatcgctcaatctatgagggatcctttacggatactcgaaagttatttagccgtagttacgaaacaggaattctttttaatcgggatatctactcatctcagcttattaccagttatagccatgttaaagattacaattttaagcataagatctataagggaaacacaacgctaagtgactcgaagcaatacaatgttcagtggggcaacagttggcagataggccatggtgcgattagtggaggggtagactggaaaagagaatctgtagccgctggttccaactatattcctgtacaaaaaagtgttgataacacaggcgtgtatttaacgggtcagcagaaagtagatgattttatttttgaaggagcggtgcgctcagaccgtcattctgaatataactggaacatgacttggcaaacaggagcggcttgggaattcattgatggctaccgttttgttatttcctatggaacagcgtttaaggcaccaacacttgggcaattgtatggctggggagctaacccgaatttaaaaccagaaaacagtaaacaatgggaaagtggaattgaaggattaaccggagaccttagctggcgtttctccatttatcgtaatgatattgatcaattgattgatttttccaataaccgctatttgaacgtaggacaggtaaaaattaaaggcgttgagtggacgggaatgatggataccggcatattccaacaccaattaacactacagtatgttgatccacgtgataacaataatcagcaattaactcgcagagcgaaacagcagttgaagtatcagttagactgggagatctgcaatatcgattggggaatcacttatcaatatattgggcagcgttttgatcaggattttaatacatccccttcgaagagaataaaattaggcggtgtcagtctatgggatatcaatgggtcttatccagtcactgaccgtctgacaatccatgctagaatagctaatctgtttgataaaaattatgagacagcgtatggctatcgcactccaggacgagaatacttcatcacaggcagttacaacttctgatttaactacattcgatataaagaaaaccgctcgcccgaccattctggtatttgattccggtgtgggtggtttatctgtatatcgggagattagacaattgctgccggatctccactatatatatgcattcgataatgaagccttcccctatggcgagaaaacggcagaagtcattattgagcgggttgtcaaagttgttgatgaaatccagaaaaggcatccattagcaattgtcgttatcgcctgcaacaccgcgagtactgtcagccttccagctttgcgtgagcgtttttcttttcctgttgtgggtgttgttccagctatcaaacctgccgcgaagctcacttgtaaccgcgtagttggactattggcaacacgggcactttagagcacatggatacgagc

SEQ ID NO: 998 - DNA, 4006 bp, Xenorhabdus sp.; identical to SEQ ID NO: 44
  CDS (2398)..(3498)

SEQ ID NO: 999 - DNA, 4015 bp, Xenorhabdus sp.; identical to SEQ ID NO: 168
  CDS (2735)..(3442)

SEQ ID NO: 1000 - DNA, 4015 bp, Xenorhabdus sp.; identical to SEQ ID NO: 168
  CDS (976)..(1455)

SEQ ID NO: 1001 - DNA, 4015 bp, Xenorhabdus sp.; identical to SEQ ID NO: 168
  CDS (1674)..(2369)

SEQ ID NO: 1002 - DNA, 4015 bp, Xenorhabdus sp.
  CDS (3306)..(3533)
aattccagctttaatatttttcgcttgaaactgaatcttacactgggatccaaaaaatatgaaaccttattcactgattttatcatgccttttagatgattttttctttcacttgataataatcttttattttttaaaagtgctctacagcatgagtagtaataatgcttttatatttttcatcaaaaaaattattcatatgtataatcgcatcagccataatattgactttgtcaggattaatatcatttgataagctaccagtccgttttatatagttataaaatacaggatttgttataaaaataaccttatcttttttctattggaaaaataaaaaaatctggaatatatttttaataaaactccaaataaattacttatcttagctctagaatacaatttatattgcttggctattaatacatcatggacataccctctatcttttggagccaacaataacattactcccactgctatttttttcaatattttatttagtttaataatttcataacctgatagcttattcctcaagtttatttttgccaaactattaaagtccacttcaatacctaaataaggcattaatttgaattgagattcagctgaataaagtaacttctcattataataatcgtcccttaccttttcaggatgcactctgtattttaataaaatatcgggaagattaataaacctatagccttcaccaattgttaataaaaataaacttacccataatccataatcttgtgcttttttataattttcaggataagaagcccctaatttcagaaaagtctcttttcttatcattacagtaggatgatagaaaggacagtcaaatgcaatgcaggatattatttcttcatgacttaaaggtggaattttattattacccagttcttcatgaatgctcatagatgtaccacaaacaataatatcagtatgctcaaccataaaatcatattgctttttgagtctatctggaaatgaataatcatcagcatccattctggctatatactcccctctggataaagatatcgccatattcaaagatttagcaagccctatattataggcattcgtgataatttttattctgctatctctcttttgaaactcaaagagtacctgatctgtattatccgttgaggcatcattaactatgataaattcataatcataaaacgactggctgagaattgactctacggcttcagacaaaaattcacaaccattgaaaacagacattattacagatatcttaggaacatctttattcatgaaacaaacccttatattaaatgtaacaggagttaccagattaagtcttttatttaatctttctttgtaaattggttttgcaacaaattcagggaataaatcacatatatggtagaaaaatttatttcttaacatcttgagatattcttcatatagataaattctttatcacagatagaaaattaaaaccaactttaatatctgattaaatttccatattaatatcgttatatataatatcataatattcttaaacgtttactctataagagcaaattaataatctttacactacatagaaaaatgccacgctatcgcatggcatttaataaaagaacaacatttatcatttactcatttttttgcaataaccatctatatatcaaaccgccaataattccaccaatcaagggagtcagccagaataaccataactgatctatcgcccaggttccttggaaaatagccactccggtacttcttgcagggttaactgatgtatttgtgacaggtatactaattaggtgaattagagttaacgctaaaccaatcgctaatggcgcaaacttaattgatgcatttttatctgttactccaaaaatcacaatcagaaaaaatgcgcttaataccaactcaatgataatggcagattgtaatgaaaatcctccaggagaatgttccccatatccattggaagcaaaaccgctttccgtcgcatcaaaatcactctgaccactggctattaaatacaataccgctgcggccgcaattccgccaatcacctgaacaataatataaggaatgacatctttggctggaatacgtccaccaacaaatagacctaatgttactgccggattaaaatgccctcctgagatatgaccgacagcatatgccatagtcacaactgttaaaccaaaagccagtgatactcccacaaaaccaatcccaagtattgggaatgccgcagctaaaacagcacttccacaccctccgaacactaaccaaaaagttcctaataactctgccgataattttttaaacattatatgattcctcaacgatacctgcatgaatgcaaaagaatccaaacaaagtttagttagtatttttaaatatgtgcaaggatccgtcagcagaaaatagatgacaagaaaatacggagagtaatgatttcaataattagaaaagatgtatttaatcgacataacaacctgagtttattgatattaaactcaggttgttgagttacttaattagtaatttatttctctactgatgcattgatcttatctgatgtctgccaaatacgatatttaacttttatcgtcttcggtgtatataccacgattggtaatttactgttataacgtacaaatgcatccttatctaaattcactgtcacgaacttcatggtttttttctgatcagcacaggccattttagttgacattgggccagctactttatccaattcataataattgtatccccaaccatcaatatttttggtttcaagatttccaccaaaccagtgatgattgcaatctaccatcatacttttgccaatcatcaattcgaccatgtaattattttcgtccttttcaggtgctagcgtaattacactgcgaaccatgccctctgaaggttcagggaatggagccagatcatcagttttatcagcctgggcataaaccgaaacgctcatagcagctaaggcaagtagatactttttcattttttcacctcttggtatatttaacaacgcaagagaatcataacagcgaaaattcagtaataaattatgcttttttagcaaggcactgatttttagcactattattttaaaagaaaataacacctccttcagtgtagaataaatttacattaacaatcatagagatacgccatttttataaaatattttttatgtgatatctctcaaatctggtattacaatgggctgctacactcatagtgtggtagtaaacttcgtaattggaggtcccatgtttccagaatttgcagaagatcgtgatttagtatccaacctgaaagactcccaccctcgtttccaatccttgtttgaaaaacataaccgccttgaccatgaaatatcgcagcttgaaggcccgaatggggctggctataacgaaaaagtcgtgcgattaaaaaaagaaaaactccatataaaggatgagatgcaaaggattttacaggcggaatctcagaagtaatcctgccatagactgacgcctgctacgctgaaaagcgggcgtcttatgaagacatcggtttttattgtgccaccatcatagggttctcaataagagaactttaaattatcaatatccataaaaaagccaccataaaggtggcaaaaactggagcaaggttttttattatttattgggtgacagcagcttgtggcgcagctttctggcgaggttgtctcttagtttttgccctcggatgcggcgtaacactttcaacatcgcctggcttagaaataaagcgcacaaacgtttcatggctgacgaacgttgccccacaattgatattctggcattggttatagcgctcttttgtttggcttgaatgctcaaagctactacgggtatgcgctgattgattacaaagaggacacttaatcataattgttcacctttcttgaaagcattgttcttggaataacagtcttgaaataacaccatctcgt

SEQ ID NO: 1003 - DNA, 4716 bp, Xenorhabdus sp.
  CDS (203)..(880)
tatgtttacctgcgggatttcctactcgcactttagctttctacttgtacgctgaacaagtccgatcagggtggaatatcgtggaacaattgatcacactcagttcttaagatcctcaataggtggtgtaacagcatcaagaccgttaaaatcccccattattattcgcaaaaatacaggtcttattttgaaaaacagtatcgtgaaaaatagtgctatcagtagcgcgaccctcagctggaatgaacagggtacacctatctctgagcagtttgatgatgtttatttttcaaatcaagacgggttggaagaaacggtatatgtatttctgaaaggcaatcattttcctcaacgttttagcacacatcctcgttctgattgcgttattgctgaaaccggatttggtacagggttaaattttctggcgatatggcgcgctttctcagctttcaggcagcagtcacccgatgccacgttaaaaaggctacattacattagctttgaaaaatatccattaaaaatcgcagatctaaaaaatgcccatcagcgctggccagaacttcagccattctctgaggaattatgtcaacagtggccattaccactctcaggttgccatcgattaattctggataatggtgctatcacgctggatctttggtttggtgatgtaaatgagctattacccaagataacttctggcctgaacagtaaaattgatgcatggtttttagatggttttgccccatctaaaaatccacaaatgtggagccgaacaactgttcacttcaatggcaaaattttctcgtccggaagggacatttgcgacttttacttccgccggtttagttcgccgtggattacaggaagcaggctttgatgtcaaaaaaataaaaggtttcggacgtaaaagagagatgctgacgggcactttacttcccacagctcacaattccagttctgataccccctggtttacccgccaaagtgcaacatatactgatgatatcgccatcattggcggcggtattgccagcgcactcactgccctagctttattgcgtcgtggcgcaaaagtcaccctatattgtcaggatgaacaccccgcacagaatgcgtcaggtaatcaacaaggcgcactgtaccccttactgaatggacagaatgatccactagagcgcttttttacctccgcatttacctttgcccgtcaccagtacgatcacctgactgatcagggcgttttatttgaccatcagtggaatggagttagccagctggcctacgatgaaaaatcggataaaaaaatctcagggatactccagacagtatggccagaagaaattgctgttgaaatggatcgccagcaactgagtcagattagtgggctggatgtcaattatcatggagttcattatccacaaggaggatggttatacccggggaaactgactcaggaagccatcaaactcgcacaacaacgtggtatgtgtacgcattttaaccataaaataatacggctggctcaatatgaaaacggctggcagctacatattgaacatcaggggcaagtgcagcttaaaacccataaagcggttgttattgccaacgggcactgtttgccacaatttgaacaaactgaaaagctcccagtgaccgctgttcgtgggcaggtcagtcatattccaactaccgagcgtctcagccagctaaaaagtgtgctctgttacgatggttatatgacgcctgtcaatccacacaatcaatatcactgtattggtgcaagttaccaacgtaattttctggatattgagtattcctccgccgagcaacaagaaaaccgagaccgtttattgaagtgttttcctgatgttgaatgggtaaaagaggttgatatatcagaaaataagtctcgtcagggaatacgctgtgtcattcgggatcatatgccaatggtgggtaatgtgcctgttctcaaagagattatggaaaagtatgccaacttgccccaacaaatgcagtccggagagaaaattgatgagtccccctgttatcctgacctgtttgttattggtgcattaggatctcgtggattatgctctgcccctttaagtgctgagttactcgcaggacaaatttttggtgaagctctaccgcttgatgatgaaacattagcagctttaaaccctaatcgcttctgggtcagaaaactgttacgtggaaaaaaggtaaaaaccgaaaaaccttaaattacactgatgccacacagcaattaaagaagccaatctccagtcacgtagataaattatgtgactgggggaatgattaataacagaatgacaattggctcatataatcatagggcgtttcatagcacaacgctgttctgccgaaaaaccatattcaatttcactttgcaaaatctgttgtaattcctcacccatttcctgcggttccaggataacaaaccccagtttttggtaaaaaggcgcattccaaaggatattacggaaagttgttaaagttaaagactgtaattgacgttgttcagcaacttgaataactgtttccattaatttcttgcctatgccctttctttgccaatccccatgcacagacagttcaaaaatatgtaacccgtcctccagaggtttcgccagaataaaacctacaggaatacccttatgatttattgcaacccagctattgtgttgtgcaatatagcccgaatgttgttgttcagtctgtacatggccatccgaaatccaggctaattcaggtatgagacaaaatagttgcgcagcggaatgttcaattatagctaactgatttatatctgataactgtgttggccgaatagtaaacattataccacctcggtaattattcaggatggaagcatcaatttcattgcagcaataataataccagaaaaaccaaacatcattgttaccatccattttgtctgggatgttattttctctaatagcgtcttatggatagatgccatttctttattgacagatgcaatctcagtatggataagtacctttacggattcaatatcagcattagttgcataggtattttttataattcctacgtctatttttagctcagttacatctgattttaactctgctacatctgactttaactctattacgtctgtttttaattgtgttacatctgtctttagctctgttacatctgtttttaattgtgttacatctgtttttaactgtgttacatctgtttttaactgtgttacgtctgtttttaactgtgaaacatctatttttaatgtgaaacatctacccccatattttcaaatcttttttctaatattacattcatttccattctccctgtcaggttgaaactactaaaacttatcgattcaggtaaaaaatactttttatattgctgattgtgatccccatattccctttgaacaacattgtcctcaattctcatataccacctccgaaatatcctttttctattctgtgtttttacagagaatttatattcattgtttttaaataaccaataaatgattacattttaaatttatacattggcaataaatttaaaacatatttttcataatgctctagactttatcaccattaattttttaaatcatcagccgttccactaataacagaataaaagcccaaagaatatatataacaaaatcattaaattacgcaggaacgtaactttaatatataaaaaacaaatcttactacccaatgatcttactttatttctttcataaaagaacatgcaatatttgcgattgtcttttatttatcattaattgcgaatcgctacgcatttccatgtaagagagggctgtaaaacaaccctcaaaataacgtcagaaaattatgctctcgcactatccagtagctttttccaggtcgataaaatcaaaacctgatccggtggtgtcaattcgccagccttaattgctttctgaacgctttcctctacacgctgatgaagctgttcaatagtattagcaccttccagttccagttcagcaacggccagtgtcagatgcccgcgcaggtatccaccagcaaataattcgtcatcactggcatattcaaccatgtcatctatctgtgccagaatgcgtgtttcaaactctgcgagcattgtttttcctcaaaaatcaaatcagtgagcaaaaggattttccgggtcaggaaaatattctgcctttagtggaggggtattgtaaaacgattgcagggcacgaataaagcgcgccgcgcgtagggggattccattttcaaggtatgtgatgacctgagcatgaactttctgctgaaaagcaaaacgatccggttcaaaatcaccgtccagattatcgcaactaatgttgaacggaaagccggcagccatacagaataaccactctaacgcctgaggtttaatttcgactttttcaaattcagcctgagtttgagcatcgcggccatcgggacaataccaataaccaaaatcaaccaatttacgacgctctgctcctgcaatgcaccaatgggaaatttcatgtaatccgctggcataaaagccgtgggcaaatacgacccggttataaacttctttatcatctgcgggtagataaattggctcatcatcacctttgatcaaacgggtgttatagccatcgctaaagcaattatcaaaaatttcaat

SEQ ID NO: 1004 - DNA, 4716 bp, Xenorhabdus sp.; identical to SEQ ID NO: 1003
  CDS (1356)..(2249)

SEQ ID NO: 1005 - DNA, 4716 bp, Xenorhabdus sp.
  CDS (2144)..(2368)
attgaaatttttgataattgctttagcgatggctataacacccgtttgatcaaaggtgatgatgagccaatttatctacccgcagatgataaagaagtttataaccgggtcgtatttgcccacggcttttatgccagcggattacatgaaatttcccattggtgcattgcaggagcagagcgtcgtaaattggttgattttggttattggtattgtcccgatggccgcgatgctcaaactcaggctgaatttgaaaaagtcgaaattaaacctcaggcgttagagtggttattctgtatggctgccggctttccgttcaacattagttgcgataatctggacggtgattttgaaccggatcgttttgcttttcagcagaaagttcatgctcaggtcatcacataccttgaaaatggaatccccctacgcgcggcgcgctttattcgtgccctgcaatcgttttacaatacccctccactaaaggcagaatattttcctgacccggaaaatccttttgctcactgatttgatttttgaggaaaaacaatgctcgcagagtttgaaacacgcattctggcacagatagatgacatggttgaatatgccagtgatgacgaattatttgctggtggatacctgcgcgggcatctgacactggccgttgctgaactggaactggaaggtgctaatactattgaacagcttcatcagcgtgtagaggaaagcgttcagaaagcaattaaggctggcgaattgacaccaccggatcaggttttgattttatcgacctggaaaaagctactggatagtgcgagagcataattttctgacgttattttgagggttgttttacagccctctcttacatggaaatgcgtagcgattcgcaattaatgataaataaaagacaatcgcaaatattgcatgttcttttatgaaagaaataaagtaagatcattgggtagtaagatttgttttttatatattaaagttacgttcctgcgtaatttaatgattttgttatatatattctttgggcttttattctgttattagtggaacggctgatgatttaaaaaattaatggtgataaagtctagagcattatgaaaaatatgttttaaatttattgccaatgtataaatttaaaatgtaatcatttattggttatttaaaaacaatgaatataaattctctgtaaaaacacagaatagaaaaaggatatttcggaggtggtatatgagaattgaggacaatgttgttcaaagggaatatggggatcacaatcagcaatataaaaagtattttttacctgaatcgataagttttagtagtttcaacctgacagggagaatggaaatgaatgtaatattagaaaaaagatttgaaaatatgggggtagatgtttcacattaaaaatagatgtttcacagttaaaaacagacgtaacacagttaaaaacagatgtaacacagttaaaaacagatgtaacacaattaaaaacagatgtaacagagctaaagacagatgtaacacaattaaaaacagacgtaatagagttaaagtcagatgtagcagagttaaaatcagatgtaactgagctaaaaatagacgtaggaattataaaaaatacctatgcaactaatgctgatattgaatccgtaaaggtacttatccatactgagattgcatctgtcaataaagaaatggcatctatccataagacgctattagagaaaataacatcccagacaaaatggatggtaacaatgatgtttggtttttctggtattattattgctgcaatgaaattgatgcttccatcctgaataattaccgaggtggtataatgtttactattcggccaacacagttatcagatataaatcagttagctataattgaacattccgctgcgcaactattttgtctcatacctgaattagcctggatttcggatggccatgtacagactgaacaacaacattcgggctatattgcacaacacaatagctgggttgcaataaatcataagggtattcctgtaggttttattctggcgaaacctctggaggacgggttacatatttttgaactgtctgtgcatggggattggcaaagaaagggcataggcaagaaattaatggaaacagttattcaagttgctgaacaacgtcaattacagtctttaactttaacaactttccgtaatatcctttggaatgcgcctttttaccaaaaactggggtttgttatcctggaaccgcaggaaatgggtgaggaattacaacagattttgcaaagtgaaattgaatatggtttttcggcagaacagcgttgtgctatgaaacgccctatgattatatgagccaattgtcattctgttattaatcattcccccagtcacataatttatctacgtgactggagattggcttctttaattgctgtgtggcatcagtgtaatttaaggtttttcggtttttaccttttttccacgtaacagttttctgacccagaagcgattagggtttaaagctgctaatgtttcatcatcaagcggtagagcttcaccaaaaatttgtcctgcgagtaactcagcacttaaaggggcagagcataatccacgagatcctaatgcaccaataacaaacaggtcaggataacagggggactcatcaattttctctccggactgcatttgttggggcaagttggcatacttttccataatctctttgagaacaggcacattacccaccattggcatatgatcccgaatgacacagcgtattccctgacgagacttattttctgatatatcaacctcttttacccattcaacatcaggaaaacacttcaataaacggtctcggttttcttgttgctcggcggaggaatactcaatatccagaaaattacgttggtaacttgcaccaatacagtgatattgattgtgtggattgacaggcgtcatataaccatcgtaacagagcacactttttagctggctgagacgctcggtagttggaatatgactgacctgcccacgaacagcggtcactgggagcttttcagtttgttcaaattgtggcaaacagtgcccgttggcaataacaaccgctttatgggttttaagctgcacttgcccctgatgttcaatatgtagctgccagccgttttcatattgagccagccgtattattttatggttaaaatgcgtacacataccacgttgttgtgcgagtttgatggcttcctgagtcagtttccccgggtataaccatcctccttgtggataatgaactccatgataattgacatccagcccactaatctgactcagttgctggcgatccatttcaacagcaatttcttctggccatactgtctggagtatccctgagatttttttatccgatttttcatcgtaggccagctggctaactccattccactgatggtcaaataaaacgccctgatcagtcaggtgatcgtactggtgacgggcaaaggtaaatgcggaggtaaaaaagcgctctagtggatcattctgtccattcagtaaggggtacagtgcgccttgttgattacctgacgcattctgtgcggggtgttcatcctgacaatatagggtgacttttgcgccacgacgcaataaagctagggcagtgagtgcgctggcaataccgccgccaatgatggcgatatcatcagtatatgttgcactttggcgggtaaaccagggggtatcagaactggaattgtgagctgtgggaagtaaagtgcccgtcagcatctctcttttacgtccgaaaccttttatttttttgacatcaaagcctgcttcctgtaatccacggcgaactaaaccggcggaagtaaaagtcgcaaatgtcccttccggacgagaaaattttgccattgaagtgaacagttgttcggctccacatttgtggatttttagatggggcaaaaccatctaaaaaccatgcatcaattttactgttcaggccagaagttatcttgggtaatagctcatttacatcaccaaaccaaagatccagcgtgatagcaccattatccagaattaatcgatggcaacctgagagtggtaatggccactgttgacataattcctcagagaatggctgaagttctggccagcgctgatgggcattttttagatctgcgatttttaatggatatttttcaaagctaatgtaatgtagcctttttaacgtggcatcgggtgactgctgcctgaaagctgagaaagcgcgccatatcgccagaaaatttaaccctgtaccaaatccggtttcagcaataacgcaatcagaacgaggatgtgtgctaaaacgttgaggaaaatgattgcctttcagaaatacatataccgtttcttccaacccgtcttgatttgaaaaataaacatcatcaaactgctcagagataggtgtaccctgttcattccagctgagggtcgcgctactgatagcactatttttcacgatactgtttttcaaaataagacctgtatttttgcgaataataatgggggattttaacggtcttgatgctgttacaccacctattgaggatcttaagaactgagtgtgatcaattgttccacgatattccaccctgatcggacttgttcagcgtacaagtagaaagctaaagtgcgagtaggaaatcccgcaggtaaacata

SEQ ID NO: 1006 - DNA, 4716 bp, Xenorhabdus sp.; identical to SEQ ID NO: 1005
  CDS (547)..(822)

SEQ ID NO: 1007 - DNA, 4716 bp, Xenorhabdus sp.; identical to SEQ ID NO: 1005
  CDS (1)..(525)

SEQ ID NO: 1008 - DNA, 3802 bp, Xenorhabdus sp.; identical to SEQ ID NO: 171
  CDS (1290)..(2039)

SEQ ID NO: 1009 - DNA, 3802 bp, Xenorhabdus sp.; identical to SEQ ID NO: 171
  CDS (2553)..(3800)

SEQ ID NO: 1010 - DNA, 4833 bp, Xenorhabdus sp.
  CDS (3342)..(4469)
tgctctaaagataacgctctggcaccttcctgcccaatccgtttttcgaaacaccaaatcgtgttacggtctggaatattaatgacatcggtcaagcgacaaaaacgttgccagctcattcggtcaagcaattgatattccattttttcatcggaaagattatggaaatgtttcaggataatgatgcgaaccatcacctccgtcgggaatggcgggcgtccccctttgggggaaataatacgtgggacgatacggtctagggtgtcagccagtgccgagaaatcaacatatttatcaagaacaagcagcggatcacctaattcatcgatttttcgacggtgatattcggatgcctgtttgtctttttttaaagcagaacgaggcggtatcatgatggcgctaccttgcagagaggtactgtgcctacattttactcaattttgtggctgtgaaaagtttttagaggttcccttctggcaaacacctgaaaccatcgcttcagcttctgaaataaatcgttcattcatcactcaaacattgaatgccatcgaaccgtatgttgctaaacaagcactgcgtacttttcaaagcggggagaacattattcccggcatcaaagcaatatcgacttctggtcataccccggggcatacttcatacctgctgaattcaggtaaaaataacatgttgatattaggggatatgatacatttttacgcagtacaattggaacatccggaagtttcgattgaatttgatatagataataataaagccattgaagcacgcaaatcgatctttaaaaaagcgtcagatgaaaaatggctaattggtgccgctcatttgccattcccggggataggtcatcttcgtcagaatcaacaaaaatatgactgggttcctgttgaatatacaaccactctgaaagtaaataattaacaatagaatggagggaaagatttcgagcttcccctccatgaacaaataataaaacaatgaatctttaatcagccctctgcttttctgatagcctcatccaaatcattaacagtgaggtcagcattaatatattcactattatctggcagatgaatctttatattctgttttggctcataacttaacaggccactttgcaactcaaaatcaaaaacatgcccaccattttttcgttcatcatcgataaaatgaatatgaaaccccgcaacagaaataccgtgaaaaatatcaggcgaccaaaaaccaaccaacacaccagagacattgtgtaatgtttcttctgattgttcgacaatcgcttcaataaaagtcttatagggctttttctgataattagtccgacgtagccagacctttttaaatattccttcaatttttacagcagcaaaaatattattaatatttacctgagccgataattctgagtaaagatcttttttgctgatatccgaaacgggaaactgctcactgggattaaagtatgtcaactgagcaaaaggaagctggtcatactcactaaaccgacgtacattacctgccccctgaatttcaaaaaaggtatcatccagtgcgatcatttcacctgcgagcgcatgtgagcaaccaataccaaatgagccgccttgactgatttctgctattgcaaacattccatcaaatacccctgacatcaaagcatgcatggtggaatactgatttataatcaggctcttcatatggcctctcccttgctattatcagcaatttaaaatctattggttatattagatatatcttagatagatcaaataataactttagaacattgacatgtcatagattaatatccttagcactcagtcattgtcaagataattatattttctattgaattatttaatccccaataaaaaaccataacaaaacaacttaatttattttatcttaatattttagtaattatatttaatcagtgtaaatactgatgacataacacgctgtttttaacctcaactgacattactcatttatatattcatctaacgatatattaatttatttttatattacattttgagtaaaaaattaccactattaaactgagttttatattcaccgtataaatagattaaaactattgcatacctccttatattattagtattatcagccgcatatttaattatcgtctttattttacggattattcatgaataaaatttgtgtattattactctccgctgtgatgctttgcagcggctgtgcgactatcgttggtgaaaagactcagcttgtccaaattaatagccagccttctggcgcagaattttcaatcaaagatgaaaccggtcaggaaattacacgtggtaacactccacaaagtgtcatgctggcaaaatcaaccggccactattttggcggcaagacatatcaaattaccttcacaaaagaaaattttcaatctgttaccctgccattaatcgctaaagcgaatggatggtatatcggcgggaatttcgtctttggtggtttaattggctggctggtcgttgaccctttcaatggcggtatgtacacactgcacccaaaagcagccaatgtgacactacctgcatccaatacactatcagacgctaaataagtgtcaaaatatggcgatttaagtcgccatattcactccgattacttatgggggtaatgaatcagattatggataaccacaacctcatcacctgaattcgcgtaagcatggctgcaatcagcagaaaaacgcatagattcaccggatgaaactttatgccattcatcattgatacgcagatctaactctccattaagcacaataacatgctctacgacaccggactcatgaggagtagattcacttgaggctcctggcgctaattctattttgaataaatcgatgaaaaattcatcatcaaaaggaatgagcggttttacactcatacctgaattgttttgttcaaagctcggtaagttattaaaccgatgcagtacagtctgtggcgtagttccttccagaaaagtcgaaaacgcaacattaaaacctgttgcaattttccacaatgtggacactgtcgggcttgactggcctcgttcaatttgcccaagcattgctttactgacgtcagtcagcttagcggcctggctgagactcactcctcttgaagctcttaatgacttaaacgtctcggcaattttagatgtgatatcactcattggtgccttctcaaagatgaatacatgattgaatgctataacggacgatgttattctcaccaccgtctgctataacatccgataggtgacaccatatgcctaagcaatcattttttagggatctctccccatcaactctcgttacaggttttgttgccgtattagttggttatgctagttcagttgccatcattctccaagcagtgacgaccattggtgttgaaccatcacaaattggtgcctggttaggcatgcttggcgttggaatggggatcacaacaattggattatcactttattaccgcacacccattctaacggcttggtcaacaccgggaattgcactcttggcaacacatttcccgcacacttcagtcaatgaagccattggcatttttgtctttgcatcagcattaatgctgatatgcggtatcaccggattatttgccaagctaatgaactacattccgcattccatcgcagccgcaatgcttgccggaatattactccgtttcggtttggatgctttttcagtactgcaatccaatttttggctgtgtggcatcatgctgcttatttacgtaatcttccgccgttattttccattatacgcaataatctcaacgcttacggcagggttaattatctgtattttcaatggcgatttaaacttaacaggcaaagacatcctgttttccatgcctgaatttgtcatgccaaaatttaacatcacgacactgattggcgtaggtattccattttttatcgtcacaatggcctcacaaaatgcaccgggaattgcgatcctacaagctggggggtatccaccccgtacatctcaattacttatctggacatcattggctacaattatactggctcctttcggaggatttagtatctgtattgcagcaattacagccgctatttgtatgggagatgacgtccatcccgatccagataagcgatatgttgccgctatcagcgcaggatttgtttatttactggccgggatttttggtggagtcattttctatctatttagtggttttccgacttcattaataaaaattctggctggattagccttattaagtacttttaccaatagcctaagtcaggcaataaaggatgaaagcgcaagagatgcagcaattatctgttttttaataacagcatcaggcgcaaatttactgggtatcagttcagcattctgggggctggttggcggaattattacacaccttatatttaaaaaaagactcggaggtagagtgacattgcaatctaaatgacttagtcctcatattgctaaatatgccagatattaatttagctatttacatttaggcgtgatccaacctaaatattaacttttatttttaataaatagctggatcttattatgtgattccagctcttatttctaaaaccagctcttttgtgatctatctcatgaaatgcaaatgatcatggtcccatcaaaactaccattttatttttttcattagtatcagtagattacaaatataaacaccttttccttatggatattaatcggttcgatgcactaatcatatccgctatataaagatattgttctttagagcacaa

SEQ ID NO: 1011 - DNA, 4833 bp, Xenorhabdus sp.
  CDS (1615)..(2172)
ttgtgctctaaagaacaatatctttatatagcggatatgattagtgcatcgaaccgattaatatccataaggaaaaggtgtttatatttgtaatctactgatactaatgaaaaaaataaaatggtagttttgatgggaccatgatcatttgcatttcatgagatagatcacaaaagagctggttttagaaataagagctggaatcacataataagatccagctatttattaaaaataaaagttaatatttaggttggatcacgcctaaatgtaaatagctaaattaatatctggcatatttagcaatatgaggactaagtcatttagattgcaatgtcactctacctccgagtctttttttaaatataaggtgtgtaataattccgccaaccagcccccagaatgctgaactgatacccagtaaatttgcgcctgatgctgttattaaaaaacagataattgctgcatctcttgcgctttcatcctttattgcctgacttaggctattggtaaaagtacttaataaggctaatccagccagaatttttattaatgaagtcggaaaaccactaaatagatagaaaatgactccaccaaaaatcccggccagtaaataaacaaatcctgcgctgatagcggcaacatatcgcttatctggatcgggatggacgtcatctcccatacaaatagcggctgtaattgctgcaatacagatactaaatcctccgaaaggagccagtataattgtagccaatgatgtccagataagtaattgagatgtacggggtggataccccccagcttgtaggatcgcaattcccggtgcattttgtgaggccattgtgacgataaaaaatggaatacctacgccaatcagtgtcgtgatgttaaattttggcatgacaaattcaggcatggaaaacaggatgtctttgcctgttaagtttaaatcgccattgaaaatacagataattaaccctgccgtaagcgttgagattattgcgtataatggaaaataacggcggaagattacgtaaataagcagcatgatgccacacagccaaaaattggattgcagtactgaaaaagcatccaaaccgaaacggagtaatattccggcaagcattgcggctgcgatggaatgcggaatgtagttcattagcttggcaaataatccggtgataccgcatatcagcattaatgctgatgcaaagacaaaaatgccaatggcttcattgactgaagtgtgcgggaaatgtgttgccaagagtgcaattcccggtgttgaccaagccgttagaatgggtgtgcggtaataaagtgataatccaattgttgtgatccccattccaacgccaagcatgcctaaccaggcaccaatttgtgatggttcaacaccaatggtcgtcactgcttggagaatgatggcaactgaactagcataaccaactaatacggcaacaaaacctgtaacgagagttgatggggagagatccctaaaaaatgattgcttaggcatatggtgtcacctatcggatgttatagcagacggtggtgagaataacatcgtccgttatagcattcaatcatgtattcatctttgagaaggcaccaatgagtgatatcacatctaaaattgccgagacgtttaagtcattaagagcttcaagaggagtgagtctcagccaggccgctaagctgactgacgtcagtaaagcaatgcttgggcaaattgaacgaggccagtcaagcccgacagtgtccacattgtggaaaattgcaacaggttttaatgttgcgttttcgacttttctggaaggaactacgccacagactgtactgcatcggtttaataacttaccgagctttgaacaaaacaattcaggtatgagtgtaaaaccgctcattccttttgatgatgaatttttcatcgatttattcaaaatagaattagcgccaggagcctcaagtgaatctactcctcatgagtccggtgtcgtagagcatgttattgtgcttaatggagagttagatctgcgtatcaatgatgaatggcataaagtttcatccggtgaatctatgcgtttttctgctgattgcagccatgcttacgcgaattcaggtgatgaggttgtggttatccataatctgattcattacccccataagtaatcggagtgaatatggcgacttaaatcgccatattttgacacttatttagcgtctgatagtgtattggatgcaggtagtgtcacattggctgcttttgggtgcagtgtgtacataccgccattgaaagggtcaacgaccagccagccaattaaaccaccaaagacgaaattcccgccgatataccatccattcgctttagcgattaatggcagggtaacagattgaaaattttcttttgtgaaggtaatttgatatgtcttgccgccaaaatagtggccggttgattttgccagcatgacactttgtggagtgttaccacgtgtaatttcctgaccggtttcatctttgattgaaaattctgcgccagaaggctggctattaatttggacaagctgagtcttttcaccaacgatagtcgcacagccgctgcaaagcatcacagcggagagtaataatacacaaattttattcatgaataatccgtaaaataaagacgataattaaatatgcggctgataatactaataatataaggaggtatgcaatagttttaatctatttatacggtgaatataaaactcagtttaatagtggtaattttttactcaaaatgtaatataaaaataaattaatatatcgttagatgaatatataaatgagtaatgtcagttgaggttaaaaacagcgtgttatgtcatcagtatttacactgattaaatataattactaaaatattaagataaaataaattaagttgttttgttatggttttttattggggattaaataattcaatagaaaatataattatcttgacaatgactgagtgctaaggatattaatctatgacatgtcaatgttctaaagttattatttgatctatctaagatatatctaatataaccaatagattttaaattgctgataatagcaagggagaggccatatgaagagcctgattataaatcagtattccaccatgcatgctttgatgtcaggggtatttgatggaatgtttgcaatagcagaaatcagtcaaggcggctcatttggtattggttgctcacatgcgctcgcaggtgaaatgatcgcactggatgataccttttttgaaattcagggggcaggtaatgtacgtcggtttagtgagtatgaccagcttccttttgctcagttgacatactttaatcccagtgagcagtttcccgtttcggatatcagcaaaaaagatctttactcagaattatcggctcaggtaaatattaataatatttttgctgctgtaaaaattgaaggaatatttaaaaaggtctggctacgtcggactaattatcagaaaaagccctataagacttttattgaagcgattgtcgaacaatcagaagaaacattacacaatgtctctggtgtgttggttggtttttggtcgcctgatatttttcacggtatttctgttgcggggtttcatattcattttatcgatgatgaacgaaaaaatggtgggcatgtttttgattttgagttgcaaagtggcctgttaagttatgagccaaaacagaatataaagattcatctgccagataatagtgaatatattaatgctgacctcactgttaatgatttggatgaggctatcagaaaagcagagggctgattaaagattcattgttttattatttgttcatggaggggaagctcgaaatctttccctccattctattgttaattatttactttcagagtggttgtatattcaacaggaacccagtcatatttttgttgattctgacgaagatgacctatccccgggaatggcaaatgagcggcaccaattagccatttttcatctgacgcttttttaaagatcgatttgcgtgcttcaatggctttattattatctatatcaaattcaatcgaaacttccggatgttccaattgtactgcgtaaaaatgtatcatatcccctaatatcaacatgttatttttacctgaattcagcaggtatgaagtatgccccggggtatgaccagaagtcgatattgctttgatgccgggaataatgttctccccgctttgaaaagtacgcagtgcttgtttagcaacatacggttcgatggcattcaatgtttgagtgatgaatgaacgatttatttcagaagctgaagcgatggtttcaggtgtttgccagaagggaacctctaaaaacttttcacagccacaaaattgagtaaaatgtaggcacagtacctctctgcaaggtagcgccatcatgataccgcctcgttctgctttaaaaaaagacaaacaggcatccgaatatcaccgtcgaaaaatcgatgaattaggtgatccgctgcttgttcttgataaatatgttgatttctcggcactggctgacaccctagaccgtatcgtcccacgtattatttcccccaaagggggacgcccgccattcccgacggaggtgatggttcgcatcattatcctgaaacatttccataatctttccgatgaaaaaatggaatatcaattgcttgaccgaatgagctggcaacgtttttgtcgcttgaccgatgtcattaatattccagaccgtaacacgatttggtgtttcgaaaaacggattgggcaggaaggtgccagagcgttatctttagagca

SEQ ID NO: 1012 - DNA, 4833 bp, Xenorhabdus sp.; identical to SEQ ID NO: 1011
  CDS (3134)..(3826)

SEQ ID NO: 1013 - DNA, 4833 bp, Xenorhabdus sp.; identical to SEQ ID NO: 1011
  CDS (4640)..(4831)

SEQ ID NO: 1014 - DNA, 4833 bp, Xenorhabdus sp.; identical to SEQ ID NO: 1010
  CDS (2222)..(2620)

SEQ ID NO: 1015 - DNA, 4833 bp, Xenorhabdus sp.; identical to SEQ ID NO: 1010
  CDS (610)..(939)

SEQ ID NO: 1016 - DNA, 5677 bp, Xenorhabdus sp.
  CDS (4403)..(5482)
tgctctaaagtagctgtaaatagtgttttattgttctgttaattgtgaattcaagtaggttaataaatgtttacttgggatgttttgataaggaatggttttcttttgataagtagctcaagctcgatgagatataaattaaattagcttgaaccacttaaagaattaggggattatcgcaaatgaacgtaccgggaaccctgttgccttttctggtttagcgacaatattaaaaataatcgcgccacgagtaggaactttatctaaatttttcatgatttctatttgatacgtatcctgtgctaaaacgtaatactcgccgaggaagatattattatttctggcctctttcgaggagtcagtatcaaatgtttcgtgcccgatggcttttattttcctttcctcaaacagaaactttagtgcatctaatccccagccgggtgtctgattatttccattgatatctttattttccattttctcctgagaaggccagcgtttactccagtctgttcttaatgcaacaaaagtatcggcttcaataatgccatgctcggcttcaaaacagagaatatcttcttttgacaacgaaaagtcaggctcttgttctgcccgttctgatttgtcaataactattaatggtaataccagttcttttaattcaatcccattcaggaaacgaccatcaggaataaaatggcaggaggcatcaatatgcgtgccatattgcccgacaaaagtaaattgttgggtgaaaaagccatcctgataactaaataatgttttaatttgagcagggggaaacatagagaaatgaggagaatgttgatcaaagctgtgagtcagatcgatccattttttagattttaataaagtgagtgcctgtaaaatattattcgtcataaaaacctcatcttttttaattttttgaggatgacaggtgatatattcaatcgtcggtgactggggcagccaccgagattcgtttgttagtggatattaataattttttggggtgatatcaacataggtgggatcggtaaaagaacattcctcttcagaaataatcgacgaagcgataataatcactggtgatttattcttgtcaatataaggaatggtaacttctattgtctgggaataaagttcgccccaggctgaataagttatcggtaacttatttttttccagcaggtgtctgttaattaatattgaatttgcctgatgcttctccagctggttatttttcctaaccgcggcgtttataacctgataagctgcccaagattctgtcgtagcgcagtaatctaaattttcatttgtcgaagcgatgcctatcgttgggataaataacatcgtaaaagtgagaaattttttcatatcattccattgaatatattattttaaataataataaaatttgattgttcttccgcattctctttgcaagaaacagccgttattatcatctttgcgttaattttttgtgttgaaaatgtttgtgtttttatattgattgtttgcaaattatgcataaaatataatgccgaatcaggatccccgaaaaagggatggtgactaaatgacaccacctgaaataagatcaataaacgataccattcattattattatattaataaaatattatggtgccgctgttatttttatgttttctctgtcgtaggcgttaactccatttcataatcactgacagggaattgcccataagtatcatgcaataattgtttgcagctttcctgtttaatcaggtcgctgagttcatctaagcgtttttgtaataaccgcttagtttcattttcattatccaagacagtctgcaaaattttggttaatttctgctgtaatgaaataggcgcatctgaatcttctgatattaaggtaaccacttctactgctttcagataggtgatttccatatcgacaagtacatcccatttttcatttttagctaaatcaagcatctgctcacttaaactaaggatctgctggtaagctgacaaaagatccagatcatttttcatcaaacaatatcctgactggcgttgtaatgaggacctatctgccgccaagaatctgaaatctcggtaagtaaatcaatcacttcggtaatagccttctcatcgttgcgtaaattagcatggagtaaacgacgactcatataatcatataaagcagaaagattctgagcaatctctccgcctttttcgaaatcaagtccttctttcagaccattatcaatgatatttatcgcctttgaaatagctaaacctttttccgggatatttccctgttgcatcagaataattgcacgacgtagggcgctgagcgccccattgaacaatatctgaatcaactgatagggagaagcattcataatttcgctctcaagatctacctgagcgtataactggcttgccgaacgttgatacatattatcctttaattatcttaaaagctggaatagggatgaacttgtgttattcagggaattcatcagtttatccaattctgtgaattgacgtttataacgctccattgtggcatcaatagtgtcatttgtccgctccacttgtttctcaagggttttcagacttttattaatgccttcggttgcggttgcgatagtcccttcatggctatctaacgttttctttaataggttataagtctgggttgcaaagccggttttttcaccatcgcccataaagaaagccttcacgttggccggtttctctttcaggttcttttccagtttatctttattgatttccagtgtgccatccaatttctgtttaatacccaatttatttaaggtagcgatatcagcaacattctgggcggcaaataattgatgtcttaattggttctggatatttttcagggttccgtcacccagcaaagcaccattatcttttgaagccgcttcaccttttccgaccgctttaaatttggtcagtgaatcaaaagtagactgtaagtcattataagcatcaacccactttttaattgcttcctgcattggttcaatatcacgggaaacaaccagtgtttcggatttgaactgttcgacttctttgatttcgcctttttcccctgtgatttttacagtttctttttctgaaacttttttcagattcagggtaataccttccggagcatcttttatttcattagtctggcgctcaattttgacaccattaacgtgtaatactgcattttttgcgggaactttttcttgcattacaccagcgcggtttttaccgcttggtgggtattccagcaattcgttcagtttattatcaccttcgaccttaatcttcatcatcgattttgttcccgcttttttagcggtcagaatcagataattattcttatcgtcggctttaataatgctggcgttaacattaccttcctgcttattaattgcatcccggatctcaaccagagaagtttgctcattggtcagagcaatcttcatgagttctgttttaccgtctttaccttcctgttcaataacgatagtacggcttgttgctgaagtttctcccaactgttcttttacactgggaacagatacagtttgcaaagattgcgctacggcaagctgctcaacttcaatcttatagttacccgggctggctttggaatccgtgcttggagtaaataatttatggtcttcgcttgttttagttgtattaagcttatcgaatttttttagttcttccgaagcggtctgaagtttttccagactgccttttaatgtgccaaaaccggtcagctttgctttatagcttgtttgttgctgtgctaatggttctaaacgttttctttctgctgcctgaagtttatccagcaaagaacccaaatccatcccggacccggcccctaatgaggaaatgctagccatattgactcctttatttgtaaagcatcactggagttgttatcggattaatttgcgaaaagtttactgagaaaacgatttttttgatggatggaatagttgatgagaacaggcgctgtttgggttatcggtatattcttcgtctttcaggctgtctatttattggctgcgctcactcactccagtcaccgtttttataaatatacggttacctgtgctcctaaagattaatgaaaggttcctgcttttcttcaccgtaggccagcttttggcctgacaaattcgctcccttgctgctgtgatgtaacttgaaatccataggatatacaaagagtaagaaaaaaatggaaaacttttttcaagaaatattaaaggttctttttaagtagccgataaaattgttggcggtgatgaacaccgtgagcaaacaggctcagactaattatatcgacttgattttaaaaaggaactctactatggcatcagtaatcaatactaactactcatctctgctggctcaaaacaacctgaccaaatctcagggtactttaggttctgcgattgagcgcctgtcctctggtttacgtattaacagcgcgaaggatgatgctgctggtcaagcgattgctaaccgtttcactgctaacgttaaaggtctgactcaggcttcccgtaacgcaaacgacggtatctccattgctcagactaccgaaggtgctctgaacgaaatcaataacaacctgcaacgtgttcgtgaactggcagttcaggctcagaatggcagcaactctaagagtgatattgattctatcaatgaagaaattactcagcgttttgacgaaattaaccgtatttctgaacaaactcaattcaacggtgttcgtgttttgcgtgaagatacctcaatggctgtacaggttggcgctaacgatggcgaagttatcaaaatcgatttgaaaaaaatcgaccgtgagactctgaaattaaataacttcgaattggttggtactaaatttggtgcagaagtaactaaaggtgcttttgatcccgctaaaaaagataccacagttgctgtagatacagcttctttaaagaatttggatactggtaaagctcctgcaactgatatcaaaaatgcaaaactttatgaggcagcaaaaaaagctgatggaacagatggtggatatgttatccgtggtgaagataaagacggaaacacagtaatgttccaagctactgtcgataaagatggtaaagttagtaaaggtgctgtcgttgatatcaaaaaacctctgaaagatttggataatgccttgtcaaccgttgacagcctgcgcagttcactgggtgcagttcaaaaccgtctggaatccactgttaacaacctgaacaacactgttaacaacctgagcgctgctcgtagccgtatcgaagacgctgactacgcggttgaagtttctaacatgagccgtggtcagatcctgcaacaggctggtacttctgttctggctcaggcgaaccaggttccacagaccgttctgtctctgctgcgttaatttttattacccagctaagggcttatgcagggcaacctgcatagctcctgcttatatgataaggatcggcttgccgatccttattttttaagtgctatttaaaggaaatactctaagtatttcgcattgtatccaagcggcaaggggtgagcgagcgcagccaacaaagagacagcgtgaaagacgatgggtatt

SEQ ID NO: 1017 - DNA, 5677 bp, Xenorhabdus sp.
  CDS (5201)..(5512)
aatacccatcgtctttcacgctgtctctttgttggctgcgctcgctcaccccttgccgcttggatacaatgcgaaatacttagagtatttcctttaaatagcacttaaaaaataaggatcggcaagccgatccttatcatataagcaggagctatgcaggttgccctgcataagcccttagctgggtaataaaaattaacgcagcagagacagaacggtctgtggaacctggttcgcctgagccagaacagaagtaccagcctgttgcaggatctgaccacggctcatgttagaaacttcaaccgcgtagtcagcgtcttcgatacggctacgagcagcgctcaggttgttaacagtgttgttcaggttgttaacagtggattccagacggttttgaactgcacccagtgaactgcgcaggctgtcaacggttgacaaggcattatccaaatctttcagaggttttttgatatcaacgacagcacctttactaactttaccatctttatcgacagtagcttggaacattactgtgtttccgtctttatcttcaccacggataacatatccaccatctgttccatcagctttttttgctgcctcataaagttttgcatttttgatatcagttgcaggagctttaccagtatccaaattctttaaagaagctgtatctacagcaactgtggtatcttttttagcgggatcaaaagcacctttagttacttctgcaccaaatttagtaccaaccaattcgaagttatttaatttcagagtctcacggtcgatttttttcaaatcgattttgataacttcgccatcgttagcgccaacctgtacagccattgaggtatcttcacgcaaaacacgaacaccgttgaattgagtttgttcagaaatacggttaatttcgtcaaaacgctgagtaatttcttcattgatagaatcaatatcactcttagagttgctgccattctgagcctgaactgccagttcacgaacacgttgcaggttgttattgatttcgttcagagcaccttcggtagtctgagcaatggagataccgtcgtttgcgttacgggaagcctgagtcagacctttaacgttagcagtgaaacggttagcaatcgcttgaccagcagcatcatccttcgcgctgttaatacgtaaaccagaggacaggcgctcaatcgcagaacctaaagtaccctgagatttggtcaggttgttttgagccagcagagatgagtagttagtattgattactgatgccatagtagagttcctttttaaaatcaagtcgatataattagtctgagcctgtttgctcacggtgttcatcaccgccaacaattttatcggctacttaaaaagaacctttaatatttcttgaaaaaagttttccatttttttcttactctttgtatatcctatggatttcaagttacatcacagcagcaagggagcgaatttgtcaggccaaaagctggcctacggtgaagaaaagcaggaacctttcattaatctttaggagcacaggtaaccgtatatttataaaaacggtgactggagtgagtgagcgcagccaataaatagacagcctgaaagacgaagaatataccgataacccaaacagcgcctgttctcatcaactattccatccatcaaaaaaatcgttttctcagtaaacttttcgcaaattaatccgataacaactccagtgatgctttacaaataaaggagtcaatatggctagcatttcctcattaggggccgggtccgggatggatttgggttctttgctggataaacttcaggcagcagaaagaaaacgtttagaaccattagcacagcaacaaacaagctataaagcaaagctgaccggttttggcacattaaaaggcagtctggaaaaacttcagaccgcttcggaagaactaaaaaaattcgataagcttaatacaactaaaacaagcgaagaccataaattatttactccaagcacggattccaaagccagcccgggtaactataagattgaagttgagcagcttgccgtagcgcaatctttgcaaactgtatctgttcccagtgtaaaagaacagttgggagaaacttcagcaacaagccgtactatcgttattgaacaggaaggtaaagacggtaaaacagaactcatgaagattgctctgaccaatgagcaaacttctctggttgagatccgggatgcaattaataagcaggaaggtaatgttaacgccagcattattaaagccgacgataagaataattatctgattctgaccgctaaaaaagcgggaacaaaatcgatgatgaagattaaggtcgaaggtgataataaactgaacgaattgctggaatacccaccaagcggtaaaaaccgcgctggtgtaatgcaagaaaaagttcccgcaaaaaatgcagtattacacgttaatggtgtcaaaattgagcgccagactaatgaaataaaagatgctccggaaggtattaccctgaatctgaaaaaagtttcagaaaaagaaactgtaaaaatcacaggggaaaaaggcgaaatcaaagaagtcgaacagttcaaatccgaaacactggttgtttcccgtgatattgaaccaatgcaggaagcaattaaaaagtgggttgatgcttataatgacttacagtctacttttgattcactgaccaaatttaaagcggtcggaaaaggtgaagcggcttcaaaagataatggtgctttgctgggtgacggaaccctgaaaaatatccagaaccaattaagacatcaattatttgccgcccagaatgttgctgatatcgctaccttaaataaattgggtattaaacagaaattggatggcacactggaaatcaataaagataaactggaaaagaacctgaaagagaaaccggccaacgtgaaggctttctttatgggcgatggtgaaaaaaccggctttgcaacccagacttataacctattaaagaaaacgttagatagccatgaagggactatcgcaaccgcaaccgaaggcattaataaaagtctgaaaacccttgagaaacaagtggagcggacaaatgacactattgatgccacaatggagcgttataaacgtcaattcacagaattggataaactgatgaattccctgaataacacaagttcatccctattccagcttttaagataattaaaggataatatgtatcaacgttcggcaagccagttatacgctcaggtagatcttgagagcgaaattatgaatgcttctccctatcagttgattcagatattgttcaatggggcgctcagcgccctacgtcgtgcaattattctgatgcaacagggaaatatcccggaaaaaggtttagctatttcaaaggcgataaatatcattgataatggtctgaaagaaggacttgatttcgaaaaaggcggagagattgctcagaatctttctgctttatatgattatatgagtcgtcgtttactccatgctaatttacgcaacgatgagaaggctattaccgaagtgattgatttacttaccgagatttcagattcttggcggcagataggtcctcattacaacgccagtcaggatattgtttgatgaaaaatgatctggatcttttgtcagcttaccagcagatccttagtttaagtgagcagatgcttgatttagctaaaaatgaaaaatgggatgtacttgtcgatatggaaatcacctatctgaaagcagtagaagtggttaccttaatatcagaagattcagatgcgcctatttcattacagcagaaattaaccaaaattttgcagactgtcttggataatgaaaatgaaactaagcggttattacaaaaacgcttagatgaactcagcgacctgattaaacaggaaagctgcaaacaattattgcatgatacttatgggcaattccctgtcagtgattatgaaatggagttaacgcctacgacagagaaaacataaaaataacagcggcaccataatattttattaatataataataatgaatggtatcgtttattgatcttatttcaggtggtgtcatttagtcaccatccctttttcggggatcctgattcggcattatattttatgcataatttgcaaacaatcaatataaaaacacaaacattttcaacacaaaaaattaacgcaaagatgataataacggctgtttcttgcaaagagaatgcggaagaacaatcaaattttattattatttaaaataatatattcaatggaatgatatgaaaaaatttctcacttttacgatgttatttatcccaacgataggcatcgcttcgacaaatgaaaatttagattactgcgctacgacagaatcttgggcagcttatcaggttataaacgccgcggttaggaaaaataaccagctggagaagcatcaggcaaattcaatattaattaacagacacctgctggaaaaaaataagttaccgataacttattcagcctggggcgaactttattcccagacaatagaagttaccattccttatattgacaagaataaatcaccagtgattattatcgcttcgtcgattatttctgaagaggaatgttcttttaccgatcccacctatgttgatatcaccccaaaaaattattaatatccactaacaaacgaatctcggtggctgccccagtcaccgacgattgaatatatcacctgtcatcctcaaaaaattaaaaaagatgaggtttttatgacgaataatattttacaggcactcactttattaaaatctaaaaaatggatcgatctgactcacagctttgatcaacattctcctcatttctctatgtttccccctgctcaaattaaaacattatttagttatcaggatggctttttcacccaacaatttacttttgtcgggcaatatggcacgcatattgatgcctcctgccattttattcctgatggtcgtttcctgaatgggattgaattaaaagaactggtattaccattaatagttattgacaaatcagaacgggcagaacaagagcctgacttttcgttgtcaaaagaagatattctctgttttgaagccgagcatggcattattgaagccgatacttttgttgcattaagaacagactggagtaaacgctggccttctcaggagaaaatggaaaataaagatatcaatggaaataatcagacacccggctggggattagatgcactaaagtttctgtttgaggaaaggaaaataaaagccatcgggcacgaaacatttgatactgactcctcgaaagaggccagaaataataatatcttcctcggcgagtattacgttttagcacaggatacgtatcaaatagaaatcatgaaaaatttagataaagttcctactcgtggcgcgattatttttaatattgtcgctaaaccagaaaaggcaacagggttcccggtacgttcatttgcgataatcccctaattctttaagtggttcaagctaatttaatttatatctcatcgagcttgagctacttatcaaaagaaaaccattccttatcaaaacatcccaagtaaacatttattaacctacttgaattcacaattaacagaacaataaaacactatttacagctactttagagca

SEQ ID NO: 1018 - DNA, 5677 bp, Xenorhabdus sp.; identical to SEQ ID NO: 1017
  CDS (3653)..(4012)

SEQ ID NO: 1019 - DNA, 5677 bp, Xenorhabdus sp.; identical to SEQ ID NO: 1017
  CDS (3225)..(3635)

SEQ ID NO: 1020 - DNA, 5677 bp, Xenorhabdus sp.; identical to SEQ ID NO: 1017
  CDS (1749)..(3212)

SEQ ID NO: 1021 - DNA, 3659 bp, Xenorhabdus sp.; identical to SEQ ID NO: 45
  CDS (1479)..(1685)

SEQ ID NO: 1022 - DNA, 3836 bp, Xenorhabdus sp.
  CDS (2114)..(2518)
tgctctaaagctgccccgcgtattgagctacgacaaaaatagcggtgagttatccgttaacaaagcacaataccgccggttatcgccttataacctagaaaatcgccgcagaattaaagagatttatcaggatttagctgctcattccatttttcagggggtgctgtatcacgatgatgccatcatgtcagattttgaggatgccggcccggatgcaatcagggtttatcagcgggaaggttttcctgcctccattgccgaaattcgtcaagacccggaacaattcgcccgctggagccgcttcaaaagccgatatctgaccgatttcactcaggaactcactgaagccgttaaatccgtccggggttatcaggtaaaaactgcccgtaatatttttgcgctgccgattctggaaccggacagcgaagagtggtttgctcagaatctggatgattttcttgcccattatgactgggttgcaccgatggcaatgccattaatggaaaatatcccgctgtcaaaaagtaatcagtggctatcccgtttagtaaaagctgtcggtcagcgcccggatgcactgagtaaaacggtatttgaactgcaagccgtagactggcgcaaaccatccgataaaagaatgatatcaggcgaacaactcgctgaatggatgcgccagttacatctgaatggtgcccaaaattttggttactaccctgatgactttattaataatcaaccagaaatgaactcgatccgtcctgttctttcctcagaatggtatccactcaatgattgaccgtattctcgcttttattgtgctctgtattgttttgagtattcccatcggtattgctgtcacttttaccggtgaagttatgctgaactttgtgtttttctggcccctgtttatgtctgccatctggatttcaggtgggatttatttctggttttatcgtgaaagacactggaaacaaagtgatgagccgccccatctggagggcgagcctctgatatctattttgatcccctgctataacgaaggcccgaatgtgcgtgaaacactacaggcagcactgaatcagcgctattccaatattgaggtgatcgcaatcaatgacggttcaaccgacagcaccgcccacgaacttgacgatatggcgaaacagcatagcgccctgagagtgatacatctgaaacagaatcaggggaaagccaccgcgcttcaggccggcgctgccgctgccaacagtgattatctggtttgtattgacggtgatgctctgttagatcgtgatgctgcggtatggatggtaaaaccgatgattgaccatccccgtgttggtgcagtaaccggtaaccctcggatccgtacccgctctactctggttggccgaattcaggtaggtgaattttcttctatcattggccttatcaaacgaactcagcgaatttacggtcaggtatttaccgtttccggtgtggtcgctgcttttaaccgccgtgctcttgccgatgtgggttactggagcaacgacatgattacagaagatattgatgtcagctggaaactgcaattacgtcattggtccgttttctttgagcctcgggctatctgctggatcctaatgccggaaacacttcgtggattatggaaacagagattacgctgggcacagggtggagctgaagtctttctcaaaaacctgcagaaactctgggcatgggaatatcgccgtatgtgggttttatttgccgaattctgctgttcggtaatctggtcatttacctttgccctttcaattatattgtttttcctcggcatgcttatcacattacctgaaaccattcgggtttatacccttttcccgcccgggtataccgggttggtattagccgcaacctgtctgattcagtttactgtcagcctgttaattgaacgtcgctatgaaaaacacgtcgcatcatcacttttctgggtgatctggtatccagtcgtatattggatgctgaacctgtttacgacactggtctcttttcccaaagttatgcttaaagtccaccgtaaacgtgctcgttgggaaagccctgatcgtggaatagagagaatagaataatgaaagatcccttaatatttacagagcagaaattattacctcgttttattgatgtcacgctgactattttagcgtggtgtggatttgtctatttgtttatttcggggttatttaattcgccccatcatggccctaagcctgttatgtatatattcagttcggagttaagctcaatagctgtctatatcattgtcgctatatttaatgcattccttctgatcggctgggcaaagtataatcaaattcgttttcgtattgaacgacgtcaccatcggcctgcgttaaaccatgatgagattgccacaagcttttctttggaagaaagaataataggcagattaaatcaaggaaaagtgtctgatatcacttatgataatcatgggcacataataggaatcgctgaaaaacaaaattaatcaacagaggaaataatttttataactctttcccctataatttaatatgctttgcaacctatctcatatacgaccatttacaatcggtgattaatgattttgtacagaatgccataatgagataggttctatagccaatatatttagaataacaaccctgtgaaccatacattaataagaaaagtaactgaaatgagtaaataaagccaacaaagagacgacttgaaaaactaagtgtatattaatgactgttaataatatgaaagataaaaacgggatcccgttatgtgtttaattgaatggaccctctgtgttgtcaaacattgtgcttccaaattatttttacgggtattgacggttttatgtataaccatggtgatatgtaattcaatagtaatagctatgcctgaaactaaagagaaaataaaaataaaaataaatgaaaatgttgcgcgtgtcgtctctggcattatcagttatacatattggccagtcacacgccctacattacatttatgtctggtacccccatctaaatacattcgtgctttaaaaaatattaatatgtttcctgatgaaatagaattacgggtagaagttctaaatttcaatacagaacaattagtcgataagtgtgatattatttactacggtcagattgaccctatacttcaacatcaagtatttaatcagaaaaataataaaccactcctaaccatcgctgaacaaaaccaacattgtgaaatcggcagtgcattctgcctcaatatagatagcacacaaacaacatttaaccttaatctcgatattttgactcgcagtggtatacgcgtagatccaaatgtcctgcaattggctcgtaaggcggaataactgtatgaaaaagcgttattcattaatgccatcacgcccgacattacgtcagacagttcaccgtatccatctgatcattactgtggttacattatcggttgtcggtctgtttctttctttactggcactctttgccatgcagaaatatgctgaaaataatctgaaacagatgtcatcgacaatagcctataccgcacaggcagcggtggtatttaatgataaaacggctgcaaacaaagtattggaaatgattgctgcccacgatagttttaccgaagcaaaaattttcgatgcaaaaaatcaaatcctagccagctggcataccaaccagataacacgcaccggtaattttaaaaaactgattgaatactggatatttcctgaacccaccacatttcctatttatcaccaccaacaacaagtgggttcagtc

SEQ ID NO: 1023 - DNA, 3836 bp, Xenorhabdus sp.; identical to SEQ ID NO: 1022
  CDS (2)..(796)

SEQ ID NO: 1024 - DNA, 3836 bp, Xenorhabdus sp.; identical to SEQ ID NO: 1022
  CDS (1050)..(2114)

SEQ ID NO: 1025 - DNA, 3836 bp, Xenorhabdus sp.; identical to SEQ ID NO: 1022
  CDS (2978)..(3403)

SEQ ID NO: 1026 - DNA, 3836 bp, Xenorhabdus sp.; identical to SEQ ID NO: 1022
  CDS (3438)..(3836)

SEQ ID NO: 1027 - DNA, 3845 bp, Xenorhabdus sp.
  CDS (1585)..(3843)
cgagccatgtgctctaaagacacagttttcggttggagcttggcctaatccaagccccgtccaagaccgcagggcgtagtacgtagataaattacttacttatatcctgcgtagacggtgacagagccaaatgaaatttaatttctggattctgctcaccgtgtttcagcgctcaggcatatttcatgttctgagtgaagtgagtcccgggtttgcccggtaatccaggagcaagaagctaatggcactaaatcttcaacacaaacaagcgattgttgctgaagtcagcgaagtagccaaaggcgcgctgtctgcggttgttgcggattctcgcggcgttactgtagataaaatgactgaactgcgtaaagcaggtcgcgaagctggcgtttacatgcgtgttgttcgtaacactctgatgcgtcgtgctgttgaaggtactgagtatgagtgcctgaaagaagcgtttgttggtccaaccttgattgctttttctaacgaacatccgggcgccgctgctcgtctgttcaaagatttcgcgaaagcgaacccagcattcgagattaaagcagcagcctttgaaggtgagtttatcccaggttcggacatcgatcgtctggctacactcccaacttacgaagaagcaatcgcacgcctgatgtcaaccatgaaagaagccgctgcaggcaaactggttcgcactctggctgcgctacgcgatcagaaagaagctgcttaattgcttatttccttcgttgctttttaacgtataaattatttctgaattttaggaacacttgttatgtctatcactaaagaacaaattctggacgcagttgcagaaatgtctgtaatggacgttgttgaactgatcagcatgatggaagaaaaattcggcgtttctgctgctgcagctgttgctgtagttggtggtgctgctgaagcagttgaagaaaaaactgaattcgacgtaatcctgactggcgttggcgctaacaaagttgctgtaatcaaagcagtacgtggcgcaactggcctgggtctgaaagaagctaaagacctggttgaaagcgcaccagcagcactgaaagaaggcatcagcaaagacgacgctgaagctctgaaaaaatctctggaagaagcaggtgcttctgttgagatcaagtaagatcagtttgaagttcgcagcctgattttcaaggctggcggctggcgattttttaatcgccagcctttttgcgctgtaaggcagcttgttgttttgtaaagagcttgtttcacaaggattactttacaaaaagattgtcttacagagcacatgcagggagttagtagcatttcacactgtttggctactaattaacccaaaatactccttcctattgacgacttaatatactgtgttctcagctacgatccactcgggtagctcggtagtttaggtaatgcaatgaaatgatttaagagtaatagcaatgagtattacggagaatattctattttctgttcgaaaaaatagtgttgccgagtgctgtccttaagggcggacagagtgggtcacttatcagcgagctgaggaaccctatggtttactcctataccgagaaaaaacgtattcgtaaggattttggtaaacgtccacaagttttggatgtaccataccttctttctatccaacttgactcgttccagaagtttatcgagcaagatcctgaaggccagaatggactggaagcggccttccgttctgtgttcccaattcagagttacagcggcagttctgagctgcaatatgtaagctaccgtcttggcgaacctgtttttgatgttcaagagtgtcagatccgtggcgtgacttattccgctccactgcgcgttaaactgcgtctggtgatttatgagcgtgaagcgccggaaggcacagtaaaagacatcaaagaacaagaagtctacatgggtgaaattccactcatgactgataacggtactttcgttatcaacggtactgagcgcgtaatcgtatctcagttacatcgtagcccaggcgttttctttgacagcgataagggtaaaacccattcatccggtaaggtactgtataatgcacgtatcattccttaccgtggttcatggctggatttcgaattcgatcctaaagataatctgtttgtgcgtatcgaccgccgtcgtaaattaccggcttcgattattctgcgcgcgatggattatacgagcgaagacattctgaatctgttcttcgacaagaccacgttcgaaattcgcgacaacaaattgcagatgactctggtaccagaacgtctgcgtggtgagacagcttcatttgatattgaagcgaacggcaaactttatgttgaaaaaggccgtcgtatcactgcacgtcatatccgccagttagaaaaagatcaggtagaccgcattgaggtgcctgttgaatatatcgcgggtaaagttgttgcaagagattacatcgatcagaacacgggtgaaatcatctgtgcagcgaacatggaactctctttggatctgctggcacgtttgagccaatctggtcataaaaccattgagaccctgttcaccaacgacttggaccacggtgcatacatctccgaaactctgcgtattgacccaaccaacgaccgcctgagcgcattggttgaaatctaccgcatgatgcgtccgggtgaaccaccaacacgtgaagcagcagaaaacctgtttgagaacctgttcttctctgaagatcgttatgatctgtctgctgttggccgtatgaagttcaaccgttcactggatcgtgaagagattgaaggttccggtatcctgagcaaagctgacatcattgatgtcatgaagaagcttatcgatatccgtaacggtaaaggcgaagtggatgatatcgaccacttgggcaaccgtcgtatccgctccgttggtgaaatggctgaaaaccagttccgtgtaggtctggtacgtgtagagcgtgcggtgaaagagcgtctgtctctgggcgatctggataccctgatgcctcaggatatgatcaacgccaagccaatttcagcagcagtgaaagagttctttggttccagccagctgtctcagtttatggaccagaacaacccactgtctgaaatcacccataaacgtcgtatttctgctttgggcccgggcggtctgacccgtgaacgtgcaggctttgaagttcgagacgtacacccgactcactatggtcgtgtatgtccaatcgaaacgcctgaaggtccaaacatcggtctgattaactccctgtccgtttatgctcgtaccaacgaatatggtttccttgaaaccccttatcgtttagtacgtgacggcgtggtaacagatgagattcattacctgtcagcgattgaagaaggtaactacgtcattgcgcaggctaactccgcactggacgaagaaggccacttcatcgaagaactggtaacctgccgtcattatgacgaatccagcttgttcagccgtgatcaggttcagtacatggacgtttcgacacaacagatcgtgtccgtcggtgcttccctgatcccattccttgaacacgatgacgccaaccgtgcattgatgggtgcgaacatgcaacgtcaggcggttccaactctgcgtgcagacaagccgctggtcggaacaggtatggagcgtgcggtagcggttgactccggtgtaacctccgttgctaaacgtggcggtgtggttcagtacgttgacgcatcccgtatcgtgattaaggttaacgaagatgaaatgtacgctggtgaagcgggcattgatatctatactgtaaa

SEQ ID NO: 1028 - DNA, 3845 bp, Xenorhabdus sp.; identical to SEQ ID NO: 1027
  CDS (803)..(1168)

SEQ ID NO: 1029 - DNA, 3845 bp, Xenorhabdus sp.; identical to SEQ ID NO: 1027
  CDS (242)..(739)

SEQ ID NO: 1030 - DNA, 685 bp, Xenorhabdus sp.
  CDS (406)..(672)
cgcacaggccggtttctcgacagccaacaagacatggctgcccattccggacgaacacaagcagcgcgccgtcagcgcccagcagggcaatgaggcttcggtgctggaacattaccgccgcttcctcgctttccgcaggcagcacccggctttcgcaaagggtggtatcgaattccagccggtgcagggtgaggtgctgagctatacccgcaagctgggcaacgaaaccgttctttgcctcttcaacttgtccgcaacgccggcaaaagccacgctgccggaagggaactgggaggttctcgaaggtcacggttttgcaagcggccttgaaggtagaagcgtagaacttccggcatggggcgcattcttcgcccgttacgcctgacagaatagggaggaacacccatgacaagtctcgttctcaaggatatccgcaaatcatacgggcaggtgaaggtcctgcacggcatcgatctttcgatcgagcagggcgaattcatcgtttttgtcggcccctccggctgcggaaaatcgacgcttctgcgcatgatcgccggtctggaggaaatcaccggcggcgagatgttcattgatggccagctcgtcaatgaaatcccgccctcgcgccggggcatcgccatggtgttccagtcctatgcgctttatccgcattctttagaggacg

SEQ ID NO: 1031 - DNA, 685 bp, Xenorhabdus sp.
  CDS (14)..(247)
cgtcctctaaagaatgcggataaagcgcataggactggaacaccatggcgatgccccggcgcgagggcgggatttcattgacgagctggccatcaatgaacatctcgccgccggtgatttcctccagaccggcgatcatgcgcagaagcgtcgattttccgcagccggaggggccgacaaaaacgatgaattcgccctgctcgatcgaaagatcgatgccgtgcaggaccttcacctgcccgtatgatttgcggatatccttgagaacgagacttgtcatgggtgttcctccctattctgtcaggcgtaacgggcgaagaatgcgccccatgccggaagttctacgcttctaccttcaaggccgcttgcaaaaccgtgaccttcgagaacctcccagttcccttccggcagcgtggcttttgccggcgttgcggacaagttgaagaggcaaagaacggtttcgttgcccagcttgcgggtatagctcagcacctcaccctgcaccggctggaattcgataccaccctttgcgaaagccgggtgctgcctgcggaaagcgaggaagcggcggtaatgttccagcaccgaagcctcattgccctgctgggcgctgacggcgcgctgcttgtgttcgtccggaatgggcagccatgtcttgttggctgtcgagaaaccggcctgtgcg

SEQ ID NO: 1032 - DNA, 685 bp, Xenorhabdus sp.; identical to SEQ ID NO: 1030
  CDS (2)..(385)

SEQ ID NO: 1033 - DNA, 4687 bp, Xenorhabdus sp.; identical to SEQ ID NO: 47
  CDS (2503)..(3411)

SEQ ID NO: 1034 - DNA, 4687 bp, Xenorhabdus sp.
  CDS (4400)..(4687)
taaagattccatcagaacgaaggggggagcccagattcgcttagagaacacaatttgatctcgaaatgatgaatgaactgggatattgctccgggattgaaaactattcccgttatctgtctggtcgtgcaccgggtgaacctcctccgactttatttgactatctacctgcggatggcttgctggtggtggatgaatcccatgtcaccgttccacagcttggtgctatgtatcggggagaccgttcccgcaaagagacgctggtggaatacggcttccgtctgccatcagcactggataaccgcccgatgcgttttgaagagttcgaggcgctggcgccacaaaccatctatatatcagcaacacccggcaattatgaactggaaaaatccggtaatgaagtggtcgaacaggtggtacgcccaacgggtctgattgatcctgaagttgaagtccgcccggtagcaactcaggtggatgatttactgtctgaaatccgtatccgggcggctaaaaatgaacgtgtattagtcaccactctgactaagcgtatggctgaggatttaactgaatatctggaagaacacggagagcgggtgcgctaccttcactctgatattgataccgttgagcgggttgagattattcgtgatttgcgtttgggtgaatttgatgtactggtggggatcaacttgttgcgtgaaggtctcgatatgccagaagtctctttggtagctattttggatgcagataaagagggcttcctgcgttcagagcgctcactgattcagacgattgggcgtgcagcgcgtaacttgcatggtaaagctattttgtatggcgacaaaattaccgcttctatggaaaaagccatcaatgaaacagaacggcgtcgagcgaaacaacaggcatttaacgaagaaaacggtatcgtaccaaaagggctgaataaaaaagttggcgatatcctacaacttggtcagcctagtaatggcaaaggaaaaagcagaaccagaaatagaagcaaatctgatttgggggttgatgatttccataaattatctgcgaaagaactggaaaacaaaatccgtgaattggaagaaaaaatgtatcaatatgcgcgggatcttgaatttgagcaggcagctaacatgcgcgatcaggttcaggcattgagagcacagtttatcgctaattcctgagattattgctcgccgttagttaatgactaatcagaatggagagtgaaacaaaacactctccatcaacggtattattagcccagtttttgcagcgtatcttctatggcttgtcgtaataattcacgatcatggcgataaggaacatcctgtgcttctaagacctgttgtgtaacaattcggtcatctaactggctgatatcagtacgtgggccaacaatgattgcgttgatcattttgcgcccgattgtattttctatcatctcaagtttgtctttcaatgaaagatcggccgccgcatggctgagttctttccctaaattaccgatataaatcatattggcattgctgcgccgcagggactgggtcaaatcctccagtaacaataatggcattaagctggtaaaaaaactgcccgggcctatcaagatcaaatcagcctgttcaaccgcttccagagcttctttggtggcgctgacatggggataaagcattaacttttttggaacacaatccagctggtcgatattcacttctccatgcacttcatatccctgagcatccactgccattaggtcaacggcttgttcggacatagggatcaaatgcgcatttactttcagcagatttctgagcagattaattgcctcaagagggcggacgcttaaatgatctaaagccttcaacattaagttgcccagattatgtccggctaattctccactaccgccaaaccggtattcgaacatagctgaagcaacagtcggctccgtgatcagctggttaaggcagtttcgggtatcaccccaggcgataccgccttctgagcgcctgattctcccggttgagcctccattatctgttgttgtgacaataccagtcaggcgggcaccaagggaggagagagatgacataacgcgcccaagtccgtgaccaccgccaagggcaaccacacgatccaaatcggctaatgttcggtttcgcataggattcctgctactgaattaaatgtgcttgagtaaattttatataatctaccataaagtatgatgcttttagcaatcaccatgattttatgcgatttttatcaattatttcaggatataaacagaatgaataggtaacaataggctgatgttgatggttttttgtaaccctttgtataataaaatatatatcgagattgtcgttagcttttttctaatttaaggggtagaatcccacggcaaggtttaatcacgtatgtcacgatttatatgatgattaaatttgaaattaacccctagcctctgcgtctaagtctttgttgtataaattttttattaattgattctaccgtaaattgttctatcaaattaataccacatcgatatgatgctttggccgtggctcctgagtcaccagggtgcgaggcagaaatgctcgcatcccccatgattggaaggtgttatagtggaacaacttatcgatacattttcccgcaagttttattacttgaggttatcggttactgatgtatgcaactttcgttgcacatactgtttgcccaacggctaccagcctggcagcaatcaactcaacaaatcatttcttactttgccggagatccaccgtgttagccgcgcttttgcagaattaggcaccgaaaaaattcgtctgactggtggcgaacccactatgcgccgtgatttttgcgacataatcgcagcagtgcatgaaaatccgcagattaaaaaaattgcggttacgacgaatggttaccggatggagcgcgatgtgacccgctggaaagaagcggggcttacagcgattaatgtaagtgtggatagtcttgaccctcgccagtttcacgctattaccgggcaggataaattctttcagattatgcgtggcattgatgcagcctttgaaacaggttttagcacagtcaaagtaaatgcggtattaatgacaaatatcaatgaaacttgcatgccagcagttccttgactggataaaagtccgtcagattcaattgcgtttgattgaactaatggaatcgggagaggtaagtgagcacttccggcaccatcatctttccggtgatgtaatacgcagccgtttactccagcaggactggcaactgcaacaacgtggacggagtgacggcccggctcaggttttcaggcacgcggattatcagggcgaaattggcctgatcatgccctatgagaagaatttctgccaaagctgtaatcgcctgcgtgtctctgccattggtaatcttcatttatgcctgtttggtgagcagggaattccattacgtgatttgctgtctgatgacggatctcttaacgatttgaaattacgcatacaaggtgggttgaggcataagcgtgaaactcactttttgcatcagggagatagtggtatcacccctaatctttctttcattggtggttaatttaacggctcaattcatttttcaggagcgagaatgtcccaactgactcatatcaatacatccggcgaagcccatatggtagatatttctgccaaaacagaaacggtacgcgaagccagagctgaagcctttgtcgaaatgcaggctgaaacactggctatgattgtttccggtgaccatcacaaaggggatgtttttgcaaccgcgcgtattgccggcattcaggcagcaaaacggacatgggaattaattccactgtgtcacccgctgttacttagcaaagtagaagttcaattagaagcacaaacagaacacagccgggtcagaattgaatcctgctgccgcctgacagggaagaccggggtagaaatggaagcactgaccgcggcttccgtggcagctttgaccatttatgatatgtgtaaggcagtacaaaaagatatggttatcgggccggttcgtttgctggaaaaaagtggtgggaaatcgggaaattttaaggtgaaaaaatgataaaagttctgtttttcgcgcaggtacgggaattggtaggcactgattctcttgaattaccgaatgattatccgacggtagcgcaccttcgcaggtcgctacttgaaaaaggtgaacgctgggcgctggcattggaggatgggaaattgctggcggccgtgaaccaatcgtttgttcacgccgaacacccactgaatgatggtgatgaagtggcatttttcccgccggtcaccggaggctaacgatggaaaagacacgaatcagtatccagaaagcggtatttaatgtcggagaggaataccaatggctggcacaatctgatgaagatggtgcgattgtgacttttacggggaaagttcgtaatcacaatttaggtgataatgttcaggcactgactatggaacattatccgggcatgacagaaaacatgctgcataaaattgttgatgaagctcgccaaagctggcccttacaacggatcaacattattcatcgtattgggaaactatatcctggggatgaaattgtattt

SEQ ID NO: 1035 - DNA, 4687 bp, Xenorhabdus sp.; identical to SEQ ID NO: 1034
  CDS (4152)..(4397)

SEQ ID NO: 1036 - DNA, 4687 bp, Xenorhabdus sp.; identical to SEQ ID NO: 1034
  CDS (2910)..(3188)

SEQ ID NO: 1037 - DNA, 4890 bp, Xenorhabdus sp.
  CDS (357)..(1148)
gctgctgcaaacgttacaactttatagtattaaaaagtaattaaaagtaataaatttatttttgctggtattttcatggccagctgaatatatatcgttaatctgtttcattatttgacgataacatattgcaaatatcactctattgggatactaatagagtgatttttattttggctcggggcgttcttaaatgaactgagaagtacccgtattacctgatctggataatgccagcgtagggaagtctcggtataatcccatatccgacagatcttaaaaaggcaacttaaaagatagcgggtattctgattgccgcttttcctgagctggtcgcaggaatcatcatcatgtcaattcattcattgaccattgcaggaactgatcctagcggtggtgccggcattcaagccgatttgaaaaccttttctgcacttggcgtttatggcacaactgtaattactgccctcgttgcgcaaaataccaccggagtgcaagcaatttacgatattgaacccagtttccttgctgctcaactggagtccgtgctttcagatgtcaggatagacagtattaaaattggcatgttatcgaatgttgctaatgtgaaagttgttgcggaaatgctgcatcgttacccagttccttatactgtgctggatacagtgatgctggcaaagagtggggatccgttactgtcagaagaggcgactacagccatgacagagttactactacctgttgtttccttaattactcccaacttacctgaagcggcagcgctattgaaatgttcttctgcggaaacagaagatgaaatgttgcaacaagggcgaaaattattatcaatgggttgtcaggcagttttgttgaaaggggggcatctaaccgacggagaaagtcctgactggttgtttacgcctgaaggagaatggcgttttactgcttccagagttaatacccacaatacacatggcacgggttgtactttgtcggcggctcttgctgcattacgaccacgttatgaagattggcagagcacagtgccagttgcaaaagcttatttacagaatgccttagtgcaggcagataaattagacgtggggaaagggatagggccggtacatcatttccatcaatggtggtagttactgaccgtgaaaatggggatagatatatccccatatataatttgattattattcaataaattagcctgattttatcaggctatagtgacgcttttgtcaagatagacgtcctgtactgagtggatcagggcgacgccttctttcattgacttcttaaatgccttacgcccaagaatcaaccccatgcctccagcgcgtttattgatgaccgctgtgcggactgaatcattcaaatcattggcacctgaagctccgccagaattgattaggccggcacgtcccatgtaacagttagccaactgatagcgaactaaatcgatagggtgttctgttgttaattcagtatagacacgtttatctgtgtgcccgaaaccaattgcagtgtaaccgccattagtttccgccattttttgcttaacgatatccgcaccgatagtggctgccagatggtttgcctgaccggttaaatcggcacttgtatggtaatcaacaccatcttttttgaaggcagaattacgtaaatatgcccacagcactgtgaccattcctaattcatgggcacgttcgaaagcagcagaaatttcttctatctggcggcgtgactcatgagagccataataaatcgtcgcaccaactgcaactgcacccatgttaaatgcctgttcaacgctggcatataaagtctgatcatattcggcggggtaggtcagagtttcattgtgattcagtttcaccagaaacggaattttatgggcatagcggcgggaaaccgatgccagaacaccataagtcgaagcaacgcagttacatcctgcttcaatcgctaattcaacaatatttttggggtcaaaatagagcgggtttgctgcaaaagaggcactggctgaatgttcaacgccctgatcaaccggcagaatcgaaagataacccgttcctgccagacgcccatgattaaataaagtttgcattgagcgcaataccgcgtttggccgattattttcgatcattacacgatcaacaaaatctgcacccggaatgtagagattttcacgtggaatagtggaacattgatgctgcaataaactttctgcgtcttttcctaacaacttcacgatatcagtcatgtttaactccagtttgcaaaaggcgctactgattgttgtttatatttgcacggagtacaaggtgagcaggaagggaagatgtagtggatcgcttcagttgagactatttttcatagttaatgttatgtttattaaaatttaattatttcactcctgtcatgcatgtgtatagtgagataatatcaatcgactctgttggaaataactatctcaaggtgtttttctaaaaattccttcagtatgttgaataaatatgagtaatatttattcaaaccgatttttttatttacaattaattttgtaatgggtagtgagataattattattgactgaataaactcaataactagtaattcagttaatgattttttcttgctgatattactgattatttttcgaattttaaaattttcaggaaaagaaaaggctagcccaagggagattgagctagccaaggaggtggttcctagtcttacagtgaaacttttttagttcttcatttttcagaatggatgatacgagaaataaaatagtattgatgtgatctgtttctaaaaaaatggaactatttctgtaaaattcatactgaattattttttaggaactgtatttgtatgtggtgctcgggtattacccgctttcagattacggatcagcagcgcgtaattcagttcaatttcttcaggaacaggcaagtaaacaatatgaccgtcacccggagcaacttcaacagcctgattttttttgtttgtcattgatgccagtacaaagttgatattgcctgctggcgtcataatttcaagattgtcaccaacgaggaatttattttttactgctacttcagccagcccgttgatccgattgccggtaaattctccgacaaattgttgcgtctctgatactgaataaccatattcataggtttgataggcatcgtgagtatggcgacgcaaaaagccttcggtataaccacgatgagctaatccttccagagtgctcattaatgttggatcaaacggtttaccagcaacggcatcatcgatggcacggcggtatacctgagctgtacgggcacaatagtagaaagatttagtgcgtccttctattttcaacgaatgtacgcccatgccagtcagccgatctacatgctccactgcccgcaaatctttggagttcatgatataagtgccatgttcatcttcgaatgcgctcatatattcacccggacgtttggcttcttctatcatgaataccttatccgtcggagtaccttgtcctagtgtcggctcaatatttttaaccggaataggatcatgggtatgaacgatattgcctgtatcatcttctttgccttcctgtacattgtattcccagcggcaggcattcgtgcaggttccctgattaggatcgcgtttattgatatagcccgatagtaaacagcggcctgaataagccatacacagtgcgccatgtacgaaaacttccagctccatttcaggcacctgctggcggatttctgcaatttcttccagtgaaagttcgcgggagagaatcacccgcgttaagcccatttgtttccagaattttaccgttgcccagttaactgcgtttgcctgtacagaaaggtggatatccatttcgggaaaggcttctcttaccatcataattaaaccgggatcggacataattagcgcatctggccccatttcaaccacaggcttcaagtcgcggataaaggttttcagttttgcattatgtggggcaatattgacaacgacataaaaacgtttgcctaattcatgggcttctttaatcccctgagccagtgtttcatggttaaattcgttgttacgaacacgcaggctgtaacggggctgcccggcatagatagcatctgcgccataagcgaaggcatagcgcatatttttcagggagccggcgggagaaagtaattctggagtaaacatattattagcgttctcagtctgagttcaaatcagacctcaccctatatcattactaagggtaaggttaaagaggggattttagcgcttataccttttatctttcaagatagtcttgcaaggtacatatcatagatatggaggaaatagatacggagaatggggatgctgacaaaaacgcgccgcggatgcggcgctgttaacgagctacaactaactacctttggtcaagtcccgtattttatctgttaccccggttttcatcacagactgcattccttttttcattgttgtttcatcaccataagattcactaataccaataatctggtgatttctggctttcaggacaaaatatgttttgccagatttatttttcctcacttcatgacgggctttgtcgggagagttgacttgtaccgagtgaatacctttattggcggcagccttagtggtgtacatctcactgctgagaataatgtcaccgtttgctgctaccagattgaagtaaaattgcccgttcttcgctttcttaagatcatagtgaccaatagccataagaaattctcctgattgggtaattatcaaattaaaagtttacctgaaatttatgcaggtgaatttttttaataacagtaggtaacttacatc

SEQ ID NO: 1038 - DNA, 4890 bp, Xenorhabdus sp.
  CDS (2616)..(3665)
gatgtaagttacctactgttattaaaaaaattcacctgcataaatttcaggtaaacttttaatttgataattacccaatcaggagaatttcttatggctattggtcactatgatcttaagaaagcgaagaacgggcaattttacttcaatctggtagcagcaaacggtgacattattctcagcagtgagatgtacaccactaaggctgccgccaataaaggtattcactcggtacaagtcaactctcccgacaaagcccgtcatgaagtgaggaaaaataaatctggcaaaacatattttgtcctgaaagccagaaatcaccagattattggtattagtgaatcttatggtgatgaaacaacaatgaaaaaaggaatgcagtctgtgatgaaaaccggggtaacagataaaatacgggacttgaccaaaggtagttagttgtagctcgttaacagcgccgcatccgcggcgcgtttttgtcagcatccccattctccgtatctatttcctccatatctatgatatgtaccttgcaagactatcttgaaagataaaaggtataagcgctaaaatcccctctttaaccttacccttagtaatgatatagggtgaggtctgatttgaactcagactgagaacgctaataatatgtttactccagaattactttctcccgccggctccctgaaaaatatgcgctatgccttcgcttatggcgcagatgctatctatgccgggcagccccgttacagcctgcgtgttcgtaacaacgaatttaaccatgaaacactggctcaggggattaaagaagcccatgaattaggcaaacgtttttatgtcgttgtcaatattgccccacataatgcaaaactgaaaacctttatccgcgacttgaagcctgtggttgaaatggggccagatgcgctaattatgtccgatcccggtttaattatgatggtaagagaagcctttcccgaaatggatatccacctttctgtacaggcaaacgcagttaactgggcaacggtaaaattctggaaacaaatgggcttaacgcgggtgattctctcccgcgaactttcactggaagaaattgcagaaatccgccagcaggtgcctgaaatggagctggaagttttcgtacatggcgcactgtgtatggcttattcaggccgctgtttactatcgggctatatcaataaacgcgatcctaatcagggaacctgcacgaatgcctgccgctgggaatacaatgtacaggaaggcaaagaagatgatacaggcaatatcgttcatacccatgatcctattccggttaaaaatattgagccgacactaggacaaggtactccgacggataaggtattcatgatagaagaagccaaacgtccgggtgaatatatgagcgcattcgaagatgaacatggcacttatatcatgaactccaaagatttgcgggcagtggagcatgtagatcggctgactggcatgggcgtacattcgttgaaaatagaaggacgcactaaatctttctactattgtgcccgtacagctcaggtataccgccgtgccatcgatgatgccgttgctggtaaaccgtttgatccaacattaatgagcactctggaaggattagctcatcgtggttataccgaaggctttttgcgtcgccatactcacgatgcctatcaaacctatgaatatggttattcagtatcagagacgcaacaatttgtcggagaatttaccggcaatcggatcaacgggctggctgaagtagcagtaaaaaataaattcctcgttggtgacaatcttgaaattatgacgccagcaggcaatatcaactttgtactggcatcaatgacaaacaaaaaaaatcaggctgttgaagttgctccgggtgacggtcatattgtttacttgcctgttcctgaagaaattgaactgaattacgcgctgctgatccgtaatctgaaagcgggtaatacccgagcaccacatacaaatacagttcctaaaaaataattcagtatgaattttacagaaatagttccatttttttagaaacagatcacatcaatactattttatttctcgtatcatccattctgaaaaatgaagaactaaaaaagtttcactgtaagactaggaaccacctccttggctagctcaatctcccttgggctagccttttcttttcctgaaaattttaaaattcgaaaaataatcagtaatatcagcaagaaaaaatcattaactgaattactagttattgagtttattcagtcaataataattatctcactacccattacaaaattaattgtaaataaaaaaatcggtttgaataaatattactcatatttattcaacatactgaaggaatttttagaaaaacaccttgagatagttatttccaacagagtcgattgatattatctcactatacacatgcatgacaggagtgaaataattaaattttaataaacataacattaactatgaaaaatagtctcaactgaagcgatccactacatcttcccttcctgctcaccttgtactccgtgcaaatataaacaacaatcagtagcgccttttgcaaactggagttaaacatgactgatatcgtgaagttgttaggaaaagacgcagaaagtttattgcagcatcaatgttccactattccacgtgaaaatctctacattccgggtgcagattttgttgatcgtgtaatgatcgaaaataatcggccaaacgcggtattgcgctcaatgcaaactttatttaatcatgggcgtctggcaggaacgggttatctttcgattctgccggttgatcagggcgttgaacattcagccagtgcctcttttgcagcaaacccgctctattttgaccccaaaaatattgttgaattagcgattgaagcaggatgtaactgcgttgcttcgacttatggtgttctggcatcggtttcccgccgctatgcccataaaattccgtttctggtgaaactgaatcacaatgaaactctgacctaccccgccgaatatgatcagactttatatgccagcgttgaacaggcatttaacatgggtgcagttgcagttggtgcgacgatttattatggctctcatgagtcacgccgccagatagaagaaatttctgctgctttcgaacgtgcccatgaattaggaatggtcacagtgctgtgggcatatttacgtaattctgccttcaaaaaagatggtgttgattaccatacaagtgccgatttaaccggtcaggcaaaccatctggcagccactatcggtgcggatatcgttaagcaaaaaatggcggaaactaatggcggttacactgcaattggtttcgggcacacagataaacgtgtctatactgaattaacaacagaacaccctatcgatttagttcgctatcagttggctaactgttacatgggacgtgccggcctaatcaattctggcggagcttcaggtgccaatgatttgaatgattcagtccgcacagcggtcatcaataaacgcgctggaggcatggggttgattcttgggcgtaaggcatttaagaagtcaatgaaagaaggcgtcgccctgatccactcagtacaggacgtctatcttgacaaaagcgtcactatagcctgataaaatcaggctaatttattgaataataatcaaattatatatggggatatatctatccccattttcacggtcagtaactaccaccattgatggaaatgatgtaccggccctatccctttccccacgtctaatttatctgcctgcactaaggcattctgtaaataagcttttgcaactggcactgtgctctgccaatcttcataacgtggtcgtaatgcagcaagagccgccgacaaagtacaacccgtgccatgtgtattgtgggtattaactctggaagcagtaaaacgccattctccttcaggcgtaaacaaccagtcaggactttctccgtcggttagatgcccccctttcaacaaaactgcctgacaacccattgataataattttcgcccttgttgcaacatttcatcttctgtttccgcagaagaacatttcaatagcgctgccgcttcaggtaagttgggagtaattaaggaaacaacaggtagtagtaactctgtcatggctgtagtcgcctcttctgacagtaacggatccccactctttgccagcatcactgtatccagcacagtataaggaactgggtaacgatgcagcatttccgcaacaactttcacattagcaacattcgataacatgccaattttaatactgtctatcctgacatctgaaagcacggactccagttgagcagcaaggaaactgggttcaatatcgtaaattgcttgcactccggtggtattttgcgcaacgagggcagtaattacagttgtgccataaacgccaagtgcagaaaaggttttcaaatcggcttgaatgccggcaccaccgctaggatcagttcctgcaatggtcaatgaatgaattgacatgatgatgattcctgcgaccagctcaggaaaagcggcaatcagaatacccgctatcttttaagttgcctttttaagatctgtcggatatgggattataccgagacttccctacgctggcattatccagatcaggtaatacgggtacttctcagttcatttaagaacgccccgagccaaaataaaaatcactctattagtatcccaatagagtgatatttgcaatatgttatcgtcaaataatgaaacagattaacgatatatattcagctggccatgaaaataccagcaaaaataaatttattacttttaattactttttaatactataaagttgtaacgtttgcagcagc

SEQ ID NO: 1039 - DNA, 4890 bp, Xenorhabdus sp.; identical to SEQ ID NO: 1038
  CDS (649)..(2025)

SEQ ID NO: 1040 - DNA, 4890 bp, Xenorhabdus sp.; identical to SEQ ID NO: 1038
  CDS (94)..(438)

SEQ ID NO: 1041 - DNA, 5166 bp, Xenorhabdus sp.
  CDS (523)..(1029)
gactattcctgaaccttcattactcagcacacttacattctggcatctcgcgactgagattcaggggatactgaccagtgatcgcgagactgctctatcacttgcctgcttacttcaccccacgcctgcattatgcggcgctccttatacctcatcccgcaatctgatcggcgagctggaaccattcgatcgcggctggtttggcggtatcgtcggctggtgcgatgcccacggagatggggaatgggtagtggcgatccgctgcggtaaagttcgatctcatcagattgagctattcgccggtgccggcatcgttccagactctgttccggaaaatgaatggatggaaacccgtaccaaatttaacaccatgctgagcgcacttggctttgcgacgcaacaggagcagacattatgattgaattcaaccgttggccccaggatctggctgaacgctatcgcttgaaggggtattggattgaccgtccattgagcgatattcttgatattcactgtgagaacgatgccaaggcactgttttgtggtgagcggagctggaactaccgcgagcttaatgagtcagtaaaccgattagccgcttctctgcaccgacgcggcgtgcgtcagggacaaactgcgctggttcagctcggcaacgaggcggaattttatatcgtcttttttgccttattacgtctgggtgttgtacctgttaacgcgctttatagtcatcaaagcagcgagttaaccgcgtatgcactccaaattaagccccaaatactcattgccgatcgccaacatcgccagtttcatgatgatgttcttattgatcgtctaatcgataaatgcccagaactgaatatagtcgtgcttcaccatacagattcagaccactcgctttcacgtctgatatcggaagagccgggcgacttcactccaacgccaactccggcagatgaggtcgcatttttccagctttccggcggcagtactggcacacccaagctgatcccacgcacccacaatgactattattacagtatccgcgccagcaacccaatctgcaacgtaagcagtaaaacccgatatctctgtgcactgcctgctgcacataactaccctatgagttcaccgggagctttgggcgtttttctatgcgggcggtcaggttattctcgtccccgatccaagtccggatggatgtttcccagctatagaacgtcatcagatcaatcttgtcgccctagtaccaccagcggtcagcatctggctggaatataccactctcagaggccacgccgacgaactcgccagtctggaggtcatgctggtcggcggtgctcctctgggagaaacactggccagacgcattccagcagagctgggttgccagctccaacaggtatttggtatggcggaaggtctggtgaactacacccgactagatgatgacgatacacatactttcaccactcagggtcgccccatcagcgaggatgatgagatatgggtcgcaagtcaggaaggtcttccggtaccgctcggagaaccgggattgttgatgaccagaggcccatacacttttcgtggatattaccgaagcccggaacataaccaaacggtgttcgacagccacggattttattgctctggtgacgtagttattcagcttccaggcggatatctgaaagtcgttgggcgcgagaaggatcagataaatcgtggtggcgaaaaaattgccgctgaagaggttgaacaccttctgctgcgccatccagcagtggtatacgccgcattggttgctattcttgaccctctgatgggtgaaaaaacttgcgcatatgtagtgacgcgcgagcatgaatcggtaaaaccagtggtgttccgtcgctggttgcgagaacagggtatcgccgactacaaaatccccgatcgtttcgaaagcctgcctaaattaccgcttactccggtaggaaaaattaataaacaggcgctacgtgcacttgccaacgccgtcttagataattgaggaaacacgccatgagcattcctaaacttcaggattataccctgcccgatgaggccaccttacctgtaaacaaagtagaatggcagttagaaccgcagcgtgccgctctgctgattcacgatatgcaggaatatttcctcaacttctggggaaaagagagcaaaatggttcagcaggttattaataacattgttatcctgcgcgcccgttgccatgaactcggtatcccagtgttttatacagctcagccggaccaacagagtgacgttgagcgagcgttactgaatgatatgtggggaccggggctgaatcgctatccggaacagcaaaaaatcgcggcagcactggcccccgaacaacaggatactgtgctggtgaagtggcgctacagcgcgtttcagcgctctgatttggagacgcacctgaaagaacgtcagcgcgaccagcttataatctgtggcgtgtatgcccatatcggctgcctaaccacggctactgacgcctttatgcgcgatatacaggcgtttatgataagcgatgcactggcagacttcagccgggaagagcacatgatggccctacgctacactgctggccgttccggacaagtgttgagtaccgatatggcactatcggcactcgattctcccgcaacagaaaatagatgggatcgggatcgtttactgaccatactgcaatccacactggatgaagatgtatgcgacattgatgatgacgaaaacttgcttgattatggtttagattcactacgcatgatgtctttcgtctccaagcgccggttggaaggatacgagcttgattttaccgctttaatgaagcaaccaacattgcgaaactggcttgtattactgaatggcgagttggaggcgagatgaacagcttcaagggaaaaaccgtctgggtgacgggtgccgggagcggtatcggttaccgcacagctctcggctttcacgaagcaggagctaaggtttttggattcgatctcaagttccctgattcaatgccgtttgagacgctcattctggatgtcagtaacgattgtgcagtgcaaaaaatctgccctccactgctgaaggaaaacgggctggatgtactggttaatggtgcgggaattttgcgtcttggctcagcagaaacattaagccgtgaagactgggaaagttcaattaacgttaatgctggtgcagcatttaatctgtttaaaatactcattccacatttccagcgtcagcgcaatggtaatatcgtttcgatagtctctaacgccgcccatgtaccgcgcgttaatatggcagtttactgtgcgtctaaagccgcaatgcgcagcttgtgcctgagtgtggggcttgaactggcaccgtttggggtacgatgtaacattgtttcgccgggttccacgctaaccccaatgctggaagggatgctcaatggtgacatagcgcatcagcgtttgattcacggcattaccgaacaatttaaactaggcattccactcgggaaaatcgcacaacccgatgaaatagccaatgtcattctgttcttagcttctgagcaagcaagtcacatcacgttacaggatattgtcattgatggaggtgctacgcttggcgcctgataccccatatgtctatacattgcgtataaatctgtaatgatgtaataaccaaataggttagaaatagagataaaatattttcctgtctataagataaaaaaccggaaaacgataattccatataattggtaagcattaaaaactcaaaccaaagactaactaaaggaaaggtatataatatgaaccctattgctgcattgagaaaagtaacaaatttaaaacaagaatttgatttaatcaaagaagtatggtcaccgaaggtaataactgaaacaaacgaatataagataattatattactcgcagatggtgattttatatggcatacacatgaaaaagaagacaaggtgtttatggtgattgagggtcagctacatatagattttaaagatgagcatgtaatcataaatcaaggtgagttttttgtagtaccgaaaggggaagaaagtaaaccttcttccaccgtattaaccaagctgctattaatcgaacctatagttgcaaactaatgccaatcaatgattaatcaaaattgccaagtcatgaattcagataattattcccagacgtgatttgcaataaaggcagggggatctgccgattaattcccccctgcccctcacccatcgtttattatctttcacttttagccaagctgattaaaccgctaataacgaaaaacctgacgatcgaaatcatcaggtcaagataatcaagtcattttccactacgggaggcgccaaccttattcaaacgaagatcggcgcactcaatgctgattttttagaaactcattttcgcaccaatacctacttcacgcggctctaacatattgccagaaagcccggccttacgatcatggtatttatttgtcggcgcacgtctgtcaaaaatgttatttccgtaggcgaagagttccagattattggtcggattatatgagaaacgaagattggagactgaataagagctgactcgtaattcaggatcgttttggtcatcagagaaataatgatccacgtaacgaagagatccactcagacgaaattgttcggtgatattccagtcagcaccgatattaaacatataaccgggtgctttagagaaatgttttccttcaaacgagtttccccgataatcagcgaattttttgatttcagtatgaagtaatccaagcccgctgtttaagcttaaattgtccagtacccgataatctgcgctgagttcaaccccatagcttaccgctttatcggcgttaacaagaatcgaaccgttagatttgtcttccctgtaatcatctacagcactctggaaccccttataatctgtataaaaaatattactcgttaccagtaatcggttattgatggctttaccacgggcaaacaactcataattccaggccttttccggagcaaaggtataataggaatgcccggagaaattcacacctgtcccgcccggagcattacctttgctgagcccgtcttcgttatagtgc

SEQ ID NO: 1042 - DNA, 5166 bp, Xenorhabdus sp.; identical to SEQ ID NO: 1041
  CDS (3339)..(3665)

SEQ ID NO: 1043 - DNA, 5166 bp, Xenorhabdus sp.; identical to SEQ ID NO: 1041
  CDS (2041)..(2925)

SEQ ID NO: 1044 - DNA, 5166 bp, Xenorhabdus sp.; identical to SEQ ID NO: 1041
  CDS (1151)..(2029)

SEQ ID NO: 1045 - DNA, 5166 bp, Xenorhabdus sp.; identical to SEQ ID NO: 1041
  CDS (2)..(418)

SEQ ID NO: 1046 - DNA, 4423 bp, Xenorhabdus sp.
  CDS (2)..(3538)
gtgctctaaaggccttattcgtgatgaactgaaccagttacatctgcaacttgaattagaagcgctttctgattctgatatctttttattacttcagcagtcgataaatacaactgaaactcttcgccagattgctgaattggcgcaattagtggttaattatccgcaacctgttcatttattcggtgcgatatgtgatcaagagcagctcggttttttacagcagagttctgagattgaagccgcaattacacgcgttcaggcaaaggaaaaaagtcggaatgcacttggtttgttggaaccatatctgaccattcagacacaacaacgcttttccagcgcgattgaacaccaagcatccattaatcattatcttattgcgttacagactgcactgccgacattaaaaccttatttggagtacagtttactttctactgatttcagtgaaattcaccgggagattttggctctcttacgcccttatgctgatgcattttctcagttcagcgacacggaactccttcacacaattgaacaaacgcttaaacaccactattatctggccctgaaaacattatttgagagcagaacgccggctttatctactgagccagatgttctgaataacaactcacagcagctggaaaaagaattagcggagcttcagacgctaaaccgtgaatcactcaataaaggattagagtatcagcaaatcagcccacgaagcgtgtgggaagaaattacccgtttaaccggaaaacgagccagaagattacgggagtttatcgaagaaggagaagcactcggtttgatgcgtcttcgcccgatatggctgatgactccggatattgccagtcagattttaccactcagacccggtttttttgatacggttatttacgatgaggcatcacaaatgccgatagagtatgcgttaccaacgctgtatcgtagtaagcaaatgatagttagtggcgatgataaacagatgccgccttccagtttttttagcggttcaataaataatgatctggaagacggggaggacaatgattctccagaacagcaacagaaaaagagtgataacgaatgggattatcgacaacttgttgagtgcccggatttattgcatctggcacgaacagtgctcccggtttatacactcgacatccactatcgttctgcttaccgcgatttaattaatttctccaaccacgctttttatgaaaaacgcctgaatattccggcacaacattcagaaacagtgctcagtaagataaaaccgctgtcactggagatggtcaatggaacctaccataatcagaccaaccctgaagaagcaaaagctatcataatacgtctggctgaaatatggcggataccatttgaaagccgaccgtctgtcgggattgtcacctttaatcaaaaacaagcccagttaatacatcagttactgatagagctgactgaaacagatacaaatttttgtcagtcttatatacaggaaatgcaacggcaggagcagggtgaagatatggctctgtttgtgaaaaatgttgaaaacgtacagggcgatgaacgggatgtgattttattttccacgacattcggacgtaataaacaaggtacttttcggcgtaatttcggtgtgttagggcaaacaggtggtgagcgcaggctcaatgtggcgattacccgagccagaaaacaagtagttattttctcatcgatgcctctggatgaaatatctgatctgtttgcaagctatcgcaaacctgaaattccccgggatttcttgcagggatatttaatgttctcccgtaacttgtctatcggacaagatgaacagaatcaggcattacttaataaaatgtgtcttactgatacaggatttaatgaccacaaccagatgagtgatggctttgtacagtccgtaatagattttgtacagaatcaaggatggcaaatagctaacgtgcagcaagccggagtgttctattttgattgcattattgaagatacacaaagtggaaaatatatcattggtctggaatgtgatatgccgaatcactcgttattacaacaggcaagggcgcgggaagtatggcgtccaaccgtattaaagaacgttgtaccggcctgctaccgtatctctattgtggaatggttccatcagccggatatagcacaacggaaattggttacagcaattacacaggctttctcagcccagcatatgaatatttataaatcaccgacaggtattgttatgagttcatctttgcacagaataaaggtcagaaaacaacactttattgcttgtcagcgttcacatgctcgattaaagaaatattatcaacgcttggagcaaatcagtcagtcactttcccatattgatgaggcacgaaataaaccattttctcaggtatttcagtcattaagtatgcggatggaaaagggtactactatgtcacccaatgaaatggatactttgcaaaataatattgagaaatttacgcaggatattcagggtgaaatagctctacttgaggctgaattactggaagaacaggagagggaagtacggacaagctatcatcgtagtaagaatctgaaatttgtaactgaccttcttgacgataaattaccggacagtcaaccgtcattagatatggcattaattcattcattgcagaatgatacagagtcaacgagtgattcactttatcaggcaccaatatctgctcaaacaacagctcagtttgagcagatagaagctatgataattagattgggtattcttgataaccagcaggatctcacaccgtatcagacccaataccagaagattttattactcaatgataaagcgcaaaaacaactcaaagccgattccctgatttttgaactggcaaccgaaatcagacagatacaacatttgcagaaccttcgtgttcaactggctgtcactattgctgaactggaaattctggaggatgaagaggccgtgatgattgctcgtgaagctggcaatctagtacagcaaggttcacttgctgaaataacgaatcatcttgcattggtaaatgatgccattactcggatagaacaacgtattaccgcagctgaacgtcgtaatgttgttctggcagggttacgcgagctgggatatcagataaacgaaaatgaggttaatgcatggttgactgatggtcaggtggttatctcgcatccgttaacaccggattatggtttagagcttggtgctggtggtgaagaaagtactcgttttcaggtcaggacagtcgcattttcagaagaaagagatactacacgtgatagggatatcgatgctatctggtgtcagcaacaccatcaactacaagaaaacctgacaaaagcaggtgcggaactgactattgatagagcattacctcccggtagcgggaaaatgaaagtcagagaaccgcataatgttagccgacagcagcgtgtagtgaaccataggaagaaaacgaagatgcatcagaagtaataactcataaatgcaacatgttacgttaatcaacctaccttaaataaacagtaaaagagaatattaatgtagctatatttcggggaaaacgagtgacagataataatccaaagaaagattttataatcagaaatataaatgaaattgagctggataattttgaacgttctccattgtatgcatctcatggaggctctctcaccgaggggactcaggcttctaaactgggcgcttctgttgactgcgttcctcccggaaaacgcgcagtgccatatcattttcattattcacaagaagaaatgttcattgtcatcaaaggatctggaacacttcgtattgctggtgacatgataccgataaaagaaggagatgttatctgcatccctccgggagataagtatccgcatcagattattaatacatccaatgaaatgctgcgttatgtttccatcagtacaatggaaagccctgaaatctgcgaataccccgattcaaataaatacttagctaaagcaaaatctgatgtaaatgggatgaaaagattccgtgctatgaattttatgggcgagggtgttgattattgggagaatgagccataaaaaatctgtagtagtaaggttaatcatcgccatggagaatccggtccccatggcacatatatacaccttacttatcaactgtgaaaggttacgctttcattaacggcaatgcgtcccatacgaacatatgcggatgtctttctcgataaattttgaacacctccatattggaagtatacgactacctgattattgataatcttataaactttaagaaaacatatgagctggtattgtcagagtcaatttgaaagacgtctggaatggggattacacgccgctgaaa

SEQ ID NO: 1047 - DNA, 4423 bp, Xenorhabdus sp.; identical to SEQ ID NO: 1046
  CDS (3631)..(4137)

SEQ ID NO: 1048 - DNA, 4557 bp, Xenorhabdus sp.
  CDS (953)..(2740)
cagcggctaaagccgctgctttcttcaacggcagctctttttgtaataatgccagtgtccgtaatgcttccggcgggagactgtcatctgcgggtttgtgatacccctcaacaatcaacaccatttctccccgacggcgagtttcatcttccctgatccacgccagtaactctcccacaggcataccctgaatagattcccatgttttcgtcagctctcgcgccaacactacatatcgctcagctccccagacttcaacaatatcttctaagctgtccagcaaacgatgagtggattcatagaaaatcattgtccttgattcctgagccaaatcacgcagcgcatcctgacgccctttgcttttggctggcagaaaaccttcatagcaaaaccgatcggaaggcagaccggccgcagataatgccgcaattgccgcacaaggccccggcaacggaacaacactaatcccggcttcacgacagcggcggacaaggtgatagcccggatcattaattaatggtgttccggcatcagagacgagcgcgatacttaaaccttgttgtaatttcgcaattaattgatctgctttctgctgttcattatgatcatgaagtgcgaacatgcgcgcattaatggcaaaatgttgaagtaacaggccggtatgtcgcgtatcttcggcagcaatcaaatcgacatgtttaagaacttcaagtgcgcgctgagtgatatcccccagatttccgataggagttggcacaacatacagcgtagatgtcgtaaccactgctcgattggtttgattcattgtttcatccgaatgaccgatttaaaattgagcatctttgaaaaaaacatcactggatacagtatgcttccctcaatttttgtgcgtttcaaaactggtttagtctgcacagcattgctgacaactatgattattgcagggtgtaccatgcctacaccacaagggcaaccaccttctgagccacaagacaagatcagcgcagagattaaccgctatcaggccattattgataatgcaggcaaccagccttctctggaagtcatccgtgcttatattgcaatggaacccaatatagaaaatgaagccgcacatcagcaaaatattgatgatacttggcaggccctgactcatctcactgcccagcagctcagcgaactggtcattaatgccaatgaatacactcttcagggttggctcgacctgctcaacgcttatcaggccaataagcaggatacggataaacttcgttcggccattcgggactggcaaattcgttatccggaaaaccctgctgttcagagcttgccttcctctctgaaacaaatgttgcatgtcactcaagtccaacaggccagtatcgggcttttcctgcctttgagtggacaggcgaaagcatttggtgatgcgattcgtcaggggtttctggatgcacaaaaaggactgccaaaacctgagctacctgtaagtacatcagctgtagcgcctagtagtgccgtcgacaatacttctgttgataccgattctgttgacacgaattctgttgatagcatcattaccaacgcggtggaaaccgatcaggcgaacactgcggatacaacggaaacggatatgacagggcaattcaccattaattcagttcctgtcaatcatcaagtagtgaaaatctatgataccgacagccagcctttggctaatctgctggcacaggcggagcaggacggagtaacactcgtcgttggccctctgctgaaacctcaggtagaacagctggtacagataaatactccgttaaatattctggcattgaataaaccggataccacacaacttcatcctaatttctgttatttctctctgtcacctgaggacgaagctaaaagcgcagcgcagcatatctggcagcaacagaaacataatccactggtgttagtaccgcgctctgtattgggcagcagagtggcaaatgcctttgcaactgaatggcagcaattagggggttccgaagtattacaacaatccttcggcacagtggcggaaatgagacaatccatgaaccgtggagtcggcatccgtatgtccggaaccgcaattccggtcagcaattctgttcctgacgccaatgaaacgcaattttctgatacaacacaatcagataagcacttacccattgtcaccagcacatctcgtggcccggttgatgcggtctatattgtggcaacaaccgatgagctgacactcatcaagccaatgattgatatggcaatcagctcccgcaaaaaaccggctctttatgccagctcacgcagtaataaagcggatgcaggaccggattttcgtctggaaatggatggtatgcagttcagcgatgtcccattattaacgggagcgaatgttccactgatgaggcaggctgccagtaagttcgggaatgattactctctgatgcgcctctacgcaatgggagttgacgcctggtcactggctaatcattttacacaactacaacaagccagcggtttcaccatgaatggcgaatctggtgaactctctgccacaaatgattgtacaatatatcgccagttaccgtggatgcaattcagcaatgggcgcattatgctggagagccgcatgacagaaaatagcgtaaccggaaatactgacagtacgatgaacaatgctacagagaactcagctactgacaatcatgccgggtagagcctgaatgcagtaagtcagcccgataaataacatcttcttttgagtggtaatttcaggatgaaaaagccccaaattaatcgttacgcgcagggatgccattacgaacaacaggttaaacagtttctgcaaaaacaggggcttgtgtttattgcagagaatgtgaaaattcgtggtggagaaatcgatctgatcatgcgtgacaagcaggtctgggttttcgttgaagttcgtttccgccagaatgcacaatatggtgatgccattgctacaattacccagagcaaacgcagaaagttattgcatacggcttcggtctggctttaccagcgtaacgaatctcttgatactgcggcctgccgttttgatgtttgcgcaattaccggtcagaaatttgaatggctgaaagatgccttcaatttaaatgaaaacctatctgataggttctgaatttcaataaatatattatcaataatataggtcataacgtgctggatagaattaaagtctgctttacagaaagtattcaaacgcaaatcgcagcagcagaggcattaccggacgccatttcacgcgccgcaatgatgatggttcaatcactgctgaatggcaacaagatcctgtgctgtggcaatggcggatccgccgcaacagcacaacgttttgccgccagtatgataaatagatttgaaacagagcggccaagtctgccagcattgtcactgaatgctgataatgttgtcatcactgccatcgccggcagcaggcagccggaagaaatctacgctaagcaggtccgggctctggggcaggccggagatgttctgctggctatttctacgcatggtaacagccgggctatcattaaagccgtagaagcagccgttacccgcgatatgaccattgttgcactgacaggttttgatggcggtgagttagcagggttactcggaccacaggatgtggaaatccgtattccttcccaccacagtgtcaggattcaggaagtccatatgctgacaatcaactgtctgtgtgacttaatcgataatactttatttcctcatcaggatgactaaggagccaaataatgcggttactctctttattactggtattttgcagcacaatgttactacaggggtgtattggtgcagcccttgtaggctctgcggcaattgctaccaaagcaggtacggatccacggacagttgggcaacaggtggatgatacgactctggaagcccgtgtcagtaatgccataagcaaagatccacaaattaagtctcagacccgtatcgtcacgacggtttatcagggaaaggttctgttaaccggacaaagcccggatatgcagctggcagagcgggcaaaacagatagcgtcgagaactgaaggtgtcagtgtggtctataacgaaattagacaaggtaaacccgtttctcttggtgctgcctcagtggatgcctggctgacaacgaaagttcgttcaaaaattctggccagcgatgctgtgaagtcatcaaatatcaaagtggtgactgaaaatggcgaagtctttttattcggaattgtaaccagacaggaaggtgctgatgcggcgaaaattgccagtgaaactgacggcattaaacgtgtaaccaccgcatttacttatctcgactaaccgccgggttatttttacaagcagagcagcatgaaaacagggcgctctgcttgtacttctatattcaccgtctttccggcaataccacaacactatatcttcagtttattcgagtcagaaaatgcttccctcccaataacaatagggcgca

SEQ ID NO: 1049 - DNA, 4557 bp, Xenorhabdus sp.; identical to SEQ ID NO: 1048
  CDS (2813)..(3190)

SEQ ID NO: 1050 - DNA, 4557 bp, Xenorhabdus sp.; identical to SEQ ID NO: 1048
  CDS (3235)..(3819)

SEQ ID NO: 1051 - DNA, 4557 bp, Xenorhabdus sp.; identical to SEQ ID NO: 1048
  CDS (3831)..(4406)

SEQ ID NO: 1052 - DNA, 4557 bp, Xenorhabdus sp.
  CDS (3753)..(4556)
tgcgccctattgttattgggagggaagcattttctgactcgaataaactgaagatatagtgttgtggtattgccggaaagacggtgaatatagaagtacaagcagagcgccctgttttcatgctgctctgcttgtaaaaataacccggcggttagtcgagataagtaaatgcggtggttacacgtttaatgccgtcagtttcactggcaattttcgccgcatcagcaccttcctgtctggttacaattccgaataaaaagacttcgccattttcagtcaccactttgatatttgatgacttcacagcatcgctggccagaatttttgaacgaactttcgttgtcagccaggcatccactgaggcagcaccaagagaaacgggtttaccttgtctaatttcgttatagaccacactgacaccttcagttctcgacgctatctgttttgcccgctctgccagctgcatatccgggctttgtccggttaacagaacctttccctgataaaccgtcgtgacgatacgggtctgagacttaatttgtggatctttgcttatggcattactgacacgggcttccagagtcgtatcatccacctgttgcccaactgtccgtggatccgtacctgctttggtagcaattgccgcagagcctacaagggctgcaccaatacacccctgtagtaacattgtgctgcaaaataccagtaataaagagagtaaccgcattatttggctccttagtcatcctgatgaggaaataaagtattatcgattaagtcacacagacagttgattgtcagcatatggacttcctgaatcctgacactgtggtgggaaggaatacggatttccacatcctgtggtccgagtaaccctgctaactcaccgccatcaaaacctgtcagtgcaacaatggtcatatcgcgggtaacggctgcttctacggctttaatgatagcccggctgttaccatgcgtagaaatagccagcagaacatctccggcctgccccagagcccggacctgcttagcgtagatttcttccggctgcctgctgccggcgatggcagtgatgacaacattatcagcattcagtgacaatgctggcagacttggccgctctgtttcaaatctatttatcatactggcggcaaaacgttgtgctgttgcggcggatccgccattgccacagcacaggatcttgttgccattcagcagtgattgaaccatcatcattgcggcgcgtgaaatggcgtccggtaatgcctctgctgctgcgatttgcgtttgaatactttctgtaaagcagactttaattctatccagcacgttatgacctatattattgataatatatttattgaaattcagaacctatcagataggttttcatttaaattgaaggcatctttcagccattcaaatttctgaccggtaattgcgcaaacatcaaaacggcaggccgcagtatcaagagattcgttacgctggtaaagccagaccgaagccgtatgcaataactttctgcgtttgctctgggtaattgtagcaatggcatcaccatattgtgcattctggcggaaacgaacttcaacgaaaacccagacctgcttgtcacgcatgatcagatcgatttctccaccacgaattttcacattctctgcaataaacacaagcccctgtttttgcagaaactgtttaacctgttgttcgtaatggcatccctgcgcgtaacgattaatttggggctttttcatcctgaaattaccactcaaaagaagatgttatttatcgggctgacttactgcattcaggctctacccggcatgattgtcagtagctgagttctctgtagcattgttcatcgtactgtcagtatttccggttacgctattttctgtcatgcggctctccagcataatgcgcccattgctgaattgcatccacggtaactggcgatatattgtacaatcatttgtggcagagagttcaccagattcgccattcatggtgaaaccgctggcttgttgtagttgtgtaaaatgattagccagtgaccaggcgtcaactcccattgcgtagaggcgcatcagagagtaatcattcccgaacttactggcagcctgcctcatcagtggaacattcgctcccgttaataatgggacatcgctgaactgcataccatccatttccagacgaaaatccggtcctgcatccgctttattactgcgtgagctggcataaagagccggttttttgcgggagctgattgccatatcaatcattggcttgatgagtgtcagctcatcggttgttgccacaatatagaccgcatcaaccgggccacgagatgtgctggtgacaatgggtaagtgcttatctgattgtgttgtatcagaaaattgcgtttcattggcgtcaggaacagaattgctgaccggaattgcggttccggacatacggatgccgactccacggttcatggattgtctcatttccgccactgtgccgaaggattgttgtaatacttcggaaccccctaattgctgccattcagttgcaaaggcatttgccactctgctgcccaatacagagcgcggtactaacaccagtggattatgtttctgttgctgccagatatgctgcgctgcgcttttagcttcgtcctcaggtgacagagagaaataacagaaattaggatgaagttgtgtggtatccggtttattcaatgccagaatatttaacggagtatttatctgtaccagctgttctacctgaggtttcagcagagggccaacgacgagtgttactccgtcctgctccgcctgtgccagcagattagccaaaggctggctgtcggtatcatagattttcactacttgatgattgacaggaactgaattaatggtgaattgccctgtcatatccgtttccgttgtatccgcagtgttcgcctgatcggtttccaccgcgttggtaatgatgctatcaacagaattcgtgtcaacagaatcggtatcaacagaagtattgtcgacggcactactaggcgctacagctgatgtacttacaggtagctcaggttttggcagtcctttttgtgcatccagaaacccctgacgaatcgcatcaccaaatgctttcgcctgtccactcaaaggcaggaaaagcccgatactggcctgttggacttgagtgacatgcaacatttgtttcagagaggaaggcaagctctgaacagcagggttttccggataacgaatttgccagtcccgaatggccgaacgaagtttatccgtatcctgcttattggcctgataagcgttgagcaggtcgagccaaccctgaagagtgtattcattggcattaatgaccagttcgctgagctgctgggcagtgagatgagtcagggcctgccaagtatcatcaatattttgctgatgtgcggcttcattttctatattgggttccattgcaatataagcacggatgacttccagagaaggctggttgcctgcattatcaataatggcctgatagcggttaatctctgcgctgatcttgtcttgtggctcagaaggtggttgcccttgtggtgtaggcatggtacaccctgcaataatcatagttgtcagcaatgctgtgcagactaaaccagttttgaaacgcacaaaaattgagggaagcatactgtatccagtgatgtttttttcaaagatgctcaattttaaatcggtcattcggatgaaacaatgaatcaaaccaatcgagcagtggttacgacatctacgctgtatgttgtgccaactcctatcggaaatctgggggatatcactcagcgcgcacttgaagttcttaaacatgtcgatttgattgctgccgaagatacgcgacataccggcctgttacttcaacattttgccattaatgcgcgcatgttcgcacttcatgatcataatgaacagcagaaagcagatcaattaattgcgaaattacaacaaggtttaagtatcgcgctcgtctctgatgccggaacaccattaattaatgatccgggctatcaccttgtccgccgctgtcgtgaagccgggattagtgttgttccgttgccggggccttgtgcggcaattgcggcattatctgcggccggtctgccttccgatcggttttgctatgaaggttttctgccagccaaaagcaaagggcgtcaggatgcgctgcgtgatttggctcaggaatcaaggacaatgattttctatgaatccactcatcgtttgctggacagcttagaagatattgttgaagtctggggagctgagcgatatgtagtgttggcgcgagagctgacgaaaacatgggaatctattcagggtatgcctgtgggagagttactggcgtggatcagggaagatgaaactcgccgtcggggagaaatggtgttgattgttgaggggtatcacaaacccgcagatgacagtctcccgccggaagcattacggacactggcattattacaaaaagagctgccgttgaagaaagcagcggctttagccgctg

SEQ ID NO: 1053 - DNA, 4758 bp, Xenorhabdus sp.
  CDS (2160)..(3365)
gtgctctaaagttatgatgagactaggcagagatcctgctattggctccagtgtgatgataactgcgattactgataccggtggtttttttatctttttagggctggcaaccctgtttttggtttaatgcgtaaaaaacatcaactgacttaacccgtatataatgcgggttaatatttatcatttgaaaatattttgatgattatgaaaagacttttgattggctgctcataattttataattgatgaaactcaataaactactcaataggcttttcagtatagtattttattaattcactgtgctcattaactatttccatttttctgggatcgtctttatatttttccttcaactcataaaataattcattggctctcttacaatatatattaatctcatcttccagtaatcgctttctttcatcagacagatcactatcccattcacctgcaagatattcgcaatattcagtttttttcatatattcttgcaaatcttttggcatattatctctcaatgcccatgaaactccatgtaggcagaaaaaaaatcacacacgatataattatcttttccattttattgctaattttccatgcccaatgcattagaaaagctctctctgggagtctcacggttaaagatattattactctggcacctgatttgtttcattgtcacgcttaaacaacctgtataggagatttaagcgtgacaatgaaacgccgattgaatttatcggcgttttggcagttattacattaactcaacatcaatagactctttcgtcccagacactatatccggatgttcctgccatatgatggcgactgatgatatctttatatttaacagatacaatttcttccggctgtgcttccgcatggttaatactgtgcggataattcggtgataactcaataatcgtcgcatcacgacactcaattgagtaatagagttcctgagagcctaattgtgaggtgcgataaaaatcaaatttcagattcaaactttcattatccgaaattgccatcattaataacggtgatgatttatcctgcggctttacaaatacaattggactatggttaacattttgttctctgtgaatggaatgatgaagatttaatacaaaaatttcatcttcatgacctgcctgatacttattgccaatggattcaactgaagagcaaccttgtgaaatcaacccttgtttgtttccttgcaaggttaaatagatcatattcgccataataacttcctgttttgttaaggttttaataactatcaatcgcttctaatatggtctggagtactacattttttcaggggtaatgtgattaaaatcacgatcccctaaaccaaactatattttcattgttgctaattctagcgactcactttatcagcgataatgcgatattataccaacaaaaaacaagataggatatgtgtattatttgataattcactcagtattacttccgtttttataaatatcaactatgctatgaaaactgataacaaaataaaatctaacagattgttattttttatagatctatctgaatagatatatcgtactaatcaagtatttttattttatgaatatcatctttgtatttattttttagtttattatgtaaaatttttgcttttttgcaatattccgctgaaccttcctctatttcttttttacgatcttcaggaagagaattatcccattcattagagaagtgttgacaagtttctatactatctatgtattcctgaatatctagtgggatttcgctttctgatgtaaatgaataagcagaaaaaagtgaaattataatacctaatattattgattttttcatatttcccatctccttatgctatgcttattgcttttaaatttaacaatcattcctgataaaaaatactttatcagatatcacgtatgctaatggatgttttacatgctctctcgccctccatagcttcgatttcctcataaaacgttctgcgttatctcattgacacaatttccatattttctccatgattggcaatttctctccaagtacactaattaaatatatatttacactaatttagcataagatgcatacgtggctgattaccgatgcaatattaagagaatgtcgaatatatgagcaataaacgtcgtacctactttttttgttttgctgcgttagtcgttgtcatcgcagcaattttctttgcatggaaccatttcaaaacatcacaaaagtccggcccacaacagaatttagcaacagaaccaccccgtcctgttcaggcggctaccgctaaaatggaatccgtgccccactatatggtagggttaggcacggttcaggcggcagatactgtcaatgtcaccagtctggtgagcgggcaattaattgccctgcattttatagaaggccaagaggtgaaaaaaggggatttactggcagaaattgatccccgcccttatcaggtcagactggcaaaagcacaaggccaatatgttaaagatcaggcaatgctggctaatgctgagcaggatttggcccgctatcaacaactggcaaaaagtaaattaatttctcaacaggatctggataaacagcacgctttagtgcgtcaatataaggccgccctaaaaagtgatcaggcagagattgatgaacaaaaactccaattagcctacagccgtatcaccgcccccatttcaggtcgtgtcggtctgaaacggatagatgtcggtaactacatctcttctgggggagaaaaaccgattgtcgtcattacgcgcgttgatccaatcgacgtactgttttctctgcctgaaaacgatctcagtgccatactgaaggcacagaaaaataatacgatacctgccgtcattgcccgggatcgcaataaccagctgcaattagcacaaggcaaactactcagtatcgataaccaaattgacgttgcaaccggcaccataaaaatgaaagccagatttgataatcaggataacacactgtttccaaatcaatttgtcaatattcaaatcaaagtcaatacgctggataacgccatcgtcatccctgatgctgcattacagatgagtggcaacggtcactttgtctggctggtaggtaaagataataaggtcaaaaaacataaaataaccatcgtgctgcaaaatgataatctggttattatcaacagtggtctgtccgttggtgatcgggtaataacagacggtattgatcagttgacagaaggagccgctgttgaaattgttaaacctctgcaaccaaaatcagataacagcaacgataaatcagctaaatcaaacagtaaggtggagaaatagttaatgctttctgattctccggtgacagggggcggcccatcccgcttgtttatactgcgtccggtagcaacgacgctgtttatgattgcaattttgcttgctggtattcttggctatcggatgctgccggtttctgcattaccacaggtggattatccgactattcaggttgttacactctatcccggcgccaatcctgacgtgatgacctccgccataacagccccgctggaacgcagattcgggcaaatatccggcctgaaacagatgtcatcacaaagttctggtggagcttctgttattacgctggtcttccagctttccctgccactggatgttgcagagcaggatgtgcaggctgcaattaattcaagtatcaatctgttacctaatgacctgccctaccctcctatttacagtaaggtgaatccggctgatccaccgattttaactctggccgtcacttctgatgccctgccaatgacagaagtgcaggatatggtggaaacccgtgttgctcagcgtatttctcaggtcggtggtgttggcttagtcacactggctggcgggcagcgtcctgctgtccgcgtgaagttaaatgcgcaggccatagccgcacaggggctggatagccatgccattagtaatgcgattgtcagtgcgaatgtgaattcaccaaaaggcagttttgatggtccaacgcggtcgattactttatctgctaacgatcagatgaaatccattgatgattaccgcaacttaatcgtgacctataaaaatggggctccggttcgtctgcgtgatgttgctaccattgagcgggaagcagaaaatacgaaactcggtgcgtgggcaaatgaaaaacccgccattgttattaatgttcagcgtcagccgggcgctaatgttattgaaaccacggataacattcgtagcgtgttgccagagctgataagcagcctgcctaaatcggttaaagttgacgttctgacggatcgtactgtcacgatccgcgcttccgttaaagacgttcaatttgaattattgctggcggttgctctggttgtcatggtgatttacctgtttttgcgtaatgccgccgcgaccttaatcccaagcattgccgttccgctttcacttatcggcacatttgcagtgatgtatttctgtggtttctccatcaataacctgacattgatggcactgaccattgcaactggctttgttgtcgatgatgccatcgttgtcatcgaaaatatttcccgctatatcgaacggggagaaaagcctctcgccgctgccctcaaaggggcgggagaaatcggcttcaccattatctcactgactttttctctgattgccgttttgatcccactgttatttatgggggata

SEQ ID NO: 1054 - DNA, 4758 bp, Xenorhabdus sp.; identical to SEQ ID NO: 1053
  CDS (3384)..(4757)

SEQ ID NO: 1055 - DNA, 4758 bp, Xenorhabdus sp.
  CDS (4250)..(4498)
tatcccccataaataacagtgggatcaaaacggcaatcagagaaaaagtcagtgagataatggtgaagccgatttctcccgcccctttgagggcagcggcgagaggcttttctccccgttcgatatagcgggaaatattttcgatgacaacgatggcatcatcgacaacaaagccagttgcaatggtcagtgccatcaatgtcaggttattgatggagaaaccacagaaatacatcactgcaaatgtgccgataagtgaaagcggaacggcaatgcttgggattaaggtcgcggcggcattacgcaaaaacaggtaaatcaccatgacaaccagagcaaccgccagcaataattcaaattgaacgtctttaacggaagcgcggatcgtgacagtacgatccgtcagaacgtcaactttaaccgatttaggcaggctgcttatcagctctggcaacacgctacgaatgttatccgtggtttcaataacattagcgcccggctgacgctgaacattaataacaatggcgggtttttcatttgcccacgcaccgagtttcgtattttctgcttcccgctcaatggtagcaacatcacgcagacgaaccggagccccatttttataggtcacgattaagttgcggtaatcatcaatggatttcatctgatcgttagcagataaagtaatcgaccgcgttggaccatcaaaactgccttttggtgaattcacattcgcactgacaatcgcattactaatggcatggctatccagcccctgtgcggctatggcctgcgcatttaacttcacgcggacagcaggacgctgcccgccagccagtgtgactaagccaacaccaccgacctgagaaatacgctgagcaacacgggtttccaccatatcctgcacttctgtcattggcagggcatcagaagtgacggccagagttaaaatcggtggatcagccggattcaccttactgtaaataggagggtagggcaggtcattaggtaacagattgatacttgaattaattgcagcctgcacatcctgctctgcaacatccagtggcagggaaagctggaagaccagcgtaataacagaagctccaccagaactttgtgatgacatctgtttcaggccggatatttgcccgaatctgcgttccagcggggctgttatggcggaggtcatcacgtcaggattggcgccgggatagagtgtaacaacctgaatagtcggataatccacctgtggtaatgcagaaaccggcagcatccgatagccaagaataccagcaagcaaaattgcaatcataaacagcgtcgttgctaccggacgcagtataaacaagcgggatgggccgccccctgtcaccggagaatcagaaagcattaactatttctccaccttactgtttgatttagctgatttatcgttgctgttatctgattttggttgcagaggtttaacaatttcaacagcggctccttctgtcaactgatcaataccgtctgttattacccgatcaccaacggacagaccactgttgataataaccagattatcattttgcagcacgatggttattttatgttttttgaccttattatctttacctaccagccagacaaagtgaccgttgccactcatctgtaatgcagcatcagggatgacgatggcgttatccagcgtattgactttgatttgaatattgacaaattgatttggaaacagtgtgttatcctgattatcaaatctggctttcatttttatggtgccggttgcaacgtcaatttggttatcgatactgagtagtttgccttgtgctaattgcagctggttattgcgatcccgggcaatgacggcaggtatcgtattatttttctgtgccttcagtatggcactgagatcgttttcaggcagagaaaacagtacgtcgattggatcaacgcgcgtaatgacgacaatcggtttttctcccccagaagagatgtagttaccgacatctatccgtttcagaccgacacgacctgaaatgggggcggtgatacggctgtaggctaattggagtttttgttcatcaatctctgcctgatcactttttagggcggccttatattgacgcactaaagcgtgctgtttatccagatcctgttgagaaattaatttactttttgccagttgttgatagcgggccaaatcctgctcagcattagccagcattgcctgatctttaacatattggccttgtgcttttgccagtctgacctgataagggcggggatcaatttctgccagtaaatccccttttttcacctcttggccttctataaaatgcagggcaattaattgcccgctcaccagactggtgacattgacagtatctgccgcctgaaccgtgcctaaccctaccatatagtggggcacggattccattttagcggtagccgcctgaacaggacggggtggttctgttgctaaattctgttgtgggccggacttttgtgatgttttgaaatggttccatgcaaagaaaattgctgcgatgacaacgactaacgcagcaaaacaaaaaaagtaggtacgacgtttattgctcatatattcgacattctcttaatattgcatcggtaatcagccacgtatgcatcttatgctaaattagtgtaaatatatatttaattagtgtacttggagagaaattgccaatcatggagaaaatatggaaattgtgtcaatgagataacgcagaacgttttatgaggaaatcgaagctatggagggcgagagagcatgtaaaacatccattagcatacgtgatatctgataaagtattttttatcaggaatgattgttaaatttaaaagcaataagcatagcataaggagatgggaaatatgaaaaaatcaataatattaggtattataatttcacttttttctgcttattcatttacatcagaaagcgaaatcccactagatattcaggaatacatagatagtatagaaacttgtcaacacttctctaatgaatgggataattctcttcctgaagatcgtaaaaaagaaatagaggaaggttcagcggaatattgcaaaaaagcaaaaattttacataataaactaaaaaataaatacaaagatgatattcataaaataaaaatacttgattagtacgatatatctattcagatagatctataaaaaataacaatctgttagattttattttgttatcagttttcatagcatagttgatatttataaaaacggaagtaatactgagtgaattatcaaataatacacatatcctatcttgttttttgttggtataatatcgcattatcgctgataaagtgagtcgctagaattagcaacaatgaaaatatagtttggtttaggggatcgtgattttaatcacattacccctgaaaaaatgtagtactccagaccatattagaagcgattgatagttattaaaaccttaacaaaacaggaagttattatggcgaatatgatctatttaaccttgcaaggaaacaaacaagggttgatttcacaaggttgctcttcagttgaatccattggcaataagtatcaggcaggtcatgaagatgaaatttttgtattaaatcttcatcattccattcacagagaacaaaatgttaaccatagtccaattgtatttgtaaagccgcaggataaatcatcaccgttattaatgatggcaatttcggataatgaaagtttgaatctgaaatttgatttttatcgcacctcacaattaggctctcaggaactctattactcaattgagtgtcgtgatgcgacgattattgagttatcaccgaattatccgcacagtattaaccatgcggaagcacagccggaagaaattgtatctgttaaatataaagatatcatcagtcgccatcatatggcaggaacatccggatatagtgtctgggacgaaagagtctattgatgttgagttaatgtaataactgccaaaacgccgataaattcaatcggcgtttcattgtcacgcttaaatctcctatacaggttgtttaagcgtgacaatgaaacaaatcaggtgccagagtaataatatctttaaccgtgagactcccagagagagcttttctaatgcattgggcatggaaaattagcaataaaatggaaaagataattatatcgtgtgtgattttttttctgcctacatggagtttcatgggcattgagagataatatgccaaaagatttgcaagaatatatgaaaaaaactgaatattgcgaatatcttgcaggtgaatgggatagtgatctgtctgatgaaagaaagcgattactggaagatgagattaatatatattgtaagagagccaatgaattattttatgagttgaaggaaaaatataaagacgatcccagaaaaatggaaatagttaatgagcacagtgaattaataaaatactatactgaaaagcctattgagtagtttattgagtttcatcaattataaaattatgagcagccaatcaaaagtcttttcataatcatcaaaatattttcaaatgataaatattaacccgcattatatacgggttaagtcagttgatgttttttacgcattaaaccaaaaacagggttgccagccctaaaaagataaaaaaaccaccggtatcagtaatcgcagttatcatcacactggagccaatagcaggatctctgcctagtctcatcataactttagagcac

SEQ ID NO: 1056 - DNA, 4758 bp, Xenorhabdus sp.; identical to SEQ ID NO: 1055
  CDS (3503)..(3982)

SEQ ID NO: 1057 - DNA, 5339 bp, Xenorhabdus sp.; identical to SEQ ID NO: 48
  CDS (1467)..(2495)
  unsure (1)..(5339): unsure at all n locations

SEQ ID NO: 1058 - DNA, 5339 bp, Xenorhabdus sp.; identical to SEQ ID NO: 372
  CDS (3914)..(4480)
  unsure (1)..(5339): unsure at all n locations

SEQ ID NO: 1059 - DNA, 5339 bp, Xenorhabdus sp.; identical to SEQ ID NO: 372
  CDS (3)..(1319)
  unsure (1)..(5339): unsure at all n locations

SEQ ID NO: 1060 - DNA, 3318 bp, Xenorhabdus sp.
  CDS (3039)..(3317)
tgtgctctaaagttgatctatcattttgataatattagccacacagtgacgacgaggaatgccgtgagtaaatgaggtatattgtttaagccactctatttgtaactcaccaaattcttgaatcgatttccagccagaagcgccacataacacagcagaaaaggccaaaaaaatgacatccatcaattcatgttttttattgatgtcagaacgtgggtcatctatttttctgataaaattaaaaatattcattattaagcacactgtttatggaatagcgtgatcttaacgttttaaggagagaaatgcttataaaagtccgtatattgacttttatttgacctaaataaccttatgaaaaatgtgagatctcgccctgatacacttcgtctttcaagttgcctctttgttggctacgctcactcaccccggtcaccgtttttataaacatacggttatctatgctcccggggatgcgttcccttgccgccgcgatgcatcttgaaatccattgtgtatagctgaatatatctcaaaaaagaatcgctcccagtctttcgatcagggagcgatatctatacctatacccttcgtctttcaagctgcctctttgttggctgcgctcgctcaccccagtcaccgtttttataaatatacggttatctatgctcctgggggtttactcccttgccgccgcgatgcaactcgaaatccattgggtatatcggatgtataggttggaattgaaatcagttcagatacagcgttagcgccagacccggtttcatatctttgagcttgatgcccttattccagttcatcagatcattaagatttacaccatgccgtttagcaatgctggtaaaagaatcccctttgcgaacctgatatttaatcggttcactgatattcaccttcagaacctgcccgattttgagcctgtcagcagtcttcagaccgttcaatttctgtagttgatagtgagatgtcttaaatcgctttgcaatagcagataaggtatcacctgaacgaacggtgtaatgactttgttgatgtaactgacgaagatttttcgcaacggccagactaatctctttcaacacactcttatctgccagtgagtgtttaagctgaccagcattctcctttggcaacataatgtaatgcggcccatgaggagaggtcatgccctgtttatagccggggttataagctttcatggaggtcagggaaagcccggacaactcagcagcctgtgatagcgtgatttgctgccctacctcaactttggcaagtgcctgctgaatattgggtttcggtaatgtaaagccatatttttcgttttgacgaatgacattactgagtgccagtatcttaggaacgtaatgcatcgtttcacgtggcaactccaatgaccaaaaatctgttggtttccccttagactgattttctctgattgcccgtgcaacgcggccttcaccactgttataagccgctatagtcagtaaccaatccccgttaaaacggacattcaaacgctcaagcatattcagggctgcggttgtggatgccgcaacatcacgacgtgcatcgtaccatttatcctgcgtcagaccataatgccggcctgtactgggaataatctgccataagccaaccgcgttggcgtaagatgtcgcatgaggattaaaagcactctccactatgggaagcaaggccacttccataggtatatttcgctgatcaatctgctcaacgatccaatacatatatggttccgagcgtaacgccacattttggagataactcttgtgtttcaggtaataattctgctgttcacgcaccctgttattatcaggaatttccatcttcaactcatcacggatatgtccccacaaatcttgttgagctgtcggactctccttccagtttgcagtttcctctggtactgcaataccgtttgttttctgattcgtcgaagacatcttctgtgtatgctgctgggaaggggactttggttgtagccccgactgacacccggcaagcaagacagatgcgaataggatcgcttttgtcttcatattctgctttgatgtttgcctaaaaggtgagcaatcatactgacctattaagcagaagacaacccgaaaaagtcaaaatcgatctttataagcccttaattgctgaaaaacagaagaaagtggtattgaattaggtttaataccgatatttttttgtaaatcaatatcgtgacaatttagaaaaacgttaatttttttctctattttcaatgtggtagggacggttgcctgatctttttcacgtaactcgataattttcttatgataatcgttaatagcctgattttcaggtaatacagccagcgcaaatttcatattcgcggcagtatattcatgggcgcaacagatcaacgtttcatcaggcagcgaggcaattttctcaagggaagaaaacatctgttcagcggtaccttcgaagagcctgccacaacccgccgaaaacaaggtatccccacaaaatagataaggggcctgatagaaagcaatatgtccaagggtatgacccggtagggcaagaacctgaaaagaaaaattacctgtcacaataagatcattttcatgaacaacgtgagttgcccctttactttgagtctcttccgggccatatacaggtaatgttggatattgcttaagtagcccagcaacaccgccaacgtgatcgtggtgatggtgtgttaacaggatagcaatgggaataagttggttagctgctaaagtatccataacaggctgtgattcagcgggatcgataatgacacaatgcctgttctcgtcacaaagtaaccaaatgtagttatctgaaagggctgggagcctgataagcttcatgatatgcctcgtttagcaatcgattttattcttaatgggtttcaagatgcatcgtggaggcaagtgaacgccaccaacaaagaggcaacttgaaagacggagagtatagtaggttggaaggaagatgacatgcaatcagcacgtgcaatcaaacaaataaccctgcctgcttcctgggctgaattaccatggggtgagtattaccgtgtcgctttggaacatcaattggaaccgtggtggccgaaaatttttggttttcatttagtgaaagtcggcaatttaagtgtagaaattgacagccgctcgtgcttaatcagccatcaggttaatgtgggactgaaaggtgaaagcatgaatgtgattgccgatcctcactatctcccttttgaggctaagtgccgtggatgcc

SEQ ID NO: 1061 - DNA, 3318 bp, Xenorhabdus sp.; identical to SEQ ID NO: 175
  CDS (3094)..(3312)

SEQ ID NO: 1062 - DNA, 3318 bp, Xenorhabdus sp.; identical to SEQ ID NO: 175
  CDS (410)..(1165)

SEQ ID NO: 1063 - DNA, 5005 bp, Xenorhabdus sp.; identical to SEQ ID NO: 176
  CDS (4208)..(5005)

SEQ ID NO: 1064 - DNA, 5005 bp, Xenorhabdus sp.
  CDS (4599)..(5003)
tgctctaaagtcagctaattttccaacaatgatattacctattattgtcgcgataccatagaggataagcaggctggcaattgtttcttcttgataacctgtcacgtcttttaatatgggggtgaagtaagtaaaggcggcaaaagtagcaccaataatcagtaaactggtagaaaaaactcgccataattctggattgttaagagtatgaaattcagctcgtaaactgattgaagattgctttggaataaacggaagccagaataagctaatgattccggcaatagtagcgagggcagaggttgtccaaaagctgattctccagccaatatatgtgcctatcaggttcgccattggtaatcctaatatggttcctatcataataccggagagaacaatagaaattgcccaccctcgttgctgctttgccacaatttctgcgcaaatagatacagacataccaaaaaaggcaccagaaacagctccggttattactcgagcaattgctagaacggtataagaatcagctaatgctccaagtatttcgccgataataaaaatcaaataaaggctaagtaacgcagttttaggaggcgtttttaataatcccagtgtaagtaacggaccaccaaaagtcattgccaaagcatatagagagaccagataaccaatttcagaaatagaaacgtttaagtcatcagccatgattgtcaccatacctgtgacctgaaattcgctggtgaccatagagaagacgccgaatgccagtatataaatagacagagggatcgtacttttagttattgcagctggaatagcgatattgcctttacatttttccattttatcgccttgcttatcgaatgtttattttgtagtggttattacaaaattatcttacttgctaaaattgatcaagggatttatgttattctcactacagaaatgacgaaggtacatataatggcatcgcgtggacgtcctttgagttttgaccgtgaggttgctctccaacaagcaatggaggttttttggtctaaaggatatgaaggaacacaacttgttgatctaaccgcggcaatgaatatcaatcctcctagtttttatgcagcatttggcagtaaaaaacaggctttttatgcggcggttgatttatatattaaaaccataggcgctaaagctatggatagtcttaacaatgcagaaagtgtaaagcaagggttgcgtgctatgttagaggtttctgtggaagtagctacttcgaatcagtcaggcggatgtttactcgttctgggaatagtcaataatttacaagaaaacgaggatgcttatgcttacctgaaagaggttcgtcaatatacatggaagctaattcatacacggatagcgaaagcagtagcagatggtgaattatcgggtgaaacagagacaggaaaattagcatcttattttttgggggttatgcaggccatttcatttcaggctcgcgatggagtttccagagaagatctcatgtgtttgattgagcctgcaatggctgtaatatccttataaatcgccaacgccattacaggtcacacatcatggcctgataaattgctaaacagccgttgctatcccacttttaattcactccagtggctgataatttgcccgacgatgccgtaatcacgggcttcctctggtcccatccagaaattacggtcagtgtcttttgccactttatctatagggtgcccggtggcttcactgataagctgatttatacgaccacgcatttttaatatttcttttgtttcaatttcgatatcggtagctcttccctgaacgccacctaaaggctgatggatcataaatcgggtattaggaaggcaataacgatgttcttttttggcggcaaggaagagagtaatacctgcactggcgacccagccagtaccaatcataagaatctctggctgaataaatttgaacatatcatgcagagtatccccggattcgacgtgtccaccctggctgttaacaaaaacttttatagggttattattgagctcctgtagtagaagaagctgagttatcactttttcaaccagttgttggttgatttcaccggagataattatagagcgtgattggaagagtttgtcgtggaaaagtggcgtgatgagattatttttttctaggctgttgtctgtcatttttattctcacttaaaaaatattgtttgtgatgatatttattatagtcttaaaataatttccattcataaatgtaacaatatatataaattaatttttttaatctctcagggtttaattccccgtcgcttgcgacgaataaataagaattgaacgatgcaaagcgggtgatttcatacctaaataccccgctgcttgcggcggggatgtttattttatgtaactcatataataaaattagttatatgcattgtatgttgatatttatgtatcatttgatttgtttttatgggattaatttctctgttattttaaatgattataacgcgattgatttttgttatatcagtaaggatttcagtaaatatctaatacaaatattccgcaattaggatttatttgtattgatgagaatgtaataaattaggaatgcattatggaacactttgatatagaaaaaatatcggaaaaaatcttgcatgaattactacaatatcggcgtcgctttcccacatctgagtatacaattgaatacgaagaacaatacgttgccgtggttcagttaccacgtattcgtgcatttgtcaaacagagtaaaacaatccaatgtattctaccggcatttccgacgaaatcaccaaatcttcggaaagtactgggtacggtacctgatatggcagaaaaattatcattgatttttttaaactctttatgtcaacggattcagctttattacccaccgggagcaaatattgctatttgttctgacgggcatgtatttagtgatttaattcgagttaatgatgaaacagttactcattatcaattagagattgaaaagttattacatgagttgggagcaactaatctctcagtttttactctgagtaatgttgaattgttctctcaatataccaatgattataataaattacgtaatcttttggttaatagttatgcattttctagtgaaaaagtgaaatctatattaaaaggaagtgaagaaggaattcaattatatagggcaattactcgttttctttacgaagacagcttattaccggaatatgttgggtctaaaaatgctttacagaaagatgcacgtcagcgggctattggggtaattcaacggagctgggcttggggacatttattggctggactattccccgatgctattcgtctttccattcatcctcagcctataaacagtattaaaattggtatccatatgatgcctactcgggatgattggctaactccgtggcatggcgttgctgccaatatcaacggtcagtttatattgatgaaaagtgatgaggtgaaaaaaatgaaaggaaaactagtagaaatccgtggtattcccagtcattacgtgatcgatgaggttgaggaagcaagtcaaaaccaaacatttttgactgttgcatcattggcgcagtgagttaattgttctgaaagaaattcaaaattatattttatcttgagaaaaaacattatgcatataaatgaacttgcttgtcatactgaacctattacaccttttggagtgttaattactcctggtagggaaggacaggaaattacctcattaccagttaatatgctacgtgagttagttcgtaatcatttgttggttgtattgcgaggcttttcttctggttttaccgaccccaaaaaattaactgaatattcccagaattggggagaaatcatgatgtggccttttggcgcggtattggatgtaatggagcaagctgagccttctgatcatgtattagatagaactgaaataccactgcactgggatggtatgtacaggcaaactattccggaatttcagatattccattgtgtttctgctccagctgtcactcagggagggcgtacaacatttgtaaatactgagcagttaattattgatgctaatgaacatgagcgtcatatctgggaaaaaatcatggtcacttatcgcacaagtctcgtgacgcactatggtggtgaggtagtgtctccactgatatgccttcatcctaatggtcgtaaatgggtaatgcgttacaacgaacctatggctgttgatagtgaaaaatattctgatcatcactcagttaagtttgagggtttttcatcagcacaacagagtgcttttgagaatgagttgaaagatcggctttatgcaccatgttatctctatattcatcagtggcaaacaaatgatgttttgattagcgataattttactctactacacggtagagagtcatttgttacccgctcttcccgtcatctccagagagttcatattcacggaacacccatatgtaataacaaaagttttaagatggttgatattccatatttagatcgttagacaaattaattgaggggatttaattaatggcacgtattgttttagcggctattgcaactcctgggcatgttttcccaatctgtactattgcaagacacttaatcgggcaagggcatgatatcacaatattcagtggagcgctttttcgccagcagtctgaggccttaggagcccgttttgttgcttttgattcgattgtagatgctgattatcgcaatctggagcagacatttcctgagcgtgccttgcatcctccgggaaatgctcagacatcgtttgcccttaagcagttttttgctgcgccaattcccgtactgtaccctcaattgcaacaattggttgaagattctgacttgctaatttctgataatacgttttatgccatattaccactattacagaaacctgctgatgaggggatccctttttaggg

SEQ ID NO: 1065 - DNA, 5005 bp, Xenorhabdus sp.; identical to SEQ ID NO: 1064
  CDS (3742)..(4572)

SEQ ID NO: 1066 - DNA, 5005 bp, Xenorhabdus sp.; identical to SEQ ID NO: 1064
  CDS (2653)..(3642)

SEQ ID NO: 1067 - DNA, 5005 bp, Xenorhabdus sp.; identical to SEQ ID NO: 1064
  CDS (964)..(1554)

SEQ ID NO: 1068 - DNA, 545 bp, Xenorhabdus sp.
  CDS (260)..(544)
agctgcgaacaatcgggatttgccacgcgagcggaaaagcgggctcatggcggaaagactcttttcagcccaatgacttggagcaacacccttgctgcggtggacgcggcagtgggaaacaggaaaaggacgccgtaaaaccgttggcgctggatgcggatttacaatttcgcgagcggtttccgaaaagacgattgcaatagggagtgctttgtatactttatgtattcaagatgtgcgaaccgatatcagagggaacatgatgagtgacaccaccaccctgaccattgacgcgctttcacagcgggtcgacgaaattttccgcaaggcggggctgaatgacgtgcagtcgggagcgcttgcccgcgtcatcaccgccggtgagcgcgacgcctgcaaatcacatggtatctatcgcatcgagggcgccctgcgcaccgtgaaggccggcaaggtgaagccggacgcgatacccgaagtggccggggacgacggcacggcaattgtcaaagtcaacgccaatggcggctttgccaatcccgcct

SEQ ID NO: 1069 - DNA, 5023 bp, Xenorhabdus sp.
  CDS (21)..(278)
atccctggatccggatatgaatgatgagctgcgtgttactgtggtcgccacgggtaatgggatgggataaacgtcctggaattacgttggtaaccaataataaggcatctcagccaaatacattggatcgccgctatcagcaaatgcctggtggaatttcatcattacctgatgaaaataaaccagcagcaaaagtggtcaatgaccaaaatgcacagacaagtaaagaacctgattatctagatattccggcatttttgcgcaagcaggctgactgatagctaaaaaattggtttctccgctttttgtgttaaaatattctgccaatcatattttatagtgattggcaggattagtaatattgcgagagataaacgatgatcaaacaaaggacattaaaacgtattgttcaggcgacgggtgtcggtttacataccggtaaaaaagtcacattaacaatgcgtcccgcgccggctaacaccggggtcatctatcgtcgtactgacttgaatcctccggtagatttcccggctgatgccaaatccgtgcgtgatactatgctctgcacttgtctggtaaatgaacaaaatgtgcgaatctcaactgttgagcatctgaatgcggcactggcaggtttgggtatcgataatattgttattgatgttgacgcgccagaaatcccgattatggatggtagcgccagcccgtttgtcttcctgttattggatgcaggcattgaagagctgaacgttgcgaaaaaattcgtgcgtatgaaagatacagttcgcgtggaagaaggtgataaatgggctgaactggcgccatatcacggtttcagtctggatttcaccattgactttaaacatccggcgattgattccagcactcagcgttatagtctggatttttcagcagattcttttgttcgccagattagtcgtgcgcgtacttttggatttatgcgtgacattgagtacctgcaatctcaggggctgtgcttaggtggcagctttgattgtgcgatcgtggtagatgattaccgcgtactcaatgaagatggcctgcgctttgaagatgagtttgtccgacataaaatgttggatgccatcggtgacctgtttatgtgtggttataacattattggcgcatttactgcgtttaaatcaggtcatgctttgaataataaactgctacaggcagttttggcgcaggaaagtgcttgggagtttgtcacatttgaagatgaagctgaaatgccactggctttccgcgcaccatcaacagtgttggcatattaatacagtcgattattaatacatctgttattgataatctatgtattgagaatattcttatgattcatcagtgggttatgttatctattacgctcctctcgctgatgttttttattcagcgctaacgtttcatcttggctgtactggtactctctccggccagcgcagccaatcgctccaaccttcttttcaatttttccgggctacgttcggccaatgctattaatgtttctgcactttcatggcttaattggcgagttggcaagctctggctatcattattaagttttctttctgatattttttcggcactctgttcattattatgacttttaaccattaatgatgggttaatcctgatgtcgatagaagataaagatggtagaatttcacttcttaatgcggagagtaaaacgggaatttcatagtaaagtctggttttccagctggcattacctgtttccagcaccaaaatatgtttacgataatttgcgacccggcaccaagggcgtacttgtcccggaagcaggctaagaacagcccggttgagtttcagtaatgcaatggcatgtcgttgaatagcctgaagcgggctttttccggcagctgccgcattttctggctgactttcaaacaataacaagtccagtgattgtgggcggctatctcgcataataaaggcggttccagtatttattaaatgaaggtttcatgagtattctaaatctttggcgacaatttggcaggcgttatttttggcctcaccttttactgagcatggttgctacaggaattggtgtgcctcccgttctggccggagccgcagaaagcctgccacatacaaatacctcatctgcccagagaaaccaaaatcgggcactttcatcatttgaacatctgtttcagttacaaaacgctcagcgccagccctcgaattacttaaattattggcaacaacatgctgttcgtaatgttattcggcaactttcttttgctttttctatttctgagcctgtcagatatgaagaagcaaaagaaagtatccgagttgcagtaccttttatgcaacagatcatgctggatacactacatgccatgctgatacaggcgccgacccgatttgaatctgcggttggtactgagactgtggcagcaatttctccggatgtccatacaccggcactttgggttgctcaaattcagggtattcgagccgggcctgcggctgaccatcaatctttattgtaatgtatctgtctgatttctgataataagacagtaactaaattcgagtcatataccccaatcgacttcaagttgcatggcagcaatttgaataataatgggcataaaagacacaattgattggctgtaattgtggcctcatttgagatgtattaactatgttgattaaattacttactaagatttttggtagccgtaacgatcgtaccctgcgtcgtttgcgtaaatcggttgatgtgatcaaccgtatggaacctgattttgaaaagctgtctgatgaagaactaaaagctaaaacagagcaattccgtgctcgccttaaagagggcgaatcactggaaaaaatcctgccagaagcctttgctacagtacgtgaagccagtaaacgtgtgtttggtatgcgtcacttcgatgtacagttactgggtgggatggtacttaatgagcgttgtattgcagaaatgcgtacaggtgaaggtaaaactctgactgcaacattgccagcctatttgaacgcactgagtggacgtggtgttcatgttgttactgtgaacgattatctggcacagcgtgatgctgaaaacaatcgcccgttgtttgaatttttgggactgagcgttggtatcaacttaccaaacatgccagctcccgcaaaacgtgctgcttacgccgcagatattacttatggtaccaataacgaatacggtttcgattacctgcgtgacaacatggcattcagtccggaagagcgggtacaacgcaaactgcattacgctctggtggacgaagttgactccattctgatcgatgaagctcgtaccccactgattatttctggtccggcagaagacagctctgagctttatatcaaagtagataaactgatccctcaattaatccgacaggaacaagaagattcagacacttttcagggcgaagggcatttctctgttgatgaaaaaacacgtcaggttaacctgaccgaacgtggtctggtgctgattgaagagttgttggtgaatgctaaagtgatggatgaaggtgaatcactttattctccatccaatattatgctgatgcaccatgtaaccgcagccttgcgggcacatgtcttgtttacccgtgatgttgactatatcgttaaagatggtgaagtcatcattgttgatgaacacaccgggcgtaccatgcagggacgtcgctggtctgatggtttgcatcaggcagtggaagccaaagagcatgttgagatccagaacgaaaaccagacactggcctctatcacattccagaactacttccgcctgtatgaaaaactggcaggtatgacaggtacggctgacaccgaagcctttgaattcagttctatttataaactggataccattgtcgttccaactaaccgtccgatgatccgtcaggatttacctgatctggtttacatgacggaagcggaaaaaattgatgcgatcattgaagatattaaagtgcgcgttaataacaaccagccagtgttagtgggaactatctcgattgaaaaatcagaagtgatttcaaatgcactgaccaaagcggatattgtgcataatgttctgaacgcgaaattccacgcaatggaagccgacatcatcgcacaggcgggtcaggctggtactgttaccatagcaaccaacatggctggacgtggtacggatatcgtactggggggaagctggcaggcagaaattgctaagctggacgagccgacagaagagcaaatcgaacaaattaaagcggcatggcaggaacgtcatgatgcagtactggcagcaggtggtttacatattattggtacagagcgtcacgaatcacgccgtatcgataaccagctgcgtggtcgtgctggtcgtcagggggatgcgggttcttcacgattctacctctcaatggaagattccctgatgcgtatttttgcttcagagcgtgtaacaggaatgatgcgcaaattggggatgcagccgggcgaagcgattgaacacccgtgggtcactaaagctattgccaatgcacagcgtaaagttgaaagccgcaacttcgatatccgtaagcaattgctggaatatgacgatgttgccaatgaccagcgccgtgcgatttatgcacaacgtaacgacctgcttgatgtgagcgatgtcagcgaaaccatctccagcatccgtgaagatgttttcaaagtaaccattgatgcttatatcccgccacaatctctggaagaaatgtgggatattccgggcttggaagagcgtttggtcaatgactttgatttgtctttgccaattaaagagtggctggataaagagccggaactccatgaagaaacattgcgagagcgtattcttgaaaaggcgatagaagtttataaacagaaagaagaaatcgtcggtgaagaaatgatgcgtaactttgaaaaaggcatcatgttgcaaacgctggatacattgtgg

SEQ ID NO: 1070 - DNA, 5023 bp, Xenorhabdus sp.; identical to SEQ ID NO: 1069
  CDS (378)..(1298)

SEQ ID NO: 1071 - DNA, 5023 bp, Xenorhabdus sp.; identical to SEQ ID NO: 1069
  CDS (2013)..(2543)

SEQ ID NO: 1072 - DNA, 5023 bp, Xenorhabdus sp.; identical to SEQ ID NO: 1069
  CDS (2699)..(5023)

SEQ ID NO: 1073 - DNA, 5023 bp, Xenorhabdus sp.
  CDS (3260)..(3607)
ccacaatgtatccagcgtttgcaacatgatgcctttttcaaagttacgcatcatttcttcaccgacgatttcttctttctgtttataaacttctatcgccttttcaagaatacgctctcgcaatgtttcttcatggagttccggctctttatccagccactctttaattggcaaagacaaatcaaagtcattgaccaaacgctcttccaagcccggaatatcccacatttcttccagagattgtggcgggatataagcatcaatggttactttgaaaacatcttcacggatgctggagatggtttcgctgacatcgctcacatcaagcaggtcgttacgttgtgcataaatcgcacggcgctggtcattggcaacatcgtcatattccagcaattgcttacggatatcgaagttgcggctttcaactttacgctgtgcattggcaatagctttagtgacccacgggtgttcaatcgcttcgcccggctgcatccccaatttgcgcatcattcctgttacacgctctgaagcaaaaatacgcatcagggaatcttccattgagaggtagaatcgtgaagaacccgcatccccctgacgaccagcacgaccacgcagctggttatcgatacggcgtgattcgtgacgctctgtaccaataatatgtaaaccacctgctgccagtactgcatcatgacgttcctgccatgccgctttaatttgttcgatttgctcttctgtcggctcgtccagcttagcaatttctgcctgccagcttccccccagtacgatatccgtaccacgtccagccatgttggttgctatggtaacagtaccagcctgacccgcctgtgcgatgatgtcggcttccattgcgtggaatttcgcgttcagaacattatgcacaatatccgctttggtcagtgcatttgaaatcacttctgatttttcaatcgagatagttcccactaacactggctggttgttattaacgcgcactttaatatcttcaatgatcgcatcaattttttccgcttccgtcatgtaaaccagatcaggtaaatcctgacggatcatcggacggttagttggaacgacaatggtatccagtttataaatagaactgaattcaaaggcttcggtgtcagccgtacctgtcatacctgccagtttttcatacaggcggaagtagttctggaatgtgatagaggccagtgtctggttttcgttctggatctcaacatgctctttggcttccactgcctgatgcaaaccatcagaccagcgacgtccctgcatggtacgcccggtgtgttcatcaacaatgatgacttcaccatctttaacgatatagtcaacatcacgggtaaacaagacatgtgcccgcaaggctgcggttacatggtgcatcagcataatattggatggagaataaagtgattcaccttcatccatcactttagcattcaccaacaactcttcaatcagcaccagaccacgttcggtcaggttaacctgacgtgttttttcatcaacagagaaatgcccttcgccctgaaaagtgtctgaatcttcttgttcctgtcggattaattgagggatcagtttatctactttgatataaagctcagagctgtcttctgccggaccagaaataatcagtggggtacgagcttcatcgatcagaatggagtcaacttcgtccaccagagcgtaatgcagtttgcgttgtacccgctcttccggactgaatgccatgttgtcacgcaggtaatcgaaaccgtattcgttattggtaccataagtaatatctgcggcgtaagcagcacgttttgcgggagctggcatgtttggtaagttgataccaacgctcagtcccaaaaattcaaacaacgggcgattgttttcagcatcacgctgtgccagataatcgttcacagtaacaacatgaacaccacgtccactcagtgcgttcaaataggctggcaatgttgcagtcagagttttaccttcacctgtacgcatttctgcaatacaacgctcattaagtaccatcccacccagtaactgtacatcgaagtgacgcataccaaacacacgtttactggcttcacgtactgtagcaaaggcttctggcaggattttttccagtgattcgccctctttaaggcgagcacggaattgctctgttttagcttttagttcttcatcagacagcttttcaaaatcaggttccatacggttgatcacatcaaccgatttacgcaaacgacgcagggtacgatcgttacggctaccaaaaatcttagtaagtaatttaatcaacatagttaatacatctcaaatgaggccacaattacagccaatcaattgtgtcttttatgcccattattattcaaattgctgccatgcaacttgaagtcgattggggtatatgactcgaatttagttactgtcttattatcagaaatcagacagatacattacaataaagattgatggtcagccgcaggcccggctcgaataccctgaatttgagcaacccaaagtgccggtgtatggacatccggagaaattgctgccacagtctcagtaccaaccgcagattcaaatcgggtcggcgcctgtatcagcatggcatgtagtgtatccagcatgatctgttgcataaaaggtactgcaactcggatactttcttttgcttcttcatatctgacaggctcagaaatagaaaaagcaaaagaaagttgccgaataacattacgaacagcatgttgttgccaataatttaagtaattcgagggctggcgctgagcgttttgtaactgaaacagatgttcaaatgatgaaagtgcccgattttggtttctctgggcagatgaggtatttgtatgtggcaggctttctgcggctccggccagaacgggaggcacaccaattcctgtagcaaccatgctcagtaaaaggtgaggccaaaaataacgcctgccaaattgtcgccaaagatttagaatactcatgaaaccttcatttaataaatactggaaccgcctttattatgcgagatagccgcccacaatcactggacttgttattgtttgaaagtcagccagaaaatgcggcagctgccggaaaaagcccgcttcaggctattcaacgacatgccattgcattactgaaactcaaccgggctgttcttagcctgcttccgggacaagtacgcccttggtgccgggtcgcaaattatcgtaaacatattttggtgctggaaacaggtaatgccagctggaaaaccagactttactatgaaattcccgttttactctccgcattaagaagtgaaattctaccatctttatcttctatcgacatcaggattaacccatcattaatggttaaaagtcataataatgaacagagtgccgaaaaaatatcagaaagaaaacttaataatgatagccagagcttgccaactcgccaattaagccatgaaagtgcagaaacattaatagcattggccgaacgtagcccggaaaaattgaaaagaaggttggagcgattggctgcgctggccggagagagtaccagtacagccaagatgaaacgttagcgctgaataaaaaacatcagcgagaggagcgtaatagataacataacccactgatgaatcataagaatattctcaatacatagattatcaataacagatgtattaataatcgactgtattaatatgccaacactgttgatggtgcgcggaaagccagtggcatttcagcttcatcttcaaatgtgacaaactcccaagcactttcctgcgccaaaactgcctgtagcagtttattattcaaagcatgacctgatttaaacgcagtaaatgcgccaataatgttataaccacacataaacaggtcaccgatggcatccaacattttatgtcggacaaactcatcttcaaagcgcaggccatcttcattgagtacgcggtaatcatctaccacgatcgcacaatcaaagctgccacctaagcacagcccctgagattgcaggtactcaatgtcacgcataaatccaaaagtacgcgcacgactaatctggcgaacaaaagaatctgctgaaaaatccagactataacgctgagtgctggaatcaatcgccggatgtttaaagtcaatggtgaaatccagactgaaaccgtgatatggcgccagttcagcccatttatcaccttcttccacgcgaactgtatctttcatacgcacgaattttttcgcaacgttcagctcttcaatgcctgcatccaataacaggaagacaaacgggctggcgctaccatccataatcgggatttctggcgcgtcaacatcaataacaatattatcgatacccaaacctgccagtgccgcattcagatgctcaacagttgagattcgcacattttgttcatttaccagacaagtgcagagcatagtatcacgcacggatttggcatcagccgggaaatctaccggaggattcaagtcagtacgacgatagatgaccccggtgttagccggcgcgggacgcattgttaatgtgacttttttaccggtatgtaaaccgacacccgtcgcctgaacaatacgttttaatgtcctttgtttgatcatcgtttatctctcgcaatattactaatcctgccaatcactataaaatatgattggcagaatattttaacacaaaaagcggagaaaccaattttttagctatcagtcagcctgcttgcgcaaaaatgccggaatatctagataatcaggttctttacttgtctgtgcattttggtcattgaccacttttgctgctggtttattttcatcaggtaatgatgaaattccaccaggcatttgctgatagcggcgatccaatgtatttggctgagatgccttattattggttaccaacgtaattccaggacgtttatcccatcccattacccgtggcgaccacagtaacacgcagctcatcattcatatccggatccagggat

SEQ ID NO: 1074 - DNA, 3714 bp, Xenorhabdus sp.
  CDS (77)..(1108)
ctcatccatgtgctctaaagttgcaaatgctttcaagttattcacttttatatctcataagagaaaaagaataaaaatgataagactgaaccaggtaaacaaagtatttcaacaaggaacgcgctgtataaaagccctttctgatatcaacctgcatgtcccccaagggcagatttatggtgttattggctcttctggtgcaggaaaaagtacattaatccgctgcgtgaatatgcttgaatgccctacgtctggtcaggtactggttgacgggcaggatttaacctctctttctgagcgtgaactgactcgtgcccgtcgtcagattggcatgattttccagcactttaatctactgtcatccagaacggtatttgacaatgtggcattacctttagaactgaataacacgccaaaagcagaaataaagaaaaaagtcagtgaattactggagcttgttggtctttctgaaaaacatgatgcgtatccagccaatttatcgggtggtcagaaacaacgtgttgccattgcccgtgccttagcaaattcacccaaagtgcttttgtgtgacgaggccaccagcgcactggatcccgcaacaacccgttctattctggaattattgaaagacattaatcgtcgtttagggttaaccatcctgttgattacccatgagatggatgttgttaaacgcatttgtgatcaggttgccgttatcagtggtgggcagttgattgaacaggatgtggtcagcgcaatattttcccatccgaaaacgcctgtggctcaggagtttattcagtccacattacatttggatatacctgaagattatctgcaaaagttgcagtctgagcctgcatcggataaatgcccattagtgaaactggaatttacaggtaaatcagttgatgctccattaatttccatggcagttcgtcgttttaatatcgatatcagcatattgagttctcagatggactatgccggtggcgttaagttcggggttatgctggctgaattagatggtgagaacagcagcattgaatcaacaattacgtttttaaaagagcatcatgtgaaagtagaggttctcggttatgtctgaaggaatgattttattattagctaaaggagtctgggaaactctcgtgatgacttttgtttccggcttttttggcttcgtgattggtttaccggctggagtgcttttgtatgtcactcgtcctggtcaaatcatagaaaatggtacgctataccgtattctttctgcgctggtaaatattacccgctctgttccgttcattattttactggtatggatgatcccattcacccggctgattggacgaacgtcaatcggattacaagccgcgattgttcctttaaccgttggtgcagcaccttttattgcccgtatggtggaaaatgctttattagaaatcccatcagggctgattgaggcggcacgtgcaatgggcgcaactccacttcagattgtgaaaaagattttattacctgaagcattacccggtttgatcaatgcggccacaattactctgattacgctggttggttactcagcgatgggtggagctgtcggtgcgggtggtctcggtcagattggttatcaatatggctatattggctacaatgcaacggtgatgaatacagtactcgcattattagttgttctggttttcctgattcagttaggcggcgactatttagttaaggctgtgaatcgtaaataggaatatttcaacaaaaggtgccattatcggcacctattattagggcttacattcaaaagcctcactatagtagtacgataatttaataagacaggttattaatcagtattcaataggggtaaaaatatgtcagtgaaattgaaatccattgcagtcatcggggctttattaggcacactagcacttacaggctgtggtcaggaaccgagagatccaaaccatattaaagtcggtgttattgcagggcctgaattacaggttgctgaagttgcgaaaaaagtagcgaaagagaaatatggcctggatgttgaactgacaacattcaatgattatgtactgccaaacgaatcactgagcaaaggagacattgatgttaatgtcttccagcacaaaccttatttagatcagcagataaaagaacgtcactataaactggcgattgtgggtaactctttcatctttccaatggctgcatactctaaaaagataaaatcattggatgaacttcagaatggttctcagattgccatcccgaatgatccgaccaaccagggccgtgctctgctgttattacaaaaacagggtcttatcacgctgaaagcgggtgtcggtctgctgccaactattctggatatcaccagcaaccctaaacaactggatattgttcaactggaagcaccacagctacctcgttcactggatgatcaaaaaatcgcgctggctcttatcaataatacttacgccgggcagattggtctgacaccagaacaggacgggatctttgttgaagataaagattcaccttacgtgaatatcatcgtaagccgtgaagataataaagatgctgaaaatgtgcaaaaatttgtaaaagcctaccaatctcctgaagttgagcaggaagctcagaaagtcttcaagggcggagcaataaaaggctggtaatctttcatattttgacaatcaagattaaaattctggggcggataaagatatccgcccctttttatacccaatggatttcaaattgcatcgcggcggcaagcgagttcatccccgggagcatagctaactatgtgaccggggtgagtgaatgcagccaacaaagaggcaacttgaaagacgaaggatatattggaattaatcctacactcactgatgcaaccgtaataaggataaagctcaatgcgtatgttacctgtctgtttcatggtgctttttatagttgggtgtacttcattgccaactcagattaataaaactgacagtcaaggctctgaagctgaacaatatccaactctcagaaataaagaggcaacttatgtccggctttataaaaaaccagatgagttgttgggctcaccatttaaagatcttggtattgtttctggtgaatcctgtcgcaatacatttcaggatcctccggccagtatcgcaactgcacggcagaagatgctggcaaaagcctcccgcctgaatgctaacgccgtcttgcttcaccaatgtgccattatgtctggtcagggctgttatcagatagctatctgtgaaggtacggcaataagaaccacgaattaattaaccccaattctgtttaagctgtcactggaatatcttcttcttctgagtagaaaactttcagtgatggtttcttctttttatgacaataagcaattaaccccgttaaaacagtcaacagaaacccttttatacttcgatgacgagaatgttctatttgacagatatttttcaattgcccattaaccgtctcgataataaaacgccttgataacattatcttatcccaatcttccagcacactcgctttaatattactccgctttttcgtgaagaaagggacaccgttttgggctaaatcgtttgccagttcctgactaaaataacctttgtcgccatacaaggaaccgattaattcttttggtaattcccgaaccactttcct

SEQ ID NO: 1075 - DNA, 3714 bp, Xenorhabdus sp.; identical to SEQ ID NO: 1074
  CDS (1101)..(1754)

SEQ ID NO: 1076 - DNA, 3714 bp, Xenorhabdus sp.; identical to SEQ ID NO: 1074
  CDS (1881)..(2696)

SEQ ID NO: 1077 - DNA, 2126 bp, Xenorhabdus sp.; identical to SEQ ID NO: 177
  CDS (455)..(844)

SEQ ID NO: 1078 - DNA, 4306 bp, Xenorhabdus sp.
  CDS (3182)..(3979)
ccaatgtgctctaaagtctggcgcgcgacagttcggacaaaacaaaaaatatctgccttacccttgatcgatatctgtgcgccagagtgaacgcaagttgaggtattgcggggcatcggttgagtacacagtactgcctcctgcgtttgcaggtcatccccaccagctaaaagccagcctcgatatcgtcaaattctcctttttcaatctataaatgcagtgtcagattcactgggtggttaatcaggccagtgcctatcagggttgagtgatgctgtggctgcggcgtcactttcagcggtaaaccgacgaaaagtgacgccttgaatttctcgaacagtcagcaaaggccgtgcaagcattgaagtaccatcaagcacagcaaaatgccgtaaggttaaatgtcaaacggtaatcatgttaatggattagctgtagaaaaattgtctattgaataattcaaacagggataggtaaaagtatgaacagatacgcaaaggctatcctgttgttcattgaaaacaaataggatttatgttgatttgaaacgccagtgtatgaacccacgttcaatacacttcggtaacaagataaagatatccttttgggttatctattagtttaagagaccttcattgccaggcaagggtttaggtgtcttggcaatatctgctgccaaaggtgtgcagatgtaccgcaattcttgctctccctttcaggctacgagagttttatttcgccacccaaaggcgatcctgacaggcgatggatcgttagtgtaaatgggatattagcggctgcggtgggtagggtcaacagcttatgttatgggttaatttaaatttaatatatcaaatataatttcataatatgactaattttgtcagtttgctctaactcatttatgttccataataagttaaaaacattaatctttaatataaatgttccttattaaaatcgatagcattttaggaatattatgaatttttatgctatataatttaatacttacagcatattcattaggataaattgatatcagtagtaataaatattatttattacaattaataaggtttattatgttattaaacaaattaatagtatccggatttaagagcatctctacagataatccacaaacaatagaatttgaacctgatgtaacagcatttattggtcataatggaacaggaaagagtactgtactggaagcattaaataaactatttgcaataaatcactctttgcgaggtatagagccttctgattttcatttaaaagacagtgctcaaaaaaatattcctcgaagtttattcatcgaagcgtggtttcatatatcagatatttatggtaatccaccgataccactgttactacatggattaacagccactagtcataagggggaaattatctttagagttcgcttggaggccagtttgagctttgattatagccccttaggggatgtggatgaaaacatatggattattgatggcgatatggataacccagcagaagataacaaacataggttatcagccacacaaagaaacgccattcaagtcaattatattccagcaaatagagatccattagttcaattaaaatattcttcacaagcaattctaggacgtttacttaaagccataaaatggtcgatgggagagcaacaatcatttgcagatcaagctcaaaaattaaataatctggcaatagacaaccctgcactaacacaaattactcatgccatcaataataattggaaggaaatatacaaaggtcgccatctcaatcatgcaggcttaaactttcctgtaggagacatagacgaaatattgcgattgatacaactgcagtttatgccagatgcaacagggaataaagtagacacaaatagactaagtgatggtcaaaaatcactcgtttattttgctttgactaaagcattattcgatatagatagagcaacaagacaagccataattgaaaaacagtcaacacattttgatgcagaaaaaatgaaattgccaatttttagtttaattgcattagaagaacctgaaaatcatttgtcacctcattatttaggtcgcattattaaactaatcaaagattacggttctagtgagttatgccaatctattgtttctagtcattcgccttcgcttgtgagaagaattaaaccaatacaaatacgttattttcgattagatgcttcaactgagagtacccatattaaaatattaacgttgcctgaagatggtgatgaacaagcaaaatatatacgtgaagcaatacaagcttatcctgaaatctattttgcaaagcttgttatatttggagaaggtgatagtgaacaagttattttacctaagcttctagaacaatatggaaagaatatagatacatattcaatatctgttgtgccattagggggaaagcatgtaaatcacttctggcgattacttaactcgttaaaaataccatatgttaccctcttagattttgatattgatcgaaatggtggtggttttggtagaatgaaatatgctattgaacaactgattttaatggataaaagagaaagcatctatatcaacaatactatcatccctcatatacctgattggacagatagtagagacccaaacttattcaccattagctttaaatctggggaagtaaaaaacattgttcatgaattagaggtttgcgacgtgtatttctccactccactagatattgattattcactaatttgctctttccctgatattttttgtgaaaaggacgaaatttatggtgaacgaggcccatctgaaggtaaagaagacgaagaagatgaagatattgcaaaaagagaaaatgctttagttaaagccgtattaaaaaaagggaatactggtaaacggtttgaatttggtgataaatgggaacgtaacttcctttggtatcgctatcggtttttatctaataaaagcaaaccggcatcccatgttagaatgtttacgcaaattgaaaataagtatgattctgatcaaataaaaaataaattaccaccagagttaaaaagattagcagaacgtattatccagcttattgaaaaggttgtagaataatgaaccaatggtgcccttctgaaggaattcaagttacaaatgaattaatggatattatcacctgtgataaatcggttgttgttcttgctggagctggctcaggtaaaactgagctgttagctcaaaaagctaattacttgttcgtcactgataaatgcgcctggcctaaaagaatattatcgctcacttttaaaactgaagcacaaataaatataaaagaaagaataaaaaaacgctgtggatataaatcaaatcgttttgattcttttacatttcatgctttttgtaaaagcattgttgataggttcaaaaatatcttgccagagtctgaacgtccaataaataattatgatatcgtatttaagaagaacgatgcaaacggtagaaataaaatcctaatggataatttactatcgttagcaatcaacattttgagaactagcgatgatgtacgaaatattttttcttactcatatgaatatgttttcgttgacgaattccaagatacaacagataatcagtatgaactattgaagctattatttaaggatacaaacacaaaaatattaactgttggagatatctatcagagtattatgctttgggctggagccaggcgaactgtattcagcgatttttcggatgatttttcggcagtaaaaaaatatttgataaaaaactatagagcatcaaatgaaattcaaaatgtattggaaattgtattacagtacataaaaaatcctaaacagcctataagtatattacctcaacagttatcaaattgttcagtgcatatattcagcgatgagcaacaagaagcatattttattgtaaatagtattaatgaactgctatccacaggaataaatgaaggagatatttgtatcctaacaaaggaactatcttcagaatacacaaaaatattaagagctgaactgactaaagccggaataaacaaccttgatattactgatttacaggatgcaatgaaggagccactagggaaactattttcattatttttaaaggcattgatttctccaaccccaaaaattataactgagattactgaaattaatttagatttgaataaagttgaatttagcgatgaaaaagaagaagaactaacgacaagaatagtaaattttatatcatttaagcgagaacaccttactatt

SEQ ID NO: 1079 - DNA, 4306 bp, Xenorhabdus sp.; identical to SEQ ID NO: 1078
  CDS (2727)..(3128)

SEQ ID NO: 1080 - DNA, 4447 bp, Xenorhabdus sp.
  CDS (4168)..(4446)
gctctaacccaaggctgaaattaaagggaaaacccgccgaatttttagtgacggcggctgctttcccgttaccccgaattattcgctatttgcctcttaatgaccgatggaaacataaaagcgatgaatccttattacagctacttaaaaaatggggcatccccacggatgggaagctggaagattctgttgcccgctttttagcctcccgtttcaagaaagatgcaaaactggcttatcaatacgagaaaaaacggggtgattggcggataaaaacgccgttggtgaatttagtcagtaagcaggatcctttaaccaaaaaatacgcctcacagtatctgaaatggaaacggtgtgctcatgaagtcagtttgatcacgttagaagagggtcatcactatttcattacaacctatccagagctggtagccgatgtgattgagcagctcacactcaaccctgacatcctgtaatcgtagatcattggtaaaacgtaagaaggaatcaatatgaaattacagaacaagatactggttcgattctgctggtcatggatcgcgttggtgtgcctggggacaatcatccacggcatctatcgaacctggtggattacggagggggttagcggaaatttacagcctaacctgttaaatccggatcaggcgaatgatatgggatatataaaacatcatcttatgtcctatatgcatctgactaccggtattgtgctttatgttttagggcctcttcagtttgttgatcgcatcagacgaaaatggccgaaattgcataaatggtcaggatattgcttctttatcaccatcatagtggtgggaataaccggaattttaatggcgattctgtttcccgtcggcgggacgtcagaaacatcgtcatcaattttgttttctctggtcatgatcttctgcgtcttaagatctatcacaatgattttaaataggaaggtcgagcttcatcgtcagtggatgatccgaacttatatgatctcactggggcctgccacgatgcatgccattattccactttttatccagattggtggaaaagacattggtgaagcgctgtcactatcattgtggattggattcactattcatctcattttagccgaggtttggatccacaactcacggatgccagaaaagggacaatccaccgaatcgaaaaaacggaagattgccgttccgactccggtatctcaggaaagatacgaaattacactttgatttgtcgttattaggttgttgttatccctgtgggtgtgcctacagggaaagctggatgctgttgtgtgatgatttattaacctttacgtctatataagggcagggcatgaaatcttctaattgggtagatagtgttgcatcaggctatgcacgctgggtggtgcaaaggcgttatctcaatcttattttggtctgcattgcagtgttttttaccttcaaaggtatggaaaatctggcatttaccagtagttataaagtttttttcagtcgggaaaacccatttctgaattcgtatgagtcaatgcagaaaacctacagtaatggtgacagcgcgttgattgtactggcaccgaaggatggcaatgttttcagtcaacggtttctttctatcgttgaaaagctaacagaggatgcatggcaggttccaaatgcgtatcgcgttgattctataactaattttcagtcaactaaagcagatgatgacaatctggaaatcaggaaactggttcctgatgcggcaaaattaacagaacgtagcttgtcggaaatcaagaagatagcgctgaatgagcctctgttaatcaaacgcatcatttctgaaaacggtgatgtgaccgcagtcaatgtgtctgtgcgtttaccggacggagatgacaaaattgtcgctgaagtcgcagagtctgtgcgcaaactgaaaagccagtatatgaagatgtacccggatgttgatattcatctcaccggagtggcgatgatgtcaaatgcctttcctgaaatcagtatgcaggaaatgtcaaaaaccatccccatcgtgtttctggttgtacttatcctgtgttttatggtgttgagatcattcagtgcgacctttgtcgtctgtctagtgatcgttttctctattatcgccgcattgggggctgccggatacctcggcataaaattaactcaggtttccgctaatgtgccgatcattgtcatgacgttggcggttgttgacagtatccatattttagtgaccgttattcatcgcatgaagcagggagacagcaaacatgatgcaattaaggaaagtttgcgggttaatctctcccctgttgtgattaccagtgtgactactgctgtcggatttttaggtttgaacctgagcgatgcaccgccttttcatgacttgggcaatatgacggcaataggcatgggagctgcactattttatgccttatttttactgccttcgttgattgctgttctacctgtcagagtgaaacccggtgtacagaaaacgcagttttcccttgcatttctggcgaactggattatcgataacaggcgaaaattacagtttggtattgtggcgttcgggcttgttatgctgacctttatacccagactgaccgttgatgaaaattttgttaaaaactttgccaaaggacttgaaatcagggatgactctgactttacccaggatcatctaacgggacttttcaatatggagttttcgttaggtgcagggaaagaaggcggaattaatgagcctgaatatatggcaaaagtggatgagtttgctaattggtcacgtgctcagcctggcatcatgaatgttaatgtaatcactgatattgtgaagcgtattaaccggagtatgaatggggataatgcggctcactataagttgccgacagatagagaagccattgctcagtacctgttgctttatgaaatgtctcttcctttggggttggatctgaacgatcagattgatgtcagacgttctgcaaccaaaatgacggtgactttctctgacttaagtacctttgaaatgcaaaggataaaagaggcacatgaaaaatggcttatcaataatgcaccttcatccatgcatactcatgctgccagcgcctctttaatgtatacctacctgatgaacaccaatattaaagggctattgataggtaccctgatctcgtttctgattattactctctgtttaggcattgttttccgtagtgcaaaatatgcattgattagcatgctacctaatatattgcccatttttatggccttcggcttatggagcattattgatggggtagtggggcttgcggcggcaactatcgcgaccatgacgttaggtattgttgtcgatagcaccgtttactttgtttacaaataccttcgtgctcgtcgtgaacacaacatgacgccagaggatgctgtacgttactccttctcaacggttggtatcgctctactatcaaccagcatcatttttatctgtggctttggctcgatgatgcactcagatttcttaatgaacgcacaaatgggaatttttactgtcatgactgtaatttttgccctcttgcttgatttctttttattgccggcattgttgatagcaatagacgataaaactaagaaaaataaacccgccgtacctgatgaacctatgatggtaaaaatataacgatattacagcattggtattaaacgaataatgagcctgcttttaggagaaaatataatgaaaaaatgttttgccagaataaaagaattctcgttggcatatctatttattttaggtttgctcagttttcccacattagcttcagaagaacgggggaaagaaatcctgcaagaggctatcgccagagataacggtttcggtgatacgatcactgatctcaaaatgacgttattaaatgcggaaggtcaggaaagtcaccgttatttaaaaattaatacgctagaagtgtcaggggatggcgacaaattattaactttttttgagcagcccagagatataaaaggaacagccttattagcctttacacatttagatcgggatgatgaacaatggatatatttgcctgcatcacgacgggtaaaacgtatttcttccagtaataaatcgggatcttttatgggaagcgaatttgcttatgaagatttggcttctgaagagatagagaaatacaaaatgtacaattatctgggtgaaaaaccgtgtggacaacaaatctgctttattgttgagagaaaacccgttgataaagaatcaggatatgtccggcagattgtgtggatagataaagacttctaccggtttatcagaattgattattacgatcgtcgtaatgcattgttaaaaacaagaacattcgatgattatcaattctatatggataagtattggcgttcat

SEQ ID NO: 1081 - DNA, 4447 bp, Xenorhabdus sp.; identical to SEQ ID NO: 1080
  CDS (1420)..(3711)

SEQ ID NO: 1082 - DNA, 4050 bp, Xenorhabdus sp.
  CDS (2)..(337)
tggggttgcctgttcaatggcggcggcaggtctggcagaattgctcggcgcaagccctgagcaagtgtgcattgccgctgaaatcggcatggaacacaaccttggtttgacttgtgacccagttgctggacaagtacaggttccatgtattgaacgtaatgcaattgcatcggttaaagcgatcaatgctgctcgtatggcattgcgccgtaccagtgaaccacgcgtttcactggataaggttattgaaactatgtacgaaactggtaaagacatgaatgccaaataccgtgaaacatcacgtggtggtctggccataaaagtacagtgtgactaatcaaatctgtaagttatcaatatgacataagttagatagctacattctttaagttcagatttggcttatccggaaaaatccctgctaatacagtagggattttttttggctgaaacggatcaaagaagtacattttttcctctttcctattaaaaacatcactttctttttatctaaagattaacaaaatgttaccggaaacagatgttaagactaaataaataaaaaataaaagaattaattaatttttatttgccataattaaaattaaaatattatttttatctatcaaaatagttcgacttaaattttctgactgatagcaattttcttgaatgattccaatgataatctaatgacatattttcttatgtaacaaaatagagtccataagaaattaaatacttgggatggaacctcgataaaacataatgtttgtaactattatgtttattaactggtagtaaaacaggttggaagtattgagcatgagcttgcaataaatccgagtttgattgttacagaaaggggaaaacaagtgagtatagccattatgattggcacacacggggccgcggcagagcaactgctacgcaccacggaaatgttgattggggaacaagaaaacgtttcctatattgacttcgtgcccggtgaaaatgccgatacattattcgagaaatacaataagagactggagtcacttgatacaacgcaaggggtcttgttttttgttgatacctggggtggcagcccgtttaatgcggcaaaccggattgctgtagacaaagaaaactacgaaatcattacgggtgtaaacgtaccaatgctggttgaagccttcatgtgccgtgatgatgatccatccatggaagaattggttgctgttgcattagaaacaggaagagaaggcattcgcgctcttaaaacagagccagaagaagaagccagtaaacctgaacctgccaagccagccgctccagttgcgtctcaggttagcactccagctgcaggcggtcatatgaaaatcgcacttgcacgtattgatgaccgtctcattcacggtcaggttgcaacccgctggacaaaagaaactaacgtaaagcgtatcattgtagttagtgacgaagttgctcaggataccgtacgttccactttattaaaacaggtcgcacctcccggtgtcagtgcacatgtggttgatgttgagaagtgcgtccgtgtttataacaatcccaaatacgccgatgaacgcgttatgctgttattcaccaaccctaccgatgtactgcgtattgtagaaggcggagtttcactggaatctgtcaatattggtggtatggctttccgtcagggtaaaacccaaatcaataacgccatttctgttgatgcaagtgatatcactgcttttgaaaaactgaattcacgcggcatagagcttgaagcacgtaaagttgccagcgatgcgcgtttaaatatgatggatttactcaaaaaagcttaaaaaataaagatattttttattaaccattactcaacaacaaaattcttaccaaattatatttggttacaggagaaaacaatggaaattaccgttgttcaacttttcttgatattcatcgttgcctgtattgcaggtatgggttctattcttgatgaatttcaatttcatcgcccattaattgcctgtacattaatcggcctgatccttggtgatgtcacaaaaggcatcatcatcggcgggacactggaaatgatcgctctcggctggatgaatatcggtgcagcgattgccccggatgcagctttagcatccatcatttcgactattctggttatcgctggcggacaacaggttggtgcaggtattgcgctggcaattccactggcggcagcgggtcaggttctcactattattgtccgtactttgactgtcggcttccaacacgcggcagataaagccgctgaaaacggtaatctccgggctattacagctcttcatatctctgctctggtgttgcaggcaatgcgtattgccttacctgcgctggttgtcgccctgtctgtcggcacatctgaagttcagaatatgctggattcaattccggaagtcgttactacgggcctcaatatcgctggtggcatgattgttgttgtcggttatgcgatggtgattaacatgatgcgtgctggttatctgatgccattcttctatctgggttttgtggtcgcagtgtatgtacataatcttgttatccttggtgtcattggtgcagttatggcgattctgtatattcagctcagccctaaatacaatcgatcacaggcagcagctcctgccggtaacaccccgaataaccttgataatgaattagattaagaggatgaacaacatgtcagatacaacaaacatgggtcagaaaaaactgacacaaagtgatattaatgctgtcttcctgcgttctaacttatttcagggttcatggaactttgagcgcatgcaggcgctgggtttctgtttctcaatggtgccagctatccgccgcctttatcctgaaaataccgaggagcgtaaactggccatcaaacgccatttagaatttttcaatacacatccttatgtcgcagcacctattctgggtgtcacactggcaatggaagagcaaaaagccaacggggctgacattgatgccggtgcaatcaacgggattaaagttggtctgatgggaccgctggccggtgtgggcgacccgattttctggggaactgtgcgccctgtttttgccgcgcttggtgccggacttgccttaggtggtgactggctcgggccatttttatttttcttcctatttaatctggtgcgtttgttaacccgttattatggcgttgcatatggttataagaagggaatagatatcgtcaaagatatgggaggcggtttcctgcaaaaaatgacagaaggcgcgtcaattctgggtctatttgtcatgggagcactggttaatagttggacgaaaatcgacattacactggttgtctctaaggttcctgatcctacaagcggtgaaatgaagataaacactgttcaaaccattcttgatcagttgctgccaggaattgcacctctattgctaacttttggatgtatgtggctattacggaaaaaagtaaaccctttgtggattattatcggcttctttgtgattggtattattggttattattttggtcttctcggtgtagctaaatagttttgttgaaaaattgattaactgaaaatagggagaggaaacatttcctctcccccacttacaaaacagatcaggaaactcaggagtaaacacagggcgagatctcacatttttcataaggttatttaggtcaaataaaagtcaatatacggacttttataagcatttctctccttaaaacgttaagatcacgctattccataaacagtgtgcttaataatgaatatttttaattttatcagaaaaatagatgacccacgttctgacatcaataaaaaacatgaattgatggatgtcatttttttggccttttctgctgtgttatgtggcgcttctggctggaaatcgattcaagaatttggtgagttacaaatagagtggcttaaacaatatacatacatttactcacggcattcctcgtcgtcactgtgtggctaatattatcaaaatgatagactttag

SEQ ID NO: 1083 - DNA, 4050 bp, Xenorhabdus sp.; identical to SEQ ID NO: 1082
  CDS (876)..(1841)

SEQ ID NO: 1084 - DNA, 4050 bp, Xenorhabdus sp.; identical to SEQ ID NO: 1082
  CDS (1920)..(2717)

SEQ ID NO: 1085 - DNA, 4050 bp, Xenorhabdus sp.; identical to SEQ ID NO: 1082
  CDS (2722)..(3588)

SEQ ID NO: 1086 - DNA, 6980 bp, Xenorhabdus sp.
  CDS (6136)..(6801)
gccctaaaggcagtttgtgacctcctgggatcggaagggtgaaaactgacaagtgctaccatttagtatacggcacatatagcaataaccaacagaatggcttccagaagcctgcggccactgctgactctttttaatttaacacgtttgtcttctgtatattcctggttcaagaaaggctctccaggttttcctgttaattaaacggaacaacgctgagggcagctcagcgttgaaactgtatgcataaacaggagtgtacctaactttttcctgttttgcatctatacactgtacattgtagacaaaagcttaacgagtcttaattaccagacggttactctgtttcacttcttccataactacataagtacgagtatcgttaacacccggaaggcgtagcagggtttcacccagcaatttacggtacgcagacatatccggtacacgtgttttcagtaagtagtcaaaatctccagaaactaaatgacactcttgaatttcttcaagtttttgtacggcagtattgaactgctcaaaaacatccgcagctccgcgattcagggtgatttcaacgaataccagcaatgatgcatccaggtagtgaggattcaacaacgccgtataaccagaaataaaaccctgacgctctaaacgacgtacacgctccagacaaggagttggtgataaacctactcgtttggataattccacattagaaatacggccgtctttctgcaattcattaaggatattacggtctatgcgatcaagatcttttcctggacgcttcttattatctatcatcttattgctctctctttatattcctacacccataacattttccctatctcttttaagcagttgagctggaaaagatgtcttcaaaggctaaagctcaatctgtaaccaaggtttggggcctgcacgtaatcttccagaacacaatttcccagaactcgattaaccaaaatacgacttactagaacaccgtcttccagaatgtaatttcccaaaacacgattttcccaaaacattgggtttcccagaaagcagcttatcggcaatttttaatattctatgagaaaatcatcccctcagaattgtctattctatagaaacaattgattagcgaggtagataattatctcttacacagatgttttcgcaaatgcatagccgattgtcaaagtaaatgaacaaaaatcagaacaacataccaaacaaattttcggtaaatcgccttagccgctcgtttcatgactaaaacgcataaatgatgttcaattcaaaatgttaagcacttactccttacattcccattacatcatagttactatctatcggtaaaatcgttaataacatgaatattttatctgataatcgctttttttaacttatcatttctcctacaatccctaaatccacgatatgtgataatggaaatgaggtattcatgagtacagccaaacacagtaagctcatcattcttggctcaggtcctgctggttatactgctgctgtttatgcagcccgtgctaatctaagtcccgtactcattacaggggttgagaaaggcggccaattaaccaccacgactgaagttgaaaactggcccggtgaccctgaagggctgacaggccctggcttgatggaacgtatgttccagcacgctgaaaagtttcagacagaaattgtttccgaccacattcggaaagttgatttctcaaaaagaccattccatctgtatggtgatgatcaagaatatagctgtgatgctctgatcatcgcaactggtgcttcggctcgctatttaggcttaccttccgaggaagaattcaaggggcgtggtgtttctgcctgtgcaacctgtgatggtttcttctaccgtaaacaaaaagttgcagttgtcggtggtggtaataccgctgttgaagaagcattgtatctggcaaacattgcatctgaagttcacctgatacaccgtcgtgatactttccgctcagagaagatccttattgatcgtttgatggataaagttaaaaacggcaatattattctgcatacggaccgcactctggacgaagttttgggtgatgagatgggtgtaacaggtgttcgtatccgcgatactaagagcgataacactgaagaactggatgttgccggtgttttcattgctatcggccacagtccgaataccgatatttttgcagggcagcttgaactggaaaacggttatatcaaagtccagtcagggttgcacggaaatgccactcagacttccattccgggtatttttgccgctggtgatgtaatggaccatgtttatcgtcaggcgattacgtctgccggtactggctgtatggcagcactggatgctgaacgttttctggacgggctggcaaccaaataaaattatcctcccttaaaagcgctattccggtagcgctttttaacagggcgcattttttgtaagtaacattttgtagatagcatagtgttgtagatagcatggtgttgtaaataaaatagtgcgcggaagctggcaatgtggttaccagcttgttttgatactttgtatcatctgttaatctgaaatttttcttatggacaaaacaagacaatctgaactggttcgatggctgaagcaacaaagtactccagctcgtcgatggcttcgtctatccatgctattgggcctgattagtggcctactgattatctctcaggcctggctgctcgcttccattcttcaggcgcttatcatggatcatgttccccgtgaaaatctcatcagccaatttgcgatgctactggcttcttttaccctgcgagcgattgtcagtgctattcgggagcgtatcggctttatctgtggcaaggttgtacgtcagcaaatccgcagcatggttttggataagctgacccaattagggcctgtctgggtaaagggtaaacctgctggcagctgggcaacgattatcctggaacagatcgaggatatgcaggatttttattcccgctatttacctcaaatgaccctcgcagccactattccagtgcttattctgatgacagtatttccaatcaattgggctgccggtgttattttattggtaacagcacctttgattccgctttttatggcattagtcggattaggagcagcagatgctaaccgacgcaattttactgcgctcagtcgattaagcggtaattttcttgatcgtttgcgtggtctcgaaacattgcgcttattccatcggggaaaagctgaagttaagcaaattaccgaatcaaccgaagatttccgcctcagaacgatggaagtgctgcgcatggcgtttttatcttctgcggtattagagttttttgctgctgtttctattgccgttgtcgctgtctattttggtttttcttatctgggagaattgcattttggcagttatggccttggtgtcacattatttgccggttttctggcgcttatcctggcaccggaattttttcagccgctacgtgatctgggcactttctaccatgctaaagctcaggctgtcggggcagcggaatcacttttcacgctattaaccagcggtgaggaacatgcctcatacggcggtaaaaaaatcctgtcagataaaaatgctgttagtattgaagcaaatgagctggaaattttgtcgcatgatggtcatcgtcttgccggccctttgaactttacggttgagcaacatcagcgtattgcattagtgggtaaaagcggtgcggggaaaagttctcttatcaatgtcttactcggttttcttccttatcgcggctcactaaaaatcaatggaagtgaactcaatgaacttgatctcgacaaatggcgtgaacaattaagctgggttggacaaaaccctcacctgccagaacagaccatacttgataatattcgtctaggtcagtttgatgcgacacaggaacaaattcagagtgtcatgcaacaagcctatgttacggagtttgtctctgaactgcccgatggcataaacaccgttattggtgataatgcagcacggctatctgttgggcaggcacagcgtattgctgttggcagggctttattgcatccctgccagcttctgctgctggacgaacctgccgccagtcttgatgctcacagtgagcaacgggtaatgacagccttgaaccaagcatccagtcagcaaaccacactattggttacacacttactggaagaaacgccggaatatgatcaaatctgggtgatggaaagtggactcattatcgaaaaaggcaactatgaaagcctgagacaatctcaaggcgcattttcccgtctgttgtctcatcgcagtatggagctttaatcatgcgtatattacttccatttctcgcactatatcgccgccactggtttctcatcagcttaggcatggttctggcaacactaactctgttagccagtattggcttacttacactgtctggctggtttttggccggtacggctgtggcgggctttgccggaaaatatacctttaattacatgctgcctgctgcgggtgtccggggcgccgcaattttccgtactgccggacgttatggagaacggctggttagtcatgatgctacttttcgagtgttggcccatctgcgggtatttacctttcagaagatcctgccactttcgccgggagggattgcccgttttcgtcagggggagctattaaacaggattgtggctgatgtagaaacattagatcacctctatcttcgtgtcctgtctccattgcttgctgcactcgctgtgattgtagttctgacattaggtctaggctttcttgactggactctcgcctatactctcggcggtattatgctgggattattactgatcttaccttttgtgttttatcacacaggtaaaccttatggcaggaatatcacagcattacgtgggcagtatcgaactttactcaccagcacattgcagggtcaggcagaattaaccgttttcggtgctcttaaacgtttccgccagacaatgtccgaagttgaatatcaatggctaaaaagccagcaacagcaagccaacctgaccggactttctcaggccatcatgatttttgctactggcatgacggtaacattaatactgtggctggcagcagcagatgtaggcggaaataatcaacccggtgcattgattgccctgtttacattctgtgccctttcagcgtttgaatctctgggaccagttactgttgcattccagcacatggggcaggtgatctcgtcagcaacccgcgtttcccagctaatgcatcagaaagcagaagtcatctttccggctgacgggccaaaaagcacagacaatctcagccttgagataaaaaacatagaattcacttatcctaaccagcctatgcctgtattgcagaatatttcactgtctcttcaggcaggtgaacatatcgccttattaggtaaaactggctgcggtaaatcgactcttttacaattattaacccgggcgtgggatgttgataacggagaaattctactcaaccaacagcctatttctctttatgatgaagccacactgcgatcaatgatatcagtcgttcctcaacggatacatgtgttcagccatactctgcgggaaaacctgttgatggcaaaaccaggtgccccagatgaagaattagaaacggtattgcaacaggttggcttaggaaacttgctagaaaacaatgaaaagctaaactgttggatgggcgaaggcggacgtcagctttcaggtggtgaacaacgccgcttgggtattgccagagccttactgcataactcaccactcatgcttctggatgaaccaacagaagggcttgatgcagataccgaacaacaaatcctggcactattgcgccatagttgtcaggataaaacacttattgtaattacccatcggttaacaggcttacaacacatggatcggatctgtgtgatggatgggggacgtatcattgagcaaggacaacacgatgtgttattgtcccaacaaggacgctattaccaattctatcaacgacagagctatcctgatcaggagtaataagttttatgttgatagctcaattggataactcatatgaatttccccatccagatactgcactggcagaaccaaatggcttgttagcatttgggggtgatctaagtgcagaacgattaaagaccgcatatcgcaaaggcatttttccgtggttttcaccgaatgaacttcctttgtggtggtctcccgatcccagggctgtcctgatccctggagaattacataccggccgaactttgcgacgttttattcgcaaacatccttaccaaattacggtaaactatgcttttgaacaggtggtctatggttgtgcccagagacaagaaggcacatggatcggttctgacattcagttgggttaccaaaccctgcatcaggaaggtttagctcactcagttgaagtttggcataaacaacagctcgtcggcgggttatatggtgttaatataggaacactattttgcggtgaatcgatgtttagcaaaatggagaatgcatccaagtgcgcttttgtggcattctatcaccattttttgcgtcatggcggccaactgtttgattgccaggtgctaaaccaccatacagaatcactgggcgccaaaaatattccaaggaaagaatttctccggcatcttgaccaataccaaaagcaatcattgcaaaccggttgttgggatacgcaaatgctggagttatagtcaatacttggtggtttatgctgttcccggtgggagtgtcaatcccatcatgaggaaaataatggtgtaaaatacgacattcctttacataatgagggtttttcggcattatcttgccggttaccaactatggttgttacatttagctttagagc

SEQ ID NO: 1087 - DNA, 6980 bp, Xenorhabdus sp.
  CDS (197)..(376)
gctctaaagctaaatgtaacaaccatagttggtaaccggcaagataatgccgaaaaaccctcattatgtaaaggaatgtcgtattttacaccattattttcctcatgatgggattgacactcccaccgggaacagcataaaccaccaagtattgactataactccagcatttgcgtatcccaacaaccggtttgcaatgattgcttttggtattggtcaagatgccggagaaattctttccttggaatatttttggcgcccagtgattctgtatggtggtttagcacctggcaatcaaacagttggccgccatgacgcaaaaaatggtgatagaatgccacaaaagcgcacttggatgcattctccattttgctaaacatcgattcaccgcaaaatagtgttcctatattaacaccatataacccgccgacgagctgttgtttatgccaaacttcaactgagtgagctaaaccttcctgatgcagggtttggtaacccaactgaatgtcagaaccgatccatgtgccttcttgtctctgggcacaaccatagaccacctgttcaaaagcatagtttaccgtaatttggtaaggatgtttgcgaataaaacgtcgcaaagttcggccggtatgtaattctccagggatcaggacagccctgggatcgggagaccaccacaaaggaagttcattcggtgaaaaccacggaaaaatgcctttgcgatatgcggtctttaatcgttctgcacttagatcacccccaaatgctaacaagccatttggttctgccagtgcagtatctggatggggaaattcatatgagttatccaattgagctatcaacataaaacttattactcctgatcaggatagctctgtcgttgatagaattggtaatagcgtccttgttgggacaataacacatcgtgttgtccttgctcaatgatacgtcccccatccatcacacagatccgatccatgtgttgtaagcctgttaaccgatgggtaattacaataagtgttttatcctgacaactatggcgcaatagtgccaggatttgttgttcggtatctgcatcaagcccttctgttggttcatccagaagcatgagtggtgagttatgcagtaaggctctggcaatacccaagcggcgttgttcaccacctgaaagctgacgtccgccttcgcccatccaacagtttagcttttcattgttttctagcaagtttcctaagccaacctgttgcaataccgtttctaattcttcatctggggcacctggttttgccatcaacaggttttcccgcagagtatggctgaacacatgtatccgttgaggaacgactgatatcattgatcgcagtgtggcttcatcataaagagaaataggctgttggttgagtagaatttctccgttatcaacatcccacgcccgggttaataattgtaaaagagtcgatttaccgcagccagttttacctaataaggcgatatgttcacctgcctgaagagacagtgaaatattctgcaatacaggcataggctggttaggataagtgaattctatgttttttatctcaaggctgagattgtctgtgctttttggcccgtcagccggaaagatgacttctgctttctgatgcattagctgggaaacgcgggttgctgacgagatcacctgccccatgtgctggaatgcaacagtaactggtcccagagattcaaacgctgaaagggcacagaatgtaaacagggcaatcaatgcaccgggttgattatttccgcctacatctgctgctgccagccacagtattaatgttaccgtcatgccagtagcaaaaatcatgatggcctgagaaagtccggtcaggttggcttgctgttgctggctttttagccattgatattcaacttcggacattgtctggcggaaacgtttaagagcaccgaaaacggttaattctgcctgaccctgcaatgtgctggtgagtaaagttcgatactgcccacgtaatgctgtgatattcctgccataaggtttacctgtgtgataaaacacaaaaggtaagatcagtaataatcccagcataataccgccgagagtataggcgagagtccagtcaagaaagcctagacctaatgtcagaactacaatcacagcgagtgcagcaagcaatggagacaggacacgaagatagaggtgatctaatgtttctacatcagccacaatcctgtttaatagctccccctgacgaaaacgggcaatccctcccggcgaaagtggcaggatcttctgaaaggtaaatacccgcagatgggccaacactcgaaaagtagcatcatgactaaccagccgttctccataacgtccggcagtacggaaaattgcggcgccccggacacccgcagcaggcagcatgtaattaaaggtatattttccggcaaagcccgccacagccgtaccggccaaaaaccagccagacagtgtaagtaagccaatactggctaacagagttagtgttgccagaaccatgcctaagctgatgagaaaccagtggcggcgatatagtgcgagaaatggaagtaatatacgcatgattaaagctccatactgcgatgagacaacagacgggaaaatgcgccttgagattgtctcaggctttcatagttgcctttttcgataatgagtccactttccatcacccagatttgatcatattccggcgtttcttccagtaagtgtgtaaccaatagtgtggtttgctgactggatgcttggttcaaggctgtcattacccgttgctcactgtgagcatcaagactggcggcaggttcgtccagcagcagaagctggcagggatgcaataaagccctgccaacagcaatacgctgtgcctgcccaacagatagccgtgctgcattatcaccaataacggtgtttatgccatcgggcagttcagagacaaactccgtaacataggcttgttgcatgacactctgaatttgttcctgtgtcgcatcaaactgacctagacgaatattatcaagtatggtctgttctggcaggtgagggttttgtccaacccagcttaattgttcacgccatttgtcgagatcaagttcattgagttcacttccattgatttttagtgagccgcgataaggaagaaaaccgagtaagacattgataagagaacttttccccgcaccgcttttacccactaatgcaatacgctgatgttgctcaaccgtaaagttcaaagggccggcaagacgatgaccatcatgcgacaaaatttccagctcatttgcttcaatactaacagcatttttatctgacaggatttttttaccgccgtatgaggcatgttcctcaccgctggttaatagcgtgaaaagtgattccgctgccccgacagcctgagctttagcatggtagaaagtgcccagatcacgtagcggctgaaaaaattccggtgccaggataagcgccagaaaaccggcaaataatgtgacaccaaggccataactgccaaaatgcaattctcccagataagaaaaaccaaaatagacagcgacaacggcaatagaaacagcagcaaaaaactctaataccgcagaagataaaaacgccatgcgcagcacttccatcgttctgaggcggaaatcttcggttgattcggtaatttgcttaacttcagcttttccccgatggaataagcgcaatgtttcgagaccacgcaaacgatcaagaaaattaccgcttaatcgactgagcgcagtaaaattgcgtcggttagcatctgctgctcctaatccgactaatgccataaaaagcggaatcaaaggtgctgttaccaataaaataacaccggcagcccaattgattggaaatactgtcatcagaataagcactggaatagtggctgcgagggtcatttgaggtaaatagcgggaataaaaatcctgcatatcctcgatctgttccaggataatcgttgcccagctgccagcaggtttaccctttacccagacaggccctaattgggtcagcttatccaaaaccatgctgcggatttgctgacgtacaaccttgccacagataaagccgatacgctcccgaatagcactgacaatcgctcgcagggtaaaagaagccagtagcatcgcaaattggctgatgagattttcacggggaacatgatccatgataagcgcctgaagaatggaagcgagcagccaggcctgagagataatcagtaggccactaatcaggcccaatagcatggatagacgaagccatcgacgagctggagtactttgttgcttcagccatcgaaccagttcagattgtcttgttttgtccataagaaaaatttcagattaacagatgatacaaagtatcaaaacaagctggtaaccacattgccagcttccgcgcactattttatttacaacaccatgctatctacaacactatgctatctacaaaatgttacttacaaaaaatgcgccctgttaaaaagcgctaccggaatagcgcttttaagggaggataattttatttggttgccagcccgtccagaaaacgttcagcatccagtgctgccatacagccagtaccggcagacgtaatcgcctgacgataaacatggtccattacatcaccagcggcaaaaatacccggaatggaagtctgagtggcatttccgtgcaaccctgactggactttgatataaccgttttccagttcaagctgccctgcaaaaatatcggtattcggactgtggccgatagcaatgaaaacaccggcaacatccagttcttcagtgttatcgctcttagtatcgcggatacgaacacctgttacacccatctcatcacccaaaacttcgtccagagtgcggtccgtatgcagaataatattgccgtttttaactttatccatcaaacgatcaataaggatcttctctgagcggaaagtatcacgacggtgtatcaggtgaacttcagatgcaatgtttgccagatacaatgcttcttcaacagcggtattaccaccaccgacaactgcaactttttgtttacggtagaagaaaccatcacaggttgcacaggcagaaacaccacgccccttgaattcttcctcggaaggtaagcctaaatagcgagccgaagcaccagttgcgatgatcagagcatcacagctatattcttgatcatcaccatacagatggaatggtctttttgagaaatcaactttccgaatgtggtcggaaacaatttctgtctgaaacttttcagcgtgctggaacatacgttccatcaagccagggcctgtcagcccttcagggtcaccgggccagttttcaacttcagtcgtggtggttaattggccgcctttctcaacccctgtaatgagtacgggacttagattagcacgggctgcataaacagcagcagtataaccagcaggacctgagccaagaatgatgagcttactgtgtttggctgtactcatgaatacctcatttccattatcacatatcgtggatttagggattgtaggagaaatgataagttaaaaaaagcgattatcagataaaatattcatgttattaacgattttaccgatagatagtaactatgatgtaatgggaatgtaaggagtaagtgcttaacattttgaattgaacatcatttatgcgttttagtcatgaaacgagcggctaaggcgatttaccgaaaatttgtttggtatgttgttctgatttttgttcatttactttgacaatcggctatgcatttgcgaaaacatctgtgtaagagataattatctacctcgctaatcaattgtttctatagaatagacaattctgaggggatgattttctcatagaatattaaaaattgccgataagctgctttctgggaaacccaatgttttgggaaaatcgtgttttgggaaattacattctggaagacggtgttctagtaagtcgtattttggttaatcgagttctgggaaattgtgttctggaagattacgtgcaggccccaaaccttggttacagattgagctttagcctttgaagacatcttttccagctcaactgcttaaaagagatagggaaaatgttatgggtgtaggaatataaagagagagcaataagatgatagataataagaagcgtccaggaaaagatcttgatcgcatagaccgtaatatccttaatgaattgcagaaagacggccgtatttctaatgtggaattatccaaacgagtaggtttatcaccaactccttgtctggagcgtgtacgtcgtttagagcgtcagggttttatttctggttatacggcgttgttgaatcctcactacctggatgcatcattgctggtattcgttgaaatcaccctgaatcgcggagctgcggatgtttttgagcagttcaatactgccgtacaaaaacttgaagaaattcaagagtgtcatttagtttctggagattttgactacttactgaaaacacgtgtaccggatatgtctgcgtaccgtaaattgctgggtgaaaccctgctacgccttccgggtgttaacgatactcgtacttatgtagttatggaagaagtgaaacagagtaaccgtctggtaattaagactcgttaagcttttgtctacaatgtacagtgtatagatgcaaaacaggaaaaagttaggtacactcctgtttatgcatacagtttcaacgctgagctgccctcagcgttgttccgtttaattaacaggaaaacctggagagcctttcttgaaccaggaatatacagaagacaaacgtgttaaattaaaaagagtcagcagtggccgcaggcttctggaagccattctgttggttattgctatatgtgccgtatactaaatggtagcacttgtcagttttcacccttccgatcccaggaggtcacaaactgcctttagggc

SEQ ID NO: 1088 - DNA, 6980 bp, Xenorhabdus sp.; identical to SEQ ID NO: 1087
  CDS (5941)..(6093)

SEQ ID NO: 1089 - DNA, 6980 bp, Xenorhabdus sp.; identical to SEQ ID NO: 1087
  CDS (6174)..(6668)

SEQ ID NO: 1090 - DNA, 6980 bp, Xenorhabdus sp.; identical to SEQ ID NO: 1086
  CDS (4385)..(6127)

SEQ ID NO: 1091 - DNA, 6980 bp, Xenorhabdus sp.; identical to SEQ ID NO: 1086
  CDS (2613)..(4382)

SEQ ID NO: 1092 - DNA, 6980 bp, Xenorhabdus sp.; identical to SEQ ID NO: 1086
  CDS (1460)..(2419)

SEQ ID NO: 1093 - DNA, 4640 bp, Xenorhabdus sp.
  CDS (2784)..(4298)
  unsure (1)..(4640): unsure at all n locations
gtgctctaaacactaacctgntaagcggncaaattcaggttattcgtgtcgtagtgcggccaccccgttggtgccttattttctcagtacgctggattcggtggcgtggcgctccgggttgccggaatccttctacccggaagccctgatacccggtcagcgggagctgggcagccagatggccggcactatgtggggcaatatttatccgcgctcagggtttattaatcagacggatgatgacaaggcctcggctgtggtggcgcaacgggtcgcagatatcattacccgtgtcgggcaaccccatgtttatcagacattaaaaggcacccgtactgcgggttactggcctcccgaacctgtcaccgaaaacaccggtagcaaaaatcaccagtggcagcggttatcaccgcagttaagtcagtcctgcgccgtgtttcctgatggtgaacacacagcggcaatcgatggcaatcaggcgtatgccctgtggcagccttacagttgttgccagcggcgcggacagcgttttctcagcagtacggatatctgaacaaggaatgaatgataatgaaaaaaaacgcgttatggctgatagtcggtggactggtcatcgcgtctgcgcaagctaacgccacaggattatccctgacattaccgcaggtgaatcgcagtgcgctgggttatggggcagacgccagcggcaacgggtcgcagatatcattacccgtgtcgggcaaccccatgtttatcagcccctgaaaggcacccgtactgcgggttactggccaccggaaccggtcaccgaaaataccggcaccaaaaatcaccagtggcagcggttatcaccgacgttaagccagtcctgtgccgtgtttcctgatggtgaactcacggcggcaatcgatggcaatcaggcgtatgccctgtggcagccttacagttgttgccagcggcgcggacagcgctttctcagcagtacggatatctgaacaaggaatgtatgataatgaaaaaaaatgcgttatggctgatagtcggtggactggtcatcgcgtctgcacaggctaacaccacaggattatccctgatcttaccacaggtgaaccgcagtgcgctgggttatggggcagacgccagcggtgcagtgtctgatacgctgttctataccctggggggtggttcggtgatatctgaaccggccagtcgcagtagctccaccaccctcggtggattagagctgggctggcgttcggatttgatgtgcggcaattttgacctgaaagccacggtcagtaatcagttgaacgggattacggccgggttcaagaacctgatgagtgatgtcatccagggcgcaaccggtgccgtggccagcctgccggcgatgattattcaacgcgccaacccgggattgtatgacatgctgactaacggtgtgttgcaggcgaatgtggcgttcgacaaagcccagttcaactgtcaggcgatggccaataaaatgatggattttgcacaaaataataaatggacgcagtcagcggccttgcaggaatacaaaagtctggttaacggcggggatggggatgcggtgcgtgtcaataacgctggcagcaaagccaccggtgccggcggacatccgtggattggcggccagcggcagggtggtaagggacaacatgccattcgcccgacccgggatttagccagtgcgggttttaatatgatgaatcagttgccggtgctgagccagtcgtcggtcagcagcctgaaatgtgagggcagtgcctgccgtaaattcagccatgcccgtgaagcggccgacgcggtggtccgtgtgctgggcgaccgggtcatccgtacctgtgctcaggcggcagactgcaccagtggcggcgagacacaccagccgggcaccaccgtggcgggtacggggtttgccccgatgctggaagcacacaccaaaaccaatacagaacaactggtcaagctggtcagcggcgcggaaaaaccgacgatggtcaatctggcgaaactgaaaaccggcagtctgacggtaaccaaaggtgtcattcaggcgttgcagcgcgacccggaccgggctgccctgacgggacgtttagcgggagagctggcgatggcggaaaccgtggaaacggcgttactgatgcgccggatgcttataaccggcatgtccgaacccaatgcggcggcacagtcagaagcgctggctgaaggggaacgccggattgccgcgctggacagggaaatcaatgccctgaagaatgaaatgcagctgaaacaggccctgtcccgtaatgccatcctgaccattattgagcgggatacccagcgcatcaacatgcatccgcaaaaacaggtgccggacaacaccgatgcgcgtttttatcagctggaagcacccaatcgtgagcgcaggtaaggcggatgatggcagagaagcattcagtattcagaaaaggtgccgtgttatcaatgctcatcgtgttggtgatgggtatcactttggcgacaggctgggtcgggctgcatcaggcagaaaaacttaatcgcattcaccactgggtgaccgaaaccgggggagtctggttcgtctggcggttaggcctgtatgcgggactgggttggggagggcagaaaacctggcaacgggtgaaacatctgccggaataccgcgcaatgttgatacgaatgatggtggccagcctactgtttatcctgctgggcgagtatgccttgtcaggcactattaaggagatacgatgacagccaacagctatctggaatattttctgacactacttggctgggtcatcaacaatggcctgtggcatattctgattgccaccggactgtttacgctgccgttagtggtaaaagtgattgctgtctggctgacagtcagggagtgtggcgaagaagacggtcaggccggattacagtcgctggcccggattgaaaacaccctgtacggcgcgttcttcgtgatggtggtgtgttgtgtgccgctggccaatgtcagcctgaccacccttcagtacgatacttcccgtgccaaaagctgtggcacctggacaccgacaatcccggataacagtgggtatgcacccgtaatatccagcctgaataaccagaccgcggctgtgccgctctggtgggcggtggtccaccggttatccaagggactgacacaggcggcggtggcgtccattccctgccggccggatctgcggcaactgcgctttgacgtgcagcacacccgcatcagtaatccggctctggccgcagaattgcaggattttacccacgattgctatgccttagccctgtatcagtggaaacaacgcgatcaagaacacatcactgacccgattatcctgaatgatatcggctggctgggcagtcggacgtttttagccggggattaccggacgctgcaatcccgcctcccccgggcggattttccgtggcaggagcgtagggataacgggcggccgtataccgggcagggaggatacccgacgtgtcaggcctggtggtcaacggcccagactggtctgaaagaccgggtactggcgcaggccgatccggggttgtggttgcgcctgtcagcgacactgaaaatactgggtaaaaatacgccggcttatcaggaagcggtgatccgtcgtctggtcagcccggtgaatctgacgatttctcaggagggctatgtctacgcaggctatggcggcaatgccgatcccaccttgttggatggcgctaaccgcatcggcacttccgcaggggctttattgggtggattactcagtatgccgatgttcgatgcggtacgacaggcgctgccgatgatgcaggcggtgatcctgatggcgttgtatatcctcatacccctgattgtgttgtttgcggcctatgaatttaagaccatctttacgctgacatttgtgattttcgcgctgaatttcctgacgttctggtgggaactggcgcgctggctggacagccatttactggaagccctgtacggctcagatacccacagcctgtttaacttggccggcattcagaacacttcggatgatttaatcatggggctggtgatgggtacgctgtttattgtgctgccgatggtctggctgggggcattagcgtgggctggggtacggatgggcgatatggcaggcatgatgagccagggcgtggggcaggtcaggcaatctgcgggtatgtttggacagctggtgatgcagaagatgatgtccaaaggaaagtagacaaattaagcgattaaaattcaggggataggccactatcccttaaattgagtttgaatgtgatatttgcctttatttcattctatgaataatggttctgataattaaaataagtcatgttgttacgttaaggttttaattaatattcttctttatttttccatataaaaggttaaaaccaccgactttagtcggtcagctttagctgcgatactgtgttgcacgagaggtgcaatatggattacagatatggcagccacacggtatttcagattgagtatcattttgtgtgggtaacaaaatacaggcacaaagtgctaataggtgaagttctttagagca

SEQ ID NO: 1094 - DNA, 4640 bp, Xenorhabdus sp.; identical to SEQ ID NO: 1093
  CDS (2512)..(2787)
  unsure (1)..(4640): unsure at all n locations

SEQ ID NO: 1095 - DNA, 4640 bp, Xenorhabdus sp.; identical to SEQ ID NO: 1093
  CDS (1010)..(2443)
  unsure (1)..(4640): unsure at all n locations

SEQ ID NO: 1096 - DNA, 4640 bp, Xenorhabdus sp.; identical to SEQ ID NO: 1093
  CDS (71)..(553)
  unsure (1)..(4640): unsure at all n locations

SEQ ID NO: 1097 - DNA, 5332 bp, Xenorhabdus sp.; identical to SEQ ID NO: 318
  CDS (2436)..(3059)

SEQ ID NO: 1098 - DNA, 5332 bp, Xenorhabdus sp.; identical to SEQ ID NO: 318
  CDS (3145)..(3465)

SEQ ID NO: 1099 - DNA, 5332 bp, Xenorhabdus sp.
  CDS (5023)..(5253)
tgatccagtttccactggcattctgagcaggtagcagagaaaaggcgctgcctgttcccatatcaaggccaacaacttttcctgtatatacgatcttatcaccgtaaaaatcactgacgatttttgctggttgaccaatgcgcatattgacgagctgggtttctttgaagttagcttcaatccacatgccggtggcgggtacgatagccattaaaggcgttcctgtattgatgcgggagcctatctgtacattgcggcgggaaacatacccgtctacagggctgacaattttggttctctgtaaattcagccaggcatcacggacatcggaggctgctttttccactgcgggttgtttttccagcggtgtatgcaaaataacagcctgattactattgtactgttcaattgcgacattcaaatctgcctgagcaagcgctacactttcataagcatgttgtagctcttctttaccaattacttctcggctacccagtattttcctgcggtcaaaatcattctgtgcttttctgagggcaatttttttctgtgtaatgactgcctgatatttttcactatcaacgatctgttgctgagtattccgaaccgccatggcaagtccgttctgtgctttttttagtgcaagttctgcatctgtaggatcgagctgaaccagaacactgccacttttcacgaaatcggtattatcaaaatagaccgtggtgacactgccacttacctgagacatgatctgaatctgattacctgtgacataggcgttatccgtttcttgctggtggcgcgagaagagataccagtaaatggcataaataactccgacgatgagaaataataaagagattaaaatcaatgcattgcgacgagagggttttttgtttctcatatttttttgaggttgattcgaagttggtggtactggatttccctcactagaactcatagtgaatctccgtaatttttgtttatgttgctgtacgacataaatattataaaaaccattcaattccagtagtgtagatgacactactggaaaagatagacttatgggattgattattatcagaggataatcgttagccatatgaagtatcaaatgataccggctagcggaaaagtttttttaggtcatattgccataatgtgattttttgactcagtactgttcagggagaaacaattactttttcaaacaatccccaatattatccaactgtgtcagcaattttctcatcaaattctctaattgtttctgttcctccagatcaagggcagaccaaagtttaaccaagcactcatgctgaggcggaagtaaactattcaaaaaaattgtacctttttctgtcagatgaagatggagacaacggcggtcgttgtggctctcctttctttctatccagccttgcttctctaattcatcagcaattcgagttgcgtttgtacgaaaagaacccaacgctgcactaagttctgatggctgaatgctgcgactttctttggtatccaggatcatcagtgccataaacaaggtttcgttgattccttgagctctcagcatgttatttctattttccagcatcttactctggacatgcatcgataagcgagtcagtaatatctcttgatagggcaaacttttgttcaactctttttgctgtgcaacacggcaattaagcaactcttctgtgggagtgaatgaactttccattgtttagataccttattagtttcaaccggtaaagtaacttctgttaaaaaccatacaaatactatattaaaagttaaatttagcaattatagttatttattatcatcatatttcttttaatattgatacctaattcataaatactttgaatgttaatccaaaaatggctgctccggacagtgtagatatgataatgctacgtgtcttatagaagcatataccgatagccagacagcccaacagtgtaggaaaaaacttgttatgtgcccgcatcacctcaggaattcctgcaacgatgaggagcgaacaaattgatgccactccaatactgtccaatatgatcccgatgtttcccatttttgctccgggagaacgattcgagccaaagcacagtggcagatagcggaacaaaaagttggctattcctacaaccattccaattatgaatatattatgatcaatcatgagatgctttttcccccacttgagttaggtgagcttgtacaagagcacctaagcagccaccaataattcctgccagaatggcaaccgggatagaaaaaaacatgacacctattaacgcgcctgccagagaagcaataacgcagtaattattttgttttttgaaggaagagagcagaaaacttaaaaatagggctggcagcataaatatcattgctgcttcaatagcggggtatgattcgagataaccattacccagtaatgcgcccgctattgtacccaatacccatgacagccacgaacacatggcaatggcgaccatccagttttcgctccagctgcgctgatcttttattaatttcgttgtagcagcagcgaaaacttcatcggttaatccgaacgcccaaataactgttttcttttgggataatttttgcttgagccgatagcgtaaggccgggccatacagaatgtggcggatatccatcgccataaccgtcagggctgcaatccataaagatgtacctgcactgagtaatgctgtgatgacgaattggctggcacctgcgtagataacacacgaaaaaaatatggcttcgagaggagaaaaacccagtttgactgcacttagaccgaaagcaaaagagatgggaatatagccgataacaatggggagactatcaaaaataccttcaataaatgaggaacttttgcctgttatagtgtggtcatttatcggcgtgtctgaacttaagctatcgggcacgggtgtatcaggtatcgacatagggtaatttatttttttgttaacaggtaaaacaacatttacaaaatataataaaagtgaaaatgtgaaatgtctaaattatttaataaatattattgagaacaatgattttgatcgaaaaaatggagtaaccagagatatgggtgttgatttgttaataaatttatgtgtggctatgaacaggagcagaggaaagggtttttgctttatggattttctggttactctggagaagagcgtattgaatgttgtctgaacaggatccctgtctgagttatcatttttctgcatcaccatgaatctcttttttccggtggtttttttatcgggctctaaattttctcaccaatgtatataccctgattatattctttgccgcatttaaatatggcacgagggaaaattggtttgatcggaaattatactgtttttattgtggagaatttcccgtcattagttatctgaacttatacaattatcttgtctattgatatttttctggcttttaaacagttttatcaggcgattatgaagacatacatcctgctttttttgcaaatgttcagatttatcgtagttgaatttcaataaattaacagcttgttttggacaataactgaatacgttatataaattcttaactttgggtttaattgtcatgtaataaatatttagctttgtgaaaaggtatattctctttaatggcttaatctagataaattttccaagctatataccgaagcgttgagatatgctgacaaattattgtttattattgttaatcaaaagataatctgttttgtagataactgtttgcatttaagacttaatttgaatctttcattgcagatagcgtgatttaatagaaaaaatattgatgtcatggctgggatgaaaaataactcctcaggagtttatctcttctgggggaggatatacgttgagatttatttgttatcgctgccagatgaaaagtgtttgcatctgattttcgatgagtataactacccgggatccaatggtgtttgccataaattatcactcttctggtaaaattctttattgatccgggcacttattgaagaataaaaaagagtattgatgcattacactttgataatctctttatgagaacgatactatatatggatttgtgtttattttttgtgtcaatatatggtgtttttatcttttttgaatgtgtgttattaaaagtaaggtattatatcttattggcaatcctctgatttttattatcagtaggcggtatggtttctttatcaaattgtcagatgtgtaactgaattcatcattgcaaattgatgaaggagagctttaggctagtatagaaatagtgcagaaattattaacaataaattaaatggaggtagtttatgtatcaccattatctgaatactccagaaggttttcctaaaccttatgtgcacgtcactgctaatgatgaaggcgttactagtatttattttgttaatgaaaagaaagaattagaatctaaaaatgcgataactaagcagtgtgtaaaagagttacaagaatattttaaaggaaagcgagatacatttacggttcctttaagtatgcagggaactgaatttcagcagcgggtttggaagcagctctgtaatatcccatttggtgagatgtggagttacaaacaattagcactaacactgggttcggtaaattattgtcgtgccgttggtatggcgaactcacgtaatcctatttcactgattgtcccctgccatcgggtaattggccatgatggtaagttagtcggatatacaggggggctgaatattaaggaatggctgctggagcacgagaagaaaaaaaaggtaaaaaagtaaacaaaactaaaatgaaacgccaattgatttgtgaaatggcgattggcgtataaaataaatcaatgaaattaaacaaaacgtgcgtttttcgcattttgttatatatttcgtgatctaggttgcagacagtaagctatattatttgttgtactgtatgtagcacggagtttgtgtcatttttattaaaggtaagtttgatgtctaaaattaaaggtaacgttaagtggtttaacgaatctaaaggatttggttttatcactccagaagatggtagcaaagatgtttttgtacacttttccgccattcaatcaaatggtttcaagacactggcagaaggccaaaaagttgaatttgaaatcaccgagggtgcgaaaggtccatctgctgcaaacgttgtcgcgatctaatttctaatcccgtattttgaaaacccgttataaaaacgggttttttttatgttttctgacactcgcgtcgtctttagag

SEQ ID NO: 1100 - DNA, 5332 bp, Xenorhabdus sp.; identical to SEQ ID NO: 1099
  CDS (4370)..(4846)

SEQ ID NO: 1101 - DNA, 6050 bp, Xenorhabdus sp.; identical to SEQ ID NO: 348
  CDS (5961)..(6050)

SEQ ID NO: 1102 - DNA, 6050 bp, Xenorhabdus sp.; identical to SEQ ID NO: 49
  CDS (4723)..(5100)

SEQ ID NO: 1103 - DNA, 803 bp, Xenorhabdus sp.
  CDS (147)..(776)
taaagctttagagaaaatatccggtctacgcataatttagaataattattgagtataaatactgtataaatagtaataagcccgtctcattagttttgagcgggtttttttgcattaaacttttgcattaaacacgggggcaaaggatggttgttccatcaacattttggctggggttaggctatttcacctattttttctcttttgggatctttttaccattctggtcagtctggttgcagggagaaggcattactccttccatgatcggcataatattaggcattggtttagtttcccgctttgttggcagtctcattatttctcctacagttaaagatcctgcaaaattaattacagcattaagattattatcttttctggctttgatctttgcggtcagtttttcttttggcagccactgggcatggatttgccttgtaatgataggttttaacctgttttttttgccggtagtccctttatcagatgctttagcgggtacatggcaaaagcagcttacttttgattatggcaaagggcgtgtgtgggggtcgatggcctttattatcaattcttctttaaccgggatatcactctcttcctccggtattgactttggatcaagtatcaccatttcctttgataaactgaatgactggattggtggcattttatttggccatcaccagataatgctcgcttatctgtttatcactgttgctattatgctgtcaggtatgatgctgaaaccgtatattatgccggagggctaaaattaaggaacaaaatgccttttcagt

SEQ ID NO: 1104 - DNA, 5453 bp, Xenorhabdus sp.
  CDS (3222)..(3557)
tgctcgagccatgtgctctaaagcccacaggttgaaatcgtatccggcaacccagcctacaacataaccgttgtttcctgagtagaacttgttgtcggtataatttaaagcgacgaacggtttgaaccacagacctgcgacggttgtattataacctaatccatagagtgtattgacttcatggaagtttccgccatttccgggaagagagtagcttccgtaaacatgtccgtaaagattgaaacctgtttctcccagataataacggcctgttgttttgaaggcgtatcgtaggttatcaccgggttgtgcagtcttgctgttaaatggattttctaaatcaaagaaaccatacagctctccccagctgaagcctgctccaccttctagttccatataagcgaaatcatctttgtgagaagactgcccggttttgtgtgttgtgtgtttgctccagtcaaggtagttcatgctgacattggcaaacccccactggtattccgcgctggctgaagcagaaaccaaggcggcagcaactgctgtgagtgtcaaaatatgtcttttcataaattccctttatatggctttagataaataaagatattttggatagttcgaaacaaaataaatgtgaacgtgagaataataatatttattagtacaaatataaatgtttcccctctagaaaagatgtttcttgggtcacataattttagttttttactattattgtgataataatcactaaataagagcaacaaaagactgaactttatcagccttttgttgtagtggtgggaattttaagcaaatttactttttttcaatgcgatgtagtccagaataccacctagcagtaatcctatgacaccaatgacaacgctccaggacaacatagggtatataaagtcacttgtgttattaaaaagatcgatatatttaggagagatataaagcaccaaagtgacaatatgcgttattacaaacaacaggctatttataattagccaggcagcaaaaataagtgcagccagagtcatcgtcaggaaggctagtcgataatagttactgaataatgtccgaggaataaaactatctgttttttgagtataagccagtgtactacgacaaaccagcaggagagccaggcccggaaacccaatcacaatggaaaacaaataaaacattggccagccatgagcctcagcaaaccagcctgcaaccgggccgacatacactcgtcctactgcggataacgctgaaagaagagcaaattgtgtcgctgaaaaagacttattgcaaagtgtcatgagtaaggcaacaaatgctgctgtgcccataccaccacagatattctccagaaatatagccccccccatgacataaatatctttgggggtgacggcaagtatccaataaccgaaatttgaaatggtttgcaggaccccgaagatcatcaatgcacggaacagactccacttctgcattaaataaccaccatatagcgctcctacaatggtagcggccagcccaagggttttattgatcataccaacttcggccggattaaaaccaactcctcggataagaaaaggagtactgagggagagggcgaaagcatcagccaatttatacataacaattagcagaaggataagccaggcattatttcgactaaaaaaatcaaataaaggttctacgacggcctgatgtaacgtttttggtggcgctgtatctatttggggttctttaccggtaagagtatcataaacaccaatcagtatttgaccggccataagccagtacatactattccagccaatataagttgttacccatagggctaaaccgccggaaaccagcattgccaaccggtagcctaatacagaaatcgcagctccggcaccgcgttcttcctgctgaagaaggtcggttttataggcgtcgaaaataatatcctgagaagcagaaaagaaggcgacagcaacagctaatgcggctaaccaccataaatgttgtgagggattcagaaatcccatccctgctatactgataatgagcaaaagctgggtaacaagcatccatccacgtcgccgtcccagaaatgaaggggaatagcgatccatggcaggtgcccagagaaatttaaagacatatgcctgaccaactaaagtaaaaaagccgatagttttgatatcaacatcttccactgtcatccatgcctgtaatgtgcctgctgtaagagcaagaggaaggccggatgcaaaacccagtaaaagaagaatgcggtaattacgtattgctgataagttaagagcatgatttgccataagcccctccaatactttctgcctatagtctactgaaagtgacttcaatagaatcaggcagaaagcatattcatattctgttagcgaacgttttgtttgatgaaggtgctgattgacgaatcttgggccatatctgcgataacatcagataatacagtattaactgcatcagcaattttcgcgttagttgcacttaatggagcctgaacattatagctggtgcgatagttcttgatttgtttattgccatcctgagcataaacaatcactgaaatttctgcttttgctgaaatatcgtgacgtaaactgccttctttaacattggcataaagctgattgacaacaacttgcaagttggcattagccggagagccaatcatataaccacgagcgaccatttgcttttccagtgcttcttgcagtaaaaagcgtaaatctcgtgaaggtagcagcgtgactaattttgcatcccggtttacttgagccagggcttgagattgccgctggtcgaccccactaatactgattgtgatagctttcatcgtcgggtctgctgatggcagggcgattttaggctgaatagcgagtgtattgctgggagttgcacagccagtcagattggctaaaaagagaagtgcaaatggaataagtattttctttagcatgtaaatggtctcattctggatacggatacccggtatagtaatacagatagtacaaaccgttgcaatcataacactgcgataggtagtggcatatccctaatgcttactgattgaaagatatagggaaataaacaaaatgcatttggtttaagataattagatgtttgaatcctataaatcgcgggaaataaactaaaatcaatatatggttgattaataacctttggtgactaaggagaatgagatggttcgtcaggaaatagaaacaaagttacgggcggcatttaagccttctcatctggaagttattgatgaaagttatcgtcataatgtaccagcaggttctgaaagccattttaaaatcattgtaatcagtaatgcatttattgatcagaggatgcttaaccgtcatcgctcagtatacagcaccctggttaatgagatggctggaggagtacatgctctggcacttcacacatatacagaaaaagagtggatggaattggaagatactgttctgaactcgccagcatgccggggaggaacggcgacgacttcatgattttacagagtagagtagagagcttgtacttactttttaattaatttggttttcacgttaaactacagccttcgggctgtatttttgtttatacccgttattttaagttatagcgttgctggttatgcatgcccatccggttacatcatgcatgatgtaaccgaggaaatattcttgcaaccgcgctctatcttgaagtccatgaggatattcatatcgaataaccaaaggcatgatgtggttattgagcaatgcttatcacataagtcaacgaatattgcacgcttttgccagcaattctcgactcatcctgtctgcatcgctataatgctgcgtctaaatttttacaatagtttcggggcgcttctgatcacagggattctcggtttttaaatgcgaccaccccggttcttgaagagtgctgcaatttgcccgtattaggtgttgtaccattctgaagttgaccgagcactatgatttttttgaggtaacaagatgcaagtttctgttgaaacaactcaaggcctagggcgtcgtgtgtcaatcaccgttcctgctgccgacattgaaaaagcagttaacagtgagctggttaatgtagcgaaaaaagtacgtattgacggtttccgtaaaggtaaagtacctatgaaaatcgttcagcagcgttatggcgcctctgtcctgcaggatgtactgggtgatctgatgcagcgtaatttcatcaatgcgatcattgagaataaaattaatccagccggtgcaccaagctacaaaccagagcagtttaaagatggcgacgacttcgtttatgcagttgaattcgaagtatacccagaaatcgaactgaaaggtctggaagaaatcgaagttgaaaaaccagttgttgaagtaaaagatgcagatgttgacactatgctggaaactctgcgtaaacaacaggctgactggaaagaaaccgatgaagcagcagctgcagaagatcgcgtaactgtagattttaatggctctgttgacggggaagagttcgaaggcggtaaagcaacagacttcgttctggcaatgggccaaggccgcatgatcccaggtttcgaagagggtgttgttggtcataaagcgggcgacgaattcactatcgatgtgactttccctgaagattaccatgctgaaaacctgaaaggtaaagcggcgaaattcgcaattaacctgaagaaagttgaacagcgtgaactgccagaactgactgaagagttcatcaagcgttttggtattaccgaagcgacagttgatggtctgcgtgcagaagttcgtaaaaacatggaacgtgaactgaaaaatgcagtacgtaaccgcattaaaactcaggttctggatggtctggttaaggctaacgaaatcgacgttcctgctgcggctattgatggcgaagttgatgtactgcgtcgtcaggcggcacagcgtttcggtggtaatgaagcgcaggctctggaactgcctcgtgagctgttcgaagagcaggcaaaacgccgtgtagttgttggtctgctgttaggtgaagttatcagcagcaatgagctgaaagttgatgatgagcgtgttaacgcgctgatcgaagaaatggcttctgcatatgaagatccaaaagaagtcgttgaatactacagcaaaaacaaagaaatgatgaacaacatccgcaacgttgctctggaagagcaagctgctgaattggttctgagtaaagcgaaagtttctgagaaagaaactggctttaatgatctgaagaatcagaatcaaatggcctaagtttcatttattgattacctgagaagatcaattcttctttcagtaatgccaaacccgcaagcgaagcttggcggtttttttatggctttagccagt

SEQ ID NO: 1105 - DNA, 5453 bp, Xenorhabdus sp.; identical to SEQ ID NO: 1104
  CDS (4053)..(5357)

SEQ ID NO: 1106 - DNA, 5453 bp, Xenorhabdus sp.
  CDS (4887)..(5453)
actggctaaagccataaaaaaaccgccaagcttcgcttgcgggtttggcattactgaaagaagaattgatcttctcaggtaatcaataaatgaaacttaggccatttgattctgattcttcagatcattaaagccagtttctttctcagaaactttcgctttactcagaaccaattcagcagcttgctcttccagagcaacgttgcggatgttgttcatcatttctttgtttttgctgtagtattcaacgacttcttttggatcttcatatgcagaagccatttcttcgatcagcgcgttaacacgctcatcatcaactttcagctcattgctgctgataacttcacctaacagcagaccaacaactacacggcgttttgcctgctcttcgaacagctcacgaggcagttccagagcctgcgcttcattaccaccgaaacgctgtgccgcctgacgacgcagtacatcaacttcgccatcaatagccgcagcaggaacgtcgatttcgttagccttaaccagaccatccagaacctgagttttaatgcggttacgtactgcatttttcagttcacgttccatgtttttacgaacttctgcacgcagaccatcaactgtcgcttcggtaataccaaaacgcttgatgaactcttcagtcagttctggcagttcacgctgttcaactttcttcaggttaattgcgaatttcgccgctttacctttcaggttttcagcatggtaatcttcagggaaagtcacatcgatagtgaattcgtcgcccgctttatgaccaacaacaccctcttcgaaacctgggatcatgcggccttggcccattgccagaacgaagtctgttgctttaccgccttcgaactcttccccgtcaacagagccattaaaatctacagttacgcgatcttctgcagctgctgcttcatcggtttctttccagtcagcctgttgtttacgcagagtttccagcatagtgtcaacatctgcatcttttacttcaacaactggtttttcaacttcgatttcttccagacctttcagttcgatttctgggtatacttcgaattcaactgcataaacgaagtcgtcgccatctttaaactgctctggtttgtagcttggtgcaccggctggattaattttattctcaatgatcgcattgatgaaattacgctgcatcagatcacccagtacatcctgcaggacagaggcgccataacgctgctgaacgattttcataggtactttacctttacggaaaccgtcaatacgtacttttttcgctacattaaccagctcactgttaactgctttttcaatgtcggcagcaggaacggtgattgacacacgacgccctaggccttgagttgtttcaacagaaacttgcatcttgttacctcaaaaaaatcatagtgctcggtcaacttcagaatggtacaacacctaatacgggcaaattgcagcactcttcaagaaccggggtggtcgcatttaaaaaccgagaatccctgtgatcagaagcgccccgaaactattgtaaaaatttagacgcagcattatagcgatgcagacaggatgagtcgagaattgctggcaaaagcgtgcaatattcgttgacttatgtgataagcattgctcaataaccacatcatgcctttggttattcgatatgaatatcctcatggacttcaagatagagcgcggttgcaagaatatttcctcggttacatcatgcatgatgtaaccggatgggcatgcataaccagcaacgctataacttaaaataacgggtataaacaaaaatacagcccgaaggctgtagtttaacgtgaaaaccaaattaattaaaaagtaagtacaagctctctactctactctgtaaaatcatgaagtcgtcgccgttcctccccggcatgctggcgagttcagaacagtatcttccaattccatccactctttttctgtatatgtgtgaagtgccagagcatgtactcctccagccatctcattaaccagggtgctgtatactgagcgatgacggttaagcatcctctgatcaataaatgcattactgattacaatgattttaaaatggctttcagaacctgctggtacattatgacgataactttcatcaataacttccagatgagaaggcttaaatgccgcccgtaactttgtttctatttcctgacgaaccatctcattctccttagtcaccaaaggttattaatcaaccatatattgattttagtttatttcccgcgatttataggattcaaacatctaattatcttaaaccaaatgcattttgtttatttccctatatctttcaatcagtaagcattagggatatgccactacctatcgcagtgttatgattgcaacggtttgtactatctgtattactataccgggtatccgtatccagaatgagaccatttacatgctaaagaaaatacttattccatttgcacttctctttttagccaatctgactggctgtgcaactcccagcaatacactcgctattcagcctaaaatcgccctgccatcagcagacccgacgatgaaagctatcacaatcagtattagtggggtcgaccagcggcaatctcaagccctggctcaagtaaaccgggatgcaaaattagtcacgctgctaccttcacgagatttacgctttttactgcaagaagcactggaaaagcaaatggtcgctcgtggttatatgattggctctccggctaatgccaacttgcaagttgttgtcaatcagctttatgccaatgttaaagaaggcagtttacgtcacgatatttcagcaaaagcagaaatttcagtgattgtttatgctcaggatggcaataaacaaatcaagaactatcgcaccagctataatgttcaggctccattaagtgcaactaacgcgaaaattgctgatgcagttaatactgtattatctgatgttatcgcagatatggcccaagattcgtcaatcagcaccttcatcaaacaaaacgttcgctaacagaatatgaatatgctttctgcctgattctattgaagtcactttcagtagactataggcagaaagtattggaggggcttatggcaaatcatgctcttaacttatcagcaatacgtaattaccgcattcttcttttactgggttttgcatccggccttcctcttgctcttacagcaggcacattacaggcatggatgacagtggaagatgttgatatcaaaactatcggcttttttactttagttggtcaggcatatgtctttaaatttctctgggcacctgccatggatcgctattccccttcatttctgggacggcgacgtggatggatgcttgttacccagcttttgctcattatcagtatagcagggatgggatttctgaatccctcacaacatttatggtggttagccgcattagctgttgctgtcgccttcttttctgcttctcaggatattattttcgacgcctataaaaccgaccttcttcagcaggaagaacgcggtgccggagctgcgatttctgtattaggctaccggttggcaatgctggtttccggcggtttagccctatgggtaacaacttatattggctggaatagtatgtactggcttatggccggtcaaatactgattggtgtttatgatactcttaccggtaaagaaccccaaatagatacagcgccaccaaaaacgttacatcaggccgtcgtagaacctttatttgatttttttagtcgaaataatgcctggcttatccttctgctaattgttatgtataaattggctgatgctttcgccctctccctcagtactccttttcttatccgaggagttggttttaatccggccgaagttggtatgatcaataaaacccttgggctggccgctaccattgtaggagcgctatatggtggttatttaatgcagaagtggagtctgttccgtgcattgatgatcttcggggtcctgcaaaccatttcaaatttcggttattggatacttgccgtcacccccaaagatatttatgtcatggggggggctatatttctggagaatatctgtggtggtatgggcacagcagcatttgttgccttactcatgacactttgcaataagtctttttcagcgacacaatttgctcttctttcagcgttatccgcagtaggacgagtgtatgtcggcccggttgcaggctggtttgctgaggctcatggctggccaatgttttatttgttttccattgtgattgggtttccgggcctggctctcctgctggtttgtcgtagtacactggcttatactcaaaaaacagatagttttattcctcggacattattcagtaactattatcgactagccttcctgacgatgactctggctgcacttatttttgctgcctggctaattataaatagcctgttgtttgtaataacgcatattgtcactttggtgctttatatctctcctaaatatatcgatctttttaataacacaagtgactttatataccctatgttgtcctggagcgttgtcattggtgtcataggattactgctaggtggtattctggactacatcgcattgaaaaaaagtaaatttgcttaaaattcccaccactacaacaaaaggctgataaagttcagtcttttgttgctcttatttagtgattattatcacaataatagtaaaaaactaaaattatgtgacccaagaaacatcttttctagaggggaaacatttatatttgtactaataaatattattattctcacgttcacatttattttgtttcgaactatccaaaatatctttatttatctaaagccatataaagggaatttatgaaaagacatattttgacactcacagcagttgctgccgccttggtttctgcttcagccagcgcggaataccagtgggggtttgccaatgtcagcatgaactaccttgactggagcaaacacacaacacacaaaaccgggcagtcttctcacaaagatgatttcgcttatatggaactagaaggtggagcaggcttcagctggggagagctgtatggtttctttgatttagaaaatccatttaacagcaagactgcacaacccggtgataacctacgatacgccttcaaaacaacaggccgttattatctgggagaaacaggtttcaatctttacggacatgtttacggaagctactctcttcccggaaatggcggaaacttccatgaagtcaatacactctatggattaggttataatacaaccgtcgcaggtctgtggttcaaaccgttcgtcgctttaaattataccgacaacaagttctactcaggaaacaacggttatgttgtaggctgggttgccggatacgatttcaacctgtgggctttagagcacatggctcgagca

SEQ ID NO: 1107 - DNA, 5453 bp, Xenorhabdus sp.; identical to SEQ ID NO: 1106
  CDS (3214)..(4650)

SEQ ID NO: 1108 - DNA, 5453 bp, Xenorhabdus sp.; identical to SEQ ID NO: 1106
  CDS (2444)..(3043)

SEQ ID NO: 1109 - DNA, 4572 bp, Xenorhabdus sp.
  CDS (3157)..(4494)
ttttatgtcaaaagtgtttcagggagaaggctttgatgaatacctgagggaaatacgctccctttttacgaaggttaaaattcgtaaaccggacgcttcgcgggcacgttcgcgtgaagtatacattgtagcgacggggcggaaagtatagtaccctgctgctatttgttaacacagttgtaataagaggttaatcccttgagtgacatggcgaaaaacctgattctctggttagtcatcgcagttgtcttgatgttattgttccagagttttggtcccggcgattctagtggtcgtagggtggattactctaacttcatcagtgagttatcacagaatcaaataagtgaagtacgtatttctggtcgtgacattgatttcactaagaaagacaacggtggaaaatacagcacgtatatgccagttccagatgagaagctgctggatacactgctaaacaaacaggtaaaagttgttggtgaaccaccagaacaacagggcctgttagcgtctatctttatttcatggttcccaatgctgctgctgattggcgtttggatcttctttatgcgtcaaatgcaaggtggtggcggtaaaggagcgatgtctttcggtaaaagcaaagctcgtatgctgacggaagatcagatcaaaacgacatttgcagacgttgctggttgtgacgaagcaaaagaagaagtgggtgagctggtggaatacctgcgtgaacccggccgtttccagaaactgggtggtaagataccgaaaggcatcctgatggtagggcctccgggtacaggtaaaaccctgctggcgaaagcaattgcaggtgaggctaaagtaccattctttaccatttctggttctgacttcgttgaaatgtttgttggtgttggtgcttcccgtgttcgtgatatgttcgaacaggcgaaaaaagccgctccttgtattatttttatcgatgaaatcgacgcggtaggccgtcagcgcggtgctggtctgggtggtggacacgatgaacgtgaacagacactgaaccagatgctggttgagatggatggcttcgaaggtaatgaaggcatcatcgttatcgctgcaactaaccgtcctgatgtactggaccctgcactgctgcgtccgggccgttttgaccgtcaggtggttgttggtctgcctgatgtacgtggtcgtgaacaaattctgaaagttcacatgcgtcgtatcccgctggataccgacattgatgcttccatcattgcccgtggtacaccgggattctcgggtgccgatttggcgaacctggtgaacgaagctgctctgtttgctgcccgtggcaacaaacgagtcgtttcaatggtggaatttgagaaagccaaagataagatcatgatgggagcagaacgtcgctcaatggtcatgacggaagagcagaaagaatctaccgcttatcatgaagcagggcacgccattattggccgtctggttcctgaacatgatccggttcataaagtgacgattatcccacgtggtcgtgcgttgggtgtgactttcttcctgccagagggtgatcaaatcagcgccagccgccagaaactggaaagccagatttctactttatacggcggacgtctcgcagaagagatcatctacggcccagagaatgtttctacaggtgcatcgaacgatatcaaagtagcaacatctattgcccgcaacatggtcacgcagtggggcttctcagaaaaactggggccattactgtatgcggaagaagagggtgaggttttccttggtcgttcagttgctaaagcgaaacacatgtcggaagatactgctcgcttaattgatcaggaagttaaggttctcgttgaccgcaactaccagcgtgcacgtcagattctgatggataatctggacatcctgcactcgatgaaagatgcgttgatgaagtatgaaaccattgatgcgcctcagattgatgacctgatgaaccgtactaccgttcgtccaccggcaggttgggaaggcgataacagaaatggcggtaatagcaataatagtaataaccgtcaggatacatcgtctcagcagcagtctgcgaaacctgcggatggtaacccaaccgcataacctactcaaaccaaaggcaactataagtaacacaggttgcctctggttttgacagaccgtactgattaaaccccggggcaaacctggggtttttaacattaaggctccctagcaatgaaactgacagccagaggaagtatccttgatctttcccatccacaggttatggggattttgaatgtcactcctgactctttctcagatggtggtacacacaataccctagatacagccttacgccatgctgtcagcatgattgaagaaggtgccacgattattgatgtcggcggggaatcgacacgccccggtgcagatgaagtcagtgagcaggaagaactggaccgtgttgtacccgtaatagaagctttgtcccggcgttttgatgtctggatatcggttgatacttcaaaagctatcgtaatacaggaagctgcaaaagccggcgctcacattatcaatgatatccgctcattacaggagccgaatgcgctggaagaggctgccaaaacaggcttgcccgtttgtttgatgcacatgcaggggcagcccagaacgatgcaggcagaaccgcattacactgatgttatagcggaagtaaaagcatttctggaagctcagattgagcgctgtatcgcggctggtattgcaaaagataacctgataatcgatccgggcttcggttttggtaagaatttatcgcataattatcaattattggctcagttgaaaacattccatcatcttggtgtacccatcttggctggcatgtcgcgtaagtcaatgattgggcagttacttcatgtaccccctcaggaaagaatcacgggaagtgttgcctgtgctgtcattgcagcaatgcaaggcgctcagattattcgtgtgcatgatgtaaaagaaactgtgcaggcaatgcagattgttcaggcaaccttgtcagagaaaaatacgctgtcagcaacaggcaatttgtgaataaagaacgatctgtgaacaacgaatacgttcagcaaaggaagaaagaagtttatgagtaaccgtaaatattttggtaccgatggtatccgtggcaaagtcggcaacagcccgattacccctgattttgttttaaaacttggctgggctgcgggaaaagtactggcgcgccatggttctcgcaaaattattattggtaaagatacccgtatttctggttatatgctggaatctgctctggaagcaggcctggcagctgccgggttatctgcctcatttaccggtccgatgccaacacctgccgtggcatacctgacacgcactttccgtgctgaagccggaattgtgatttctgcttcccataacccttactacgataacgggattaaatttttttccattgatggcaccaaacttcctgatgatgtggaagaagcgatcgaagccgaaatggaaaaaccactgacttgcgtagaatccgctgagttagggcgtgctaatcggattgttgatgcagctggtcgttatattgaattctgtaaaggtacattccctagtgaacaaagcctgaatggattgaaaattgtactggattgcgctaatggcgcgacttaccatattgcgccaaatgttctcagagaactgggtgctgaggtgatagctattggctgcgagccaaatggcattaacatcaatgaagaatgcggtgcaacagatgttcgcttattacagaagcgggtattggaagaacaggctgatgtcggtctggcatttgatggcgatggtgaccgcattatcatggttgatcatctgggccataaagtggacggagaccagatactttacatcattgcacgtgaagcattacgccaagggcagctgcgtggcggagctattggtactttgatgagtaatatgggactggagctggcattgaagcagcttggcattccatttgaacgtgcaaaagtgggtgaccgctatgtactggaaaaattacaggaaaaaggctggcgtctgggcgcggaaaattcaggccatataattttgctggataaaaccactacaggtgatggcgttgttgctggtttgcaggtattgagcgcaatggtacgtaatgacatgaccctgcatgatttgtgtagtggcatgaagctgttgcctcaggtactggttaatgtgcgttttgcgggcaataacgacccacttcaatcagaacaggtactggaagtagttaaagaggttgaaaacgagttaaatggccgaggtcgcgttctgctgcgtaaatcaggtactgagcctctgatccgtgttatggtcgaaggagaagacgaagagcaggtcactgcattggcccatcgtatcgctgattcagtgaaagggatgagctgatttgttgattttttcctcaatcagcgtcagtatttaaaattaaccttgcttgtctgagacgctttctgtagagcacaa

SEQ ID NO: 1110 - DNA, 4572 bp, Xenorhabdus sp.; identical to SEQ ID NO: 1109
  CDS (2245)..(3102)

SEQ ID NO: 1111 - DNA, 4572 bp, Xenorhabdus sp.; identical to SEQ ID NO: 1109
  CDS (199)..(2130)

SEQ ID NO: 1112 - DNA, 5753 bp, Xenorhabdus sp.
  CDS (2368)..(2748)
ttaataatataaccagtgaaaatataaccaaaaatctgataatatttctttttttaagacctatatgaaattagttattttcctaatttattgcagtattaattcattttatttatagataaatttagtgatattgaatgtaaggaagaaataatgcgcatcattgcaatacggcatgcagaaactcaatggaatatagaaagaattcttcagggacgtcttgatagccctgtgactgaaaatggtttccgacagataaattcattattatcagcaataaaagattttcccatcagcaaagtgatttcatcttcttccggtcgagcctgtacgacaggtcaggttttagcagattatttcggttgcaggatggaaattaatgaaaatttatgtgagcaaaattttgggatattagagggattgccctttggacaggccgattatcactaccccaacattacatcacggctttttgccggagatccaacggtaactatacctgaaggcgaatctaccattgaagtagcgcaaagagccatcagttgcatacaaaatctggcaacaaataatagtaatgctacgatatgcttggttacacatggccgtactctgcaatccctgttatggcaactaaaaggcggtaatttacaagaggaaacaacacgatatagtcaccaaaattgtagttactctgttattgatgttaaaaatgagagaattcatgtggttcgctggggtgttgcaacgcatttattaaaataaaaacataatcgtagaagcatcttcgctgccctgtttcataaaacctcaggactataacaaaaaaccctaaaagcattgtattttaatattcgatagtatgttccaaagacagtagctttctgttaatgaaaatacagaaataatgaaagtcctttattttaaggtatctaaaaaataacaatgggattctattgtgcacaacgaatactcaccatactttattaacctcagtcaggtttttaacccagaaatcagaatattttgcttcccttatgcgggaggtagtaactcaacttttgttcctttcgccagaaaaatcacagaaaatgttgagtttttagtcagccagcctccgggtaaaggggctagattcaaagaaaaaccttatgacaatatgcaaaacctggttgaggatatatataccaacatcaagccactgttggataagccatatatatttttagggcatagcttaggaagccgggtagcttttgaactgttaagaaaaatcgctgcagaatcattgccattacccattgaatttattgcttccggcagcagagggccacaggtttctgccattcgcaaaccaataagttcattaaacgacaaagaatttgcaattgcattgaaggatttcggccgcgtaaatcagcaaattcttgagaacgatgaattactctcgctgatcttacctgccataaaagcagattttaagatttcagaagagtattactatatcggaacagagtctttcgcttgccccttgacagtatttggaggcacagatgacccgctggtagctgagcatgaactttattcctggtttgatttattcgaacaggataaaaatgttattttgtttcagggtcgtcatttctttattgatgataatcatgatttggttattgatgctctaacaaagataattcattccaaaatatccaaacgaccatttaaaaccttatcaggtaattaaaacgatacaaaaattacgggcttcacattatctatgtatacccgtaaattaatattgataaaaataaaaaccaacgtacaattataaaaatttattagtggaggccccggcatggaaaaatttactgataaattaattagtttggatcgctttcttctgcgaatacttcgtttccttttacatgcgctggctatttttttaattggcattattcccggtgtattaggttttttcctcattgaaagccatgcaattcctgatgcactgttaaattctgtttcaatgattggcacacagagcctgcatatacaaccaaccagcacactggggaaatatttcgctgctatttatgggttatttctacaggctatcttttttattgccgttggattagtagtgacgccattcgttcaccgtattcttcacaattggcatattgatgatggtgatgaaaacgatcataaagaaaaggaaaataaaccttaacgctttctctttatgatttaatatcaataattgtgataaatatgacatattcgacaaaataaataattaaacaacatctgtatttgatatagaattttattactcacgtttatcttaaacacataggtaatacaatgaataaaggtcgctgtttgtgtggtgcagtcgaagtaaaaaccaatgatcctattgatactatcaatgcatgccactgtaaaacatgccagaattggggcgggggaccatttctctctgtagagtgtaaaaataatttacagataacaggagatgaaaacattgcaacttacccctcttcagaatgggcagaacgcgctttctgtaaaaaatgtggaactcatcttttttatcacctgcatcatcccagtacttattatgtcccagtagctctatttgaaaatagtgattcgggaaaattatccaatcaagtatttatcgatagcaagcccagttattacaattttgttgaaaaaacaccaatgctaactaaacaagatattcttaacttgtttagttaattatcattatgaggggaaattcccctcataataattatcaacttcaatactcacgtaaaattcatatttccccttccctgctaaaatcagcataaatagttttcatcgcaaacaaattttgtgcaaataattatttctatatttattttgttgatatgtaacaatttctttctgtttcttgctaataccagtataatgttgcccttattaggcaaaatgttttatacccgatggatttcaagcgatggcaatcatgttgcaacttggaaaacagtgggtgacttgaaaatcgaaagtaggtgttacgttggtggagaagttgtttgattaatgttttgttagttgatgatcacgaactggttcgcattggcgtgaaaggcatacttgatgatgtacggggaattaaagttataggtgaggccggtagcggagaagatgctataaaatggtgcagatccaatagcacagatgttgttatgatggatatgggaatgcccggcataggaggccttgaagctgcgaaaaaaataattcgctattcacctgatacccggatcattatgttgaccatccataccgaaagctctctgcccacaaaagttatgcaggccggtgtcaggggttatttaagtaaagctgccacacctcaggatatgatcaacgctatccggagtgtttatgccgggcaacgctacatttctcctgatatcgcccaacaaatggccctcgatcagctatctccacaaaaagagaacccattggatgatctctctgaacgagaattgcagatcatgacaatgattactcagggcaagaaagtgaatgaaatatcaacacttcttaacctgagtccgaaaaccgttaatagctatcgctatagaatgttcaacaaattaaatatcaagggtgatgtagaattaacccatatagcaatacgctgtggtttacttgatgccccaatatgataaatcatagtggatgataaaatgagtcggtgatgggtggtaaatcgtggcagagcaatttgattcaaaaacatttttaaaaacagtaaccagccaacccggtgtttataggatgtatgatgcaaccgggactgtgatttatgtcggcaaagctaaggatttaaaaaaacggctttccagctattttagggtgcaggttagcagccgaaaaacagaatctttggtgaaaaatatcgctcagattgatgtcactatcacccatacagaaacagaagctctgttgcttgaacataactacatcaagctttaccagcctcgctataacgtattgctccgggacgataaatcttatccttatattttcttaagtggtgatacccatccccgcctgactctatatcgcggagccaaacatgctaagggagaatactttggtccattcccaaactcccacgcagtacgtgacgcattagcacttctgcaaaaattatttcccattcgtcaatgtgaaaatagcgtatatcgcaatcgttccaggccttgcctgcaataccagattggtcgctgccttgctccgtgcgtcgaaggatttgtcacagatgaagagtatcagcaacaagtagaatacgttcgtttatttctgtctggtaaagatcaacaggtactgtctgaactcgttaaaagaatggaaaacgcaagcaaacagcttcactttgaagatgcagcacgctaccgcgaccagattcaggctgtacgacaagtcacagaacgacaatctgtctccggcgaagtagatgatttggatgctatcagtgttgcctttgaagcaggcatggcatgcgttcatgttctatttatccggcaaggtaaaattcttgggagccggagttactatcctaaaattccgacagataccacattagatgaagtcgtacagactttcctcgggcaattttatcttcagggtagccagaacagaacattaccaaccgcaatcttactggacttctcactaccggaaaaagcgttgctggaagactctctttctgaattatccggcagaaaagtacatatccagccccgccccagaggcgacagggctcgttacctcaaactggcacgcaccaatgctgctactgcattaacaaccaaactttcccagcaatcaacaattcatcagcgtctgacagcccttgctgaatttgcaggtatcggaaaaatccgccggatggaatgcttcgacatcagccatactatgggagaccagacagttgcatcctgtgttgtattcgacagtaatggccctttacgctcggagtatcggcgctataacataagcggaatcacagcaggagatgactatgctgcaatgaatcaggtattacgccgtcgatacagtaaagctattgattcagcgaaaatccctgacatcatctttattgatggtggtaaaggtcaattaaagcaggcaatagaagtctttcactcgttagacgttgaatgggataaagggcatcctaaacttattggcgtggccaaaggcagtgaccgcaaagctgggctggaaacgctatttttctctatagaagatgaaggaatagcccttcctcctgactcacctgctttacatgtcattcaacatatacgtgatgagtctcacaatcacgcaattacaggtcatcgccagcgtagggaaaaagcaaaaaagaccagtacactggaatctatcgaaggaatcggaccaaaacgtcggcaaatgctgttaaaatatatgggagggttacaacctttacgtaatgcaagtgttgaagagatcgcaaaagtaccgtctatctcttattcactggcagaaaaaatttataatgcgttgaaacactaagattcttgatgcaccataccgataaacttcacttggccagatagttactaagcattatgcaattaaatattccaacatggcttactctatttcgtattgccttaatcccattctttgttttggctttttacctgcctttagagcac

SEQ ID NO: 1113 - DNA, 5753 bp, Xenorhabdus sp.; identical to SEQ ID NO: 1112
  CDS (151)..(747)

SEQ ID NO: 1114 - DNA, 5753 bp, Xenorhabdus sp.; identical to SEQ ID NO: 1112
  CDS (3775)..(5607)

SEQ ID NO: 1115 - DNA, 5753 bp, Xenorhabdus sp.; identical to SEQ ID NO: 1112
  CDS (3087)..(3728)

SEQ ID NO: 1116 - DNA, 5753 bp, Xenorhabdus sp.; identical to SEQ ID NO: 1112
  CDS (962)..(1741)

SEQ ID NO: 1117 - DNA, 6949 bp, Xenorhabdus sp.; identical to SEQ ID NO: 128
  CDS (2671)..(3717)

SEQ ID NO: 1118 - DNA, 6949 bp, Xenorhabdus sp.; identical to SEQ ID NO: 128
  CDS (4089)..(6134)

SEQ ID NO: 1119 - DNA, 6949 bp, Xenorhabdus sp.; identical to SEQ ID NO: 128
  CDS (6190)..(6948)

SEQ ID NO: 1120 - DNA, 6949 bp, Xenorhabdus sp.
  CDS (5540)..(6940)
gtctcgttccatgtgctctaaagatcataattttattttgatctttgtgtgcaacttcaaggatctgagtcagagcggagttatctacgcgataagccagatcatctttgacagaattgaagatttgctgacggttcagattatggcggctcatcataatgaagaactggtgaacgtcagtcattgcacgccattcttcatccaactgcactttcagctgttcagtcatttctgcatgttcagggacttttgccggttgaacttccagagcagggttttcttctgtctggtatttttcaatcagtgcttcccatgcagccatatctgtattagcggtggtgtacactttgtgtaacgcatcaccctgacgatcaaagaactgaacgctgtgacgcagaccgtttttcgcgggttctaccagatagaaaacactgctccagtgatcgaaaaatacacgcaaatctagttcacgtggattaaggatcaagccaacatgttcgctgaacttggtattctcgtaacgaccaacctgctcatgaactgcgaagtcattacgggtaatggctttggtttcaccaacagttgccagttcttgcagcagagtaggagcatcaacgttcagacgtttcgcgtcgataccgacacgactgtgcagtaattctccttcgctgacattaagataagccgccagatcgcgtgcatatttggctttattatctgcttttgcctgttggtaacgttcataaagtgactgattcacagttgctagctccttaaaaaaatgaggtatagtttaaaaatagtacttttattatttaccattggtagctgatgagcagtttggcattacggccactctgtggagcacccaatgttgagtaatattgcttatcgaaagcgttgccgagcacgacagaagttgtgacaccttttagctggttttcgccgtggtagctgatatagaaatcattgacaccgtagccagcatattgtgggattgtttttctatattcgtctttgtcgccattaacccctctgaaatgagtacgctgagtgaatttacctacccagccaacagagaatcctgtatcagaaagagggatatctaatgtactggttacagtgtcagggcttagagcctcaatagatttacctgtttgctcatctttacctgtagtgcggttgtaagctaaatcccacgagaaccagtcagtgccataattcattgaaacatcccagccccagattttggctttagggatattgatcgattctgtaaattttccattcacagcacgagaaatatagtcttttgcttttgtgtcaaaatagctggctttaaatttcagtctatcgttgtagatcaataaatcatcgaaacgcaatccgaagccatattcctgagtttcattactttcagggcgtagattgggattaggtttccaattgtttccagggaaatgctgggagtcatcatacatttctcccatggtcggagaacggaatgcctgagaataggaagcaaatagcatcgaccagtctgtaggagtaatgctgatggcgccttttgatgaccatttgtcggcactaatatctttatacttattatttttgttatcgtttgaagccttgtaattgtcatagcgcgtaccaacgacaactgaaacaggcagatcacgaatagttatttcatcctgtacccagccagatgcgaaacggatgtctgcttttggaaatccattgagattatcacggcttggtttttgtttttgtttataaacttcagtgccataagtaaattggtgtgcagcaaaaggcattgcactcaaatgagaacggttttccagttttataccgaaagtttcttgtctgcggccttcaaagcctttttctttcgttttggtattgatggcgatatcggaataataaatatcatttctcagatccagccagttatagctcgacggattcagtttataagtcagctgcatgtcacgctgtgctgttgtgcgatcagccaagacgtttctgctatggtcattaatatcctgtggatctttcggctcatgagctttgttgtggtaataacgcaattcaccaccaattgactggatatcatcaattttccatgtgcctttcgccatcacattgccgatgttttcatcgtttcgaccttttacaccaccgccatagtgaatattgccaacatcgcgggtactgaaagtcaacaggccatcaagattctcagttttaccaaaggcagcagctccaagcccccagctgtgatctcctgttcccgcacggctgaaaacacgaaaaccgctattttgcccatcctgtaagagatctgctgcatcaactgtctgataggcaatcacaccacctaatgcaccactgccgtagagcagggcggatgggccacgaacgatttcaacctgtttaatcagcgccggatcgagaaaaacaccattaatatgcccggtatccgttccctgacgaacaccgtcaaccagcattaaaacccctttttgggagtaaccacgcaggctgatatcctgcccgttagcgcgcccgtaatcagcggcattaatcccggggattttacgcagtaaatcgttagcattacctgcaactttgctgctggctgaattcccttcaacaactgttaccatcattggtgcttcaaaactatcacgctgattgcctgtggcataaaccgttatcgtgtctttatgcttacttttttctgctgtatcttttttgtcagctgaaatggtggctgcgtgagcagaagacagcccggttaaaataataatacttaatgcagacaatttcaggtttggtggctgaatccgggacatgcaagttatctccatgatttaatggtgttttaaaacatacgagtggttttaatcccatgacatgaatatgccttctttgcaggattatgattaagtcaaaataagattttgtttaaggttgaaccacgatgtaatgccaaaaggaactgctgttgcaaaggggtaatgtggtagtacgggtagtcagttagtattttcatagccaatatgaacaataattattctaatattgagaataattatcgtttctatgatgattaacttcaagctatttttttatataaggaagaatgggtaatctaaaggctttttaacaggatatggcttccattatgcacagaagccaaaaatagatactaaagaagaggtatttaacaacgttttttagctgcttcggccagtatatgaaggaactcttctgtatcctgccagctaagacatgagtcagtaatcgattgtccataggtcagaggttctcccaacatgattttttgggagccttcaactaaaaagctttccgccataacaccagcgatggctgttgaaccagaattaagctgctggctgatatctctggcgacatccagttgccgacggtggattttctggcagttactgtggctgcaatcaatgatcagtctttccggtaagcggaattcacgcagtttctgacaggttgcagtaatatcttcagcgtagtaattaggtttttttccgccccgcatgataacgtgcccgtagggattgccactggtttggtaaattgtcatctgcccgtctttatccggtgacaggaacatatgtctggcacttgctgcacgtattgcatcaatcgcaatgtgagtattgccgtcagtaccgtttttaaatccgacaggacacgagagggcggaagccatttcccgatggatttggctttcagttgttcttgcaccaattgcgccccagctaattaaatccgcaatatactgcccggtcaccatatccagaaattctgtcgcggtaggcattcccaattcattgatattaattaataaattacgtgcaagtgagatccctttattgacctgacaggaaccgtccagcatagggtctgaaattaatcctttccagccgataacagtccgcggtttctcgaagtaggttctcatgacgatttccagactatgctgatatttttcacgcaatacttgcaggcgtgacgcataatcaagggcagcatcggtatcgtgaatagaacagggaccgataataaccagtaaacgttgatctttaccggtaagaatatcttcaattcgttttcgtgacagcgtcacattctggcgtattttttctgatatcggatactgctcagaaagggttttaggtgttatcagcttatcaatagggcgggttcgtagctcatctgttttgtacatatactttctcgaattctacttcattttgaggcgcagtctggcgtgatggaaattacaataactcagcctccgataaattcaacaaaacattaatatcaatttaagcgaaatgctggtgtatgaaattttaatgatacctgaattatgctgattctttgggtcagaacatacgccgtttcagtcccatactgtcaataatcttggctgaaatctcttcgacagaataattggtggtatttaagtaattaatcttatttttacgaaatagggcttcaacttcagcaagttcgatacggcattgtcgtaatgaagcataacggctgttttctctgcgttcctcacggatggccgccagcctctcggggtttatcgtcaggccgaataatttgtgctgaaacggtttaaggtcagctggcaattgtaggttatccatatcatcagcagtgaaagggtaatttgctgcctgaataccaaactgcatagcaaggtaaaggctggtgggggtttttccacagcgtgaaacgcccagaataatcacctgtgcctgatcgaggttacgcagtgaaatgccatcatcgtgtgccagagcataatcaatggctgcaatgcgggcatcatactgactcaggttttttttagataaaccatgtgtacggtgtaactctggttttggttccagcccgatttcctgctgcaacggtgcgacgagagtctggacaatatccagacaaaatccgtcactgctggtaatgatatttttaacctcgctggaaattatggaataaaaaaccagtggtctgatatttgtggcctgataaagattatttatttggtttctgatttcttcggctcttattttgttggtgacgaagggtaaagtataagacgtcatcgtaatcgggaattgagataatacagcatggccgaggacttctgctgtaattgctgtaccgtcggagatgaaaaagacactacgctctagtggctcattttcctgattctgcgggaatgggatctctatcattgtattttcttttattagtgggtaggtgaatatattaaaatattagctgaatcgtttttattgcaaataacaactacagatagtgttttggattatacctgtaaaaaaataatattgctgggttgatcgattcacctttccatatatagcaatacattgtgctaggctatttcctgctgtaaagagcagcactaattttccgatttgtacctccgaatgtaaaaaggatagtttcaatgtccaataatggcctcaccccatgtaatgtactttggtataaccaactaggcatgaatgatgttaatcgggtcggtggtaaaaacgcctcgcttggtgagatgatcaccaatctggccgaccttggtgtatctgttcccaatggttttgctacaacagcacaggcatttaatgattttttggaacaaagtggtgttaatcagcgtatttatcaattattggatgaaatagatgttgatgatgtcaatcaattagctaaggctggtgcacagatccgtcagtgggtgattgatacgccatttacagcacaactggaaaaagatatccgggaagcttacttgcaactgtctgaaggtgagcctgatgcctctttcgctgtccgttcctcagcaacggccgaagacatgcccgatgcctcttttgcagggcagcaggaaactttcctgaatgtacagggtattgatgcggtgatggttgccattaaacatgtcttcgcatctctctttaatgatcgtgctatttcctaccgtgtccatcagggttatgaccaccgcggcgtggcgctgtcagcaggtgtacagcggatggtgcgctctgatttggcatcatccggtgtcatgtttacgattgatactgaatccggttttgatcaggttgtgtttattacatctgcctatggtttaggtgagatggttgtgcagggcgcagtaaatcctgatgaattttatgtgcataagcctacattaaaaaataatcgcccagcaatagtccgacgtaatctgggctccaaaaaaatacgtatggtctatgcagacagcaaagaacacggtcagcaggttcggacagaagatgtttctgaagcattgcgtaattgcttttctcttgccgataatgaagtcgaagaattggcaaagcaggccctactgattgaaaaacattatggtcgtccgatggatattgaatgggcgaaagacgggcataatggtcgactgtatattgtacaggcgcgccctgaaacagtccgttccaatcagcaggtgatggaacgctatcagcttaatgagcagggcagtgtgctggtggaaggccgtgcaatcgggcacaaaatcggtattggtacagttaaggttattcacaatctcagtgaaatggatcgcattcaggtcggcgatgtgctggtgacagacatgactgatccggattgggagccaatcatgaaaaaagcaacagcgattgtgactaatcgtggagggcgtacctgtcatgctgctatcattgcccgtgaactgggtattcctgctgttgtgggctgtggtgatgcaacagaacgcctgaaagaaggcgaactggtcacggtcttctgcgcaaaaagggatacgggtttttgtttatcggaataaaactggatt

SEQ ID NO: 1121 - DNA, 4381 bp, Xenorhabdus sp.
  CDS (212)..(2374)
ccaatgtgctctaaaggccgatatatttggataacagcgtcccctcaatttatcgaaaaacaaaggattacatccttaattgacgaatttatcaaagacaatttgagttaaatttaacgcttgtgcccgaatgttatggcctgcgttgttatcaggcgggacagcctattgcataacattccatcatctcagggagacagaatagatgtcagtgaaaaaacacgccacaacattgaagcaaggaaaagcgctgttggggcaaggacagcaaattgcacaaatggcgaagcaagctaagagcctgttgacgggtgctggcgggagcactgccgccggtgccggtagcctcatcagtggcggcggctttgccggtggcgcggggcaaaaagccgggatggcagcccaaactgccatgggtaactcgacggcaggcaagctgttacaacaagccggtcaggtattgggattattgggtggtgctgaccccagcggcttgttatttaccctgacggcaggcagattgccggcacagacttttgtcgtcaccgacttcagcctgaacgaacacttctcgcacccctttgcgctggaagtggggctggcaagcaccattcccgccattagtttcccgctggtgcttgaccgcacagcaacgctgaccattctgcaaaacggtatcgaacagcgcagcatcaccggcatcgtcacccgctttgaacaaggcaatgccggcctgcaccagaccacctaccggatgagtatccgccctgacctgtggcgtacgacactacgacagaactcgcgcatcttccagcaactcaacatcgccaatatcatcaccacaatcctcaaagagcacagcatccgcgatgtcgtgttcaacctgcgccacccgcatccggagcgcgaattctgcgtacagtatcaggaaagcgatttcgatttcctgcaacgtctgacagcagaagagggcattttctacttcttcgaatgcagtaacgggcgtaacacactggtattcgccgatgactgcggttcagtgccgcccggcatacatctgccctatcagcccggtgaagtcagtacactgggtgaaccgtcagtcagtagcctgaccagcagcgcgcaagtgcgaccagcgcaggtacagttgaaggattacacctttaagaacccagcctggcccgcggaatttcagcaacagatgcgggatgagaacctgcaacagctgtattacgagcactacgactatccgggtcgcttcaaagatgaggcacatggcaaggatttcacccgctaccgactggaagctctgcgcagcgacgcggagaccgggcaaggcagcggcaatgccattgccctgcaaccgggcaaactgttcattctcgataaccatccccggttagacctgaatcagtcatggcagaccgtctccgccagccacagcggcagccagccgcaggcactggaaaccaccagctcaggctccggcacaacactgaacagccacttcaccttcatccgccagaaccagaactggcgtccggctccgaggcccaagccggtgattgatggcccacagattgccaaagtggtcggcccggcgggggaagaaatcttctgtgaccagtacgggcgcgtgcgtctgcaattcccgtgggaccggtacggcaagagcgatgaccaaagctcctgctggatacgggtcagccagccgtgggcgggtcagggctggggcatgctcgctattccacgtatcgggcaggaagtggtggtggatttcctgcacggtgaccccgaccaaccgatagtcaccggacgtacttaccatgccagcaatatcccaccgggaagcttaccgggcagcaaaacccagatggctttccgctccaaaacccacaagggacaaggctataacgaactgctgtttgaagatgccaagggcagtgagcggctggatttgcacgcacaaaaagacatgaacaccaaagtgctcaataaccgcgatacccatgtactggccaatcacagcgaaaccgtggagaaaaaccagaccatcaaggtgaatgagcacaaaaacgaaatggtgaaaatgaccagtacggaaaccatcggcttggtctacgcattgactgtcggcaccagcatgaataccaccgtcggcgccagccagactgaacaggtcggcagccataaatccattgcggtcggtaataccctgtccatcaatgccggtgatgtaattgaactgaaatgcggtgccagcgtcctgcggatggacagctcaggcaaaatcaccatacagggcagtgaattcaaatttgaggccagtggcccggtacaaatcaccggtaaagacatcgacctgaactaacaaggacagactgagatggaatttcgtaacctcaccccctttgcggtgatgaactactcaatgttggatgtcgacgataccgagcatcacgtggcggtgatgaaaatcggctaccagctgatgcctgccggacagggggaatacgtcgccgaactgttgcctgcgccgccgttgtgcttacaggatgaatatcgcgggcaaatgaatgcttcgcaagtattgcaggaaagcgaccttgcaccgtttaaaccgcgttgcgatgtgattgttaatggcacagcttacgcaccggattaccgcccctgtaccgaatttcccgtacgattgcaggtcaaaaccccacagggtcattccctgctcgacaaaaccctgaccatcaccggtgaacgggagtttatccgtgatgccagcggccactggcaactgacagagcccaaaccttttaccacgctgccgttggattatcgctacgctttcgggggcgagtgcaaaattcaggcagatgataaagcaagcaaactgctcaacgaacgtgaccggcttacagtagaacagcgccaacaacatccggacggagaaaatgccccgatggctcatgcggtttgtgaaaccaatccgctgggcacgggatttatcaccccgtggtacgccagtgccaaaaagctcatccgctatccggctccacgcatcatccggtcagatgccccttttactgtcgagcattttaccgcgcaactggctggagcgttgccacccgatacgcccgcctgccaaccacaaggcatgggctttatcggtcgcccatggctgccccgccgccagctagccggtacttacgatgccgactggttagagcatcgccatccttatctgccaaaggattttgacttcggttactggaacggtgcgcccgctgaccagcagattgactggccggacacggatattgccatcacactaagtggcctgacgccccacagtgacctgcatgtcaacctgccgggacatcgtccgttcattttgttgcgcatgcaaaacgggattctgttacctgtgccgatgcgcctcgatacgctcattatcgacagcgaggccagaacgctgcatctgacctgccgcctgaacttcaaagcctctttgcccatccgggtcgccgaagcccggtttgaaatcaacccggatgcccctttgctcaaactggcaccacaggacgaggagaaaacgaatggctgataattacatcgcccgtactgccggcacatggatgattattggcatgctgccggacgtgtgcaaaaccccgataggacctgccactccccccattccctatccggtggtggcgaaactggcggacagttcggcaccggaaaacaccgtgcgggctaatggtatgccggtagtggtgtttgcccgcagttttgtgcctacgacactcggtgatcagccgggagtggcaaatggcgtcaaaagtggcaccgtcgggggcaaatgccacccactagagcacacccgcacagtaagagcgggtaataaattggtactgcgccacggggataaattttggatgaatggggcataaggaaatttgctatggcagaaaataaagaagtcataattacgataaacggcgggcgcgatgaggcggtattttgcagagaataccatgttcgctcactggctgatttagaaaaaactaaaaaaaatcttcccgctttagtcgaggcagaatacgctgataatccccgagtgactccggctgataaaaaggtcatgttagactatgacaaaaaactggctgataaggttgaggaaaaattcaaaaacggcgaatacccactgaaagaatgggaacaaaaagaagaaaaacaagaagaagactctcatcccaaacccaatattgctttacctcaaaaaccacgagatgacagcccgacaggtgaaggcaacacgttgggcagtattgtcggacaggcaggtgtctcacaaaatgctccccatgaagct

SEQ ID NO: 1122 - DNA, 4381 bp, Xenorhabdus sp.; identical to SEQ ID NO: 1121
  CDS (2420)..(3607)

SEQ ID NO: 1123 - DNA, 4381 bp, Xenorhabdus sp.; identical to SEQ ID NO: 1121
  CDS (3753)..(3956)

SEQ ID NO: 1124 - DNA, 4381 bp, Xenorhabdus sp.; identical to SEQ ID NO: 1121
  CDS (4124)..(4381)

SEQ ID NO: 1125 - DNA, 4381 bp, Xenorhabdus sp.
  CDS (3490)..(3594)
agcttcatggggagcattttgtgagacacctgcctgtccgacaatactgcccaacgtgttgccttcacctgtcgggctgtcatctcgtggtttttgaggtaaagcaatattgggtttgggatgagagtcttcttcttgtttttcttctttttgttcccattctttcagtgggtattcgccgtttttgaatttttcctcaaccttatcagccagttttttgtcatagtctaacatgacctttttatcagccggagtcactcggggattatcagcgtattctgcctcgactaaagcgggaagattttttttagttttttctaaatcagccagtgagcgaacatggtattctctgcaaaataccgcctcatcgcgcccgccgtttatcgtaattatgacttctttattttctgccatagcaaatttccttatgccccattcatccaaaatttatccccgtggcgcagtaccaatttattacccgctcttactgtgcgggtgtgctctagtgggtggcatttgcccccgacggtgccacttttgacgccatttgccactcccggctgatcaccgagtgtcgtaggcacaaaactgcgggcaaacaccactaccggcataccattagcccgcacggtgttttccggtgccgaactgtccgccagtttcgccaccaccggatagggaatggggggagtggcaggtcctatcggggttttgcacacgtccggcagcatgccaataatcatccatgtgccggcagtacgggcgatgtaattatcagccattcgttttctcctcgtcctgtggtgccagtttgagcaaaggggcatccgggttgatttcaaaccgggcttcggcgacccggatgggcaaagaggctttgaagttcaggcggcaggtcagatgcagcgttctggcctcgctgtcgataatgagcgtatcgaggcgcatcggcacaggtaacagaatcccgttttgcatgcgcaacaaaatgaacggacgatgtcccggcaggttgacatgcaggtcactgtggggcgtcaggccacttagtgtgatggcaatatccgtgtccggccagtcaatctgctggtcagcgggcgcaccgttccagtaaccgaagtcaaaatcctttggcagataaggatggcgatgctctaaccagtcggcatcgtaagtaccggctagctggcggcggggcagccatgggcgaccgataaagcccatgccttgtggttggcaggcgggcgtatcgggtggcaacgctccagccagttgcgcggtaaaatgctcgacagtaaaaggggcatctgaccggatgatgcgtggagccggatagcggatgagctttttggcactggcgtaccacggggtgataaatcccgtgcccagcggattggtttcacaaaccgcatgagccatcggggcattttctccgtccggatgttgttggcgctgttctactgtaagccggtcacgttcgttgagcagtttgcttgctttatcatctgcctgaattttgcactcgcccccgaaagcgtagcgataatccaacggcagcgtggtaaaaggtttgggctctgtcagttgccagtggccgctggcatcacggataaactcccgttcaccggtgatggtcagggttttgtcgagcagggaatgaccctgtggggttttgacctgcaatcgtacgggaaattcggtacaggggcggtaatccggtgcgtaagctgtgccattaacaatcacatcgcaacgcggtttaaacggtgcaaggtcgctttcctgcaatacttgcgaagcattcatttgcccgcgatattcatcctgtaagcacaacggcggcgcaggcaacagttcggcgacgtattccccctgtccggcaggcatcagctggtagccgattttcatcaccgccacgtgatgctcggtatcgtcgacatccaacattgagtagttcatcaccgcaaagggggtgaggttacgaaattccatctcagtctgtccttgttagttcaggtcgatgtctttaccggtgatttgtaccgggccactggcctcaaatttgaattcactgccctgtatggtgattttgcctgagctgtccatccgcaggacgctggcaccgcatttcagttcaattacatcaccggcattgatggacagggtattaccgaccgcaatggatttatggctgccgacctgttcagtctggctggcgccgacggtggtattcatgctggtgccgacagtcaatgcgtagaccaagccgatggtttccgtactggtcattttcaccatttcgtttttgtgctcattcaccttgatggtctggtttttctccacggtttcgctgtgattggccagtacatgggtatcgcggttattgagcactttggtgttcatgtctttttgtgcgtgcaaatccagccgctcactgcccttggcatcttcaaacagcagttcgttatagccttgtcccttgtgggttttggagcggaaagccatctgggttttgctgcccggtaagcttcccggtgggatattgctggcatggtaagtacgtccggtgactatcggttggtcggggtcaccgtgcaggaaatccaccaccacttcctgcccgatacgtggaatagcgagcatgccccagccctgacccgcccacggctggctgacccgtatccagcaggagctttggtcatcgctcttgccgtaccggtcccacgggaattgcagacgcacgcgcccgtactggtcacagaagatttcttcccccgccgggccgaccactttggcaatctgtgggccatcaatcaccggcttgggcctcggagccggacgccagttctggttctggcggatgaaggtgaagtggctgttcagtgttgtgccggagcctgagctggtggtttccagtgcctgcggctggctgccgctgtggctggcggagacggtctgccatgactgattcaggtctaaccggggatggttatcgagaatgaacagtttgcccggttgcagggcaatggcattgccgctgccttgcccggtctccgcgtcgctgcgcagagcttccagtcggtagcgggtgaaatccttgccatgtgcctcatctttgaagcgacccggatagtcgtagtgctcgtaatacagctgttgcaggttctcatcccgcatctgttgctgaaattccgcgggccaggctgggttcttaaaggtgtaatccttcaactgtacctgcgctggtcgcacttgcgcgctgctggtcaggctactgactgacggttcacccagtgtactgacttcaccgggctgatagggcagatgtatgccgggcggcactgaaccgcagtcatcggcgaataccagtgtgttacgcccgttactgcattcgaagaagtagaaaatgccctcttctgctgtcagacgttgcaggaaatcgaaatcgctttcctgatactgtacgcagaattcgcgctccggatgcgggtggcgcaggttgaacacgacatcgcggatgctgtgctctttgaggattgtggtgatgatattggcgatgttgagttgctggaagatgcgcgagttctgtcgtagtgtcgtacgccacaggtcagggcggatactcatccggtaggtggtctggtgcaggccggcattgccttgttcaaagcgggtgacgatgccggtgatgctgcgctgttcgataccgttttgcagaatggtcagcgttgctgtgcggtcaagcaccagcgggaaactaatggcgggaatggtgcttgccagccccacttccagcgcaaaggggtgcgagaagtgttcgttcaggctgaagtcggtgacgacaaaagtctgtgccggcaatctgcctgccgtcagggtaaataacaagccgctggggtcagcaccacccaataatcccaatacctgaccggcttgttgtaacagcttgcctgccgtcgagttacccatggcagtttgggctgccatcccggctttttgccccgcgccaccggcaaagccgccgccactgatgaggctaccggcaccggcggcagtgctcccgccagcacccgtcaacaggctcttagcttgcttcgccatttgtgcaatttgctgtccttgccccaacagcgcttttccttgcttcaatgttgtggcgtgttttttcactgacatctattctgtctccctgagatgatggaatgttatgcaataggctgtcccgcctgataacaacgcaggccataacattcgggcacaagcgttaaatttaactcaaattgtctttgataaattcgtcaattaaggatgtaatcctttgtttttcgataaattgaggggacgctgttatccaaatatatcggcctttagagcacattgg

SEQ ID NO: 1126 - DNA, 5924 bp, Xenorhabdus sp.; identical to SEQ ID NO: 51
  CDS (1976)..(2716)

SEQ ID NO: 1127 - DNA, 5924 bp, Xenorhabdus sp.; identical to SEQ ID NO: 51
  CDS (2861)..(3529)

SEQ ID NO: 1128 - DNA, 5924 bp, Xenorhabdus sp.; identical to SEQ ID NO: 51
  CDS (5234)..(5908)

SEQ ID NO: 1129 - DNA, 5924 bp, Xenorhabdus sp.
  CDS (4381)..(5871)
gtgctctcaagagatatcaagcagtagttttagattttgccttatctcccggagtatccttgatggaaacaattcgttctgcttcctgtttcttcttattttctttttccacttgttcagactgaccgataaataatccgccacgtcggattgacatactcccacaacggctgataccccgtaattccccatgctcaaggatatcgagtgtttcagcacagcaagtcccttctacgtgaccatcaataataatttcaggtgcaatcaactcaccttccactttaccggcgtgcataacacgaatagccccgccttttacgcgaatattcccgataatttttccccaaatctggatatccccttccatctcgatatcccctttgaatacggaattcttcgcgacaatcgtattagcgcgggcttcagtgccagagatttttttctcttcagtctgtacaggaggagtgatttgtgtgaccgggctagcagcagatgcctcagttttttttccaaacatagctttcattctctgtttcatattagtaaagtaaaatcccagggctaaaaacgataaaattgctgttatggtacaaccaatattgttgccatatacgtacaatcccagtgtaatagcccaagcgagccataaactgtataaaaaagcgttatctgaaaaacgatacttttccatatgtttctcgttcttgtaatcttttatctttcatcagcaaatatatctatgtctctatgccttagtggatatagaagaaaggcgatgaaaatacatcctagcattgtaccagtataaaaaacaatctacgaagctataacagaggtatttatgccgttattacatggataacgttaccaacaaagcttaatggtctgaattatcgatagtttgtctttaaaatccaacacaggaaactcattttaatagaaatattttggtatcttaaatataagaaccatataaaccaataaatatgcaacatcactaaaccaattcttaacaaaataacatcatatgcaatacagtttatttatatttcattacaggatatgtaattttaattagagaattgtaccttaactaacctacctgaatacttatctaaccgtgaaattatcgatttaaatttacccaatataaacatattggactttaactaattgaatagatgaaagttctatcatttcttctgttctgctaccctgttaataaataaatttaaatctaaatttttaacatttaaaactaacataaatattaatttagagatataatactgaagttatataatggatgttacgtatacaattttgatatcagccaatatttttaactctctactcaatttatcactatctatccagtagatttcagattgctttccaatccccaagtaaactatttgaacaacagaacatatcatcaatacatttcaaattactcatgataaggaagattaggagtattaaatgaaaaggacgacgggcttaaatcagaagagtattttttctctacaattaaccatacctaacttcgatattctcgaacatcaacaaggagggctatatattttacttgatggtgaaatggtatggaaagacagcaacaatacctatcatattaagtcaaatgatatcctttttatccaccctggaaaatatgccgctaaaacccatacaagaagttgtcagatattatggttgccattggatatggaattcttccgccattttatgaaacgttttggaacattattaattaatattgaacgctgtgaatcccctcattatcggttaattcctttcaataagtttccattattaacagaaagtatacgtagtttagagaaactactcacgtatgattacccatcagccctgatccagttaagaagcgaggagttacttttgctgctctctctcgggaaacaaggagcattactcatgtcagttctgcgtaaattgagtaatcggcaagtagaacggctacagacatttatggaaactcactatctcaaagagtggcggctgaatgattttgcccgcgagtttggtatggggttaacttcgttcaaagaacttttcagtaatgtttatggcacatctccacgagcgtggatcagtgaacagcgtattctttatgctcatcaattattattaaacagtgaaatgagtatcgctgatattacactggaatccggtttttccagccagtcctactttacccaaagttatcggaaacgttttggttataccccgaatcgggccagatatggtaaagattaactattaatattgagattatataaattaaggctttccagtttcatgtaagcttgttttatttaaaactgaaaagccatagtaaggatcaatataatccctaatttttttgaacactatctgcgctataaaaaactgttcccagtttaattctttcccgtcctgttgccagacgatgacgattagtatcccgcagagaataaacacagccacagtactcttgctgatagaattcttcacgcttactgatctcaatcatgcgggcagaaccaccgcctttacgccagttatattcccaataggttaaccccggataacgggaagcggcacggacaccacaatcattaatttgctgcatatttttccagcgcgagatccccaacgagctcgtaataacagggaaaccatgctcatgagcatataacgcagtccgttcgaaacgcatgtcaaaacacatcgtacagcggatgccacgctcaggttcattttccatgcctttcgcacgctcgaaccagttgtcacgatcatagtcggcatcaataaaaggaatacccatttgctctgcgaagcgaatattttcctctttacgcagttcatattccttttgtggatgaatattcgggttataaaaaaatattgtgaaatctatccccgaagcgagcattgcttccatcacttcccctgagcatggggcacaacacgagtgcagtaacattttgctgtggccattagggagtggaagctgcttacgttcatagttcagtgacataatattttttacctgacttagacaataaaaaaccaggaagagaacatatccctccctgtgtttattagttgctcatcttaccttgttcttttgctttacggcaatggaaaacaagtaaagccagatctgaacatcttaagtcaatcagtacccttgcacttctggtaatacctgcccgccatcaaccacaattgtctgcccggtgatatttttcgcttcatcagaagcaaggaaacaagcggtataaccaatatcttctggtgatcccaaagcgcccattggaattactgtttcaatctgtttcagattatcctcaccaaatgccattaagccttcagtcataatcatacccggcataatggaattaattgttattccttgttttgcatattctaatgccgcactgcgcataaacccgagctggcctgccttactggcaccatagtggctatagccctgcattcctacaatctctccggtgatagatgaagtaatcacaatgcgcccatactgctgtttttccatgacattcagtgcagcctgagtcaataaaaatgtgcctttcaggttaacgctatagactaaatcccaatcttcaaccgtcatatctttaatattgtgttgtggaaaaatacccgcatttgaacaaagaatatcgagtctgccatatttttcgacaatttcattaatcacatttttacatgcagagggatcagttacatcaagggcgataaaatccactccaagttcttcagctacaggcattcctttcgttttatccgtacctgaaatgatcgtaattgcacccacccgcttaaatacctgagcaattcctttgccaataccttttgttcctccagaaataaatgcaacttttccggttaaattaaacatttttgtttccttttatatcagtatattaagtttttatattacatcactcttaatttcccaatatatttttataacactaccctatcaataacaataaatataattagcatattaaaaaacaatgaaatatcactcaaacacacaaataaagtacgtgatatttttcataaacactaagatccacttctaataaaaacactaataaccatttgatatagattgcaaattcccacctccactattacctttaataatcagtgaaaaataatgacaggcaaaaaaatcgaaaataaaaaaggatgggaatatgactcgctataattcactattgaatgaatatgacggcaatgcattatcacctattttatttctaaaaagagccatattaagtaatggtgattaccttgcggtaatagatggagagcaatgttgtcacatggcgacaatatggagaacgttgtgaaagagttgctgtggcacttcagcaaatggggattggaaaaggctgtgttgtatctgctttattgcctaatattcatgaattgctggaactgcactatgctgttcccttgtctggcggaatactgaatgccttaagtatcaggacagatgcagctacactgaattttatctttgaaaaaattaatcccacaatattaattatagataaaaactaccttgcattactggatggtgtttcctttaaaaacccggtcaaaattgttgtcattactgaaaataatactcctctaccagaatcagcgttggatttgattagctatgagtcactgatatctgagtacccttctgaaaccctgaatttttatccgattgatgaacaggaagccatcagcattaactcgacttcgggaaccagtggcacacctaagttagttgtatactcacaccgtggcgcataccttaatgcaatttcgaatatcctggactgggatatgcccaaatacccgatttatttatggacactgcccatgtttcactgcaatggaaggtgtttcccctggactattgcggcacgggcaggcactcatgtctgtatacgcaaatttgatgcacagaaagccatacaaattatgctgaagcatcaggtgacacactattgtggcgcgcctatcgtgcattattccttaggacgggaagcacaaaagctcggcatctctttcaacaacaatgtctatgggttgattgccggcgccccaccaacagagaagatgttttccctgcttgatgcagccggtatcagagctacccacgtttatggcctgacggaaacttatgggccggtcgttgtttgtgaagataaacccgattgggccacactgccaaaatcagaaacaattttaaagaagatgcgccagggaattgtttccaatttacagggggaaatcagcgttattgatgaaaataacgggctggcagtaccttttgatgggcaatccattggtgaaattgctattcggggtaatattgttgccgcttacggccctgtcgatcgagtcacattcgatatgacaagtcagtggttttttaccggggacttggctgttattgacagcgatggttatataaaaattatcgaccggaaaaaagatattattatttccgggggtgaaaatatttccagtcttgaactggagaatgcgctgtcgagttatcccggcgttctggctgtggcggttgtggcaaaacctgatgaatactggggtgaagttcctcatgcgtttattgaaattgatgataatacctcaattactgagcaggaactggatgattatctccgaactattgttgcacgctataagcgccccaaaggttatactttttcagctttaccacgtaacgcaagcggaaaaatactcaaagagacattaagaaaactcgctaataatttataaaataagagatataaaaatgcagaattttatgcatttagagcacatggtccgag

SEQ ID NO: 1130 - DNA, 4240 bp, Xenorhabdus sp.
  CDS (2)..(4240)
acacaatgctccccatgaagctaatcccagtgtgactgtagaagcagagccagaacaaactgcctgggagacgacaaaaaaaataggaaaagccattgggaatatggctgcggataaagcaaaacaaactggccaagatctttcaactttggaaggttggaaccctattgagcaacaaaaaggttttgccaaagctgccagtaatgcggccgtcgataccgcggaggggtatattaaaggcgccaaattggaaactagccacgatatagaacagcaagcaaggctgcttgaattatttggcggcgaaaaatacacaaaaaacgtcgaaataatgcgcgacgccgcaaaggaaaaccgaaaaaacacacaggaattcaatctggataacctgaaaatgtcgatggacacaccaggacaacgtcttggtgagttagggtttgaaattgtatccttgtttggtctgcctgcttctaaggcttctaaaagcgcaaaggccattgatgaaatcagcacgcttgaaaaagtgatacaagcggaaaatcgtgtcatcaaaaataaaactggcataaacaatacgactggtactcaaggtaaaacgagcaaccttgaaacacccaatacttcagaagtatctaatccttccggggctacaattcaaggcaagaagaaaacagacaattctgatacttcccccacatcgaacgcaaaaaactctgaacaagacggggttaataaccagtcaaacaataaagaaggcagttgtaccggaacctgtaaaacggaaggtgaacctgtcgatatggctaccggtgacttcctgcaagtctggccgattatcgccattcctgggctgttacccatcaccctgacccgcacctatcgttccaccgctaagtacagtggcctgtttggcccgaaatgggcggatgactggtcacgtcagttgatgctgaccactggaaaagtgaatttctccgatgctgatggcgtgatttatgattacaacacaccagaaaatcaggtactcgcccgtaatcagcatattcctcattacatattaaccggggaattaacgggtgagctacaactgaccgatcgccagtcccagcttacctaccacttcaatcatgccatcggatctatccgtaaattatccgcgatcaccgatcgtcgccaaaatgcgatccaatttatctacgataaacagtcgcaactgattgaagtcacacgtaccgatggtttccggctgattctggattatcaggatcaacaactccaaacactggattatcttgaacagaaaaaacagcagcgattggtcacttgtcactatggtccacaaggctatctgagtgaatgcgaagccttccagcataaccacctgtggcatgaatatgatgcactggggcggatgatccgctggcacgataccgaccaaactgatttaatcctgacttatgatgaacaaggacgagtactcagcacaacctcttccagtggttactggtgtgatcgcttccactatgacgataacgcccgtatcaccacgtatattgatgcagagggcggtgaaacccaatatcactacgataacaactgtctggtgatccgcgaagttgatcctctggggcgcattacccgccggcaatggcgcaacagtcaaattgtctgggaagctgatccatcaggcgctatcaccacctttgattacaatcctgacggaggattgaccgaagtaaaactgccgaccggcgacaccttttattacggttatgacgaacacgggcaactgattgaaagtatcctgccaacgggcgatcgctggcaatttcactatgatgagcagggcaacctaaccgccctgaccaatccgctgggacacaaagaagaataccagtacggcatccatggtgaattgcgtcagcgcctgttgccagatggacgtcagtggcattacgcctacgacgcgcaacagcgactggccgcagtgatgacgccggacagtcagaccaccggcctgcaactggacgaactgggccgcctgcgtcaactcactgatgcccttaaacaacagacccactaccgctatagcgatgaccatgccagcttgaatggcagcctgaccgaagtagaactaccggatggcaccacgcagcaactcacttatgacagtgaacgacgcgtggtggcggtgactgatggcgaaggccgtaccacacgctacacttatggcgcgtttgacctgcttaatcaggtgacccggcccgatggtacggtattacgatttggttatgaccgtctgacccgattgaattctgtcaccgcctccaccggtgaaacctatcgctatgagcgggatgccgccgggcaaattatccgagaaactgattttaccgggcgtaccattacttatcagtacgataagttgggccgccgtattcagtcacaatatcccgatggtcaacagctccgctggcactactcggcagccggttcactgattaaacaggaaagctggcaaccggaagatggcaaattagtgcttaaagccaccaccacttatgaatacaacaaacgatatcaattggtgaaagccactaatgcggatgctgtcgtcgagtatgagtatgacaaaaccaccggcctgccaatttgcgaacgcatcaatggtcgggaaattacccgtgagtgggatagcctgaccggacgcccggtcagcgaaagtgtggatggcaataccctgcatttcggttataacctgtcaggaagtctgaatcactttcagcttaaccagcatgcaccactgaccttccagcatgatgcactggggcgggaaaccgtgcgcgaaagtgccaacgggtttatccttgccagtcgctacaccgcaaccggcctgctggcgcatcagtcggcaggacaggcgactcaattttttcgggaaacgctggcacaaaacgacccacacttcccgccacaagcgaccgccgtcaaccgcagctggcaatatgaccgagcccataacgtccgtgtgattgacgacagccgctgggggcaaacccgctattgttataattccaatgaccaaatactgcataccctgttcgagggggttcgtccacatgaagagcaattcagttatgacgccaacggcaacctgagccaacatctcccgaccgatgcgcagggagcggtggcacaaatcaaccaacgccagcaagccgggcgcgtcgtgcaacaaggggatatccgttatcgctatgatgacaatggtcgtttgatagaaaaaaccgagcagcgtgatggcttccgaccacaagtctggcgctatcgctgggatacccaaaatcagctcacccactgtgaaaccccggatggctcgcgttggcaatataaatatgatccttttggcagacgactccaaaaactgagaattcacgatggaaaactggcagcgactaatttacagttgtggctggctggtaagccggatatcgagccaagagccgatgccatcatagggcaagattacctatggagcggcgaccagcttatagaggaaacgccgatttatgccgatggtaccctcgcagaagaacagcgcatccgttggctctacgaacccggttcattaacgccgtcagcacgttttgaaaaatgcaagctacactatattgtcagtgaccaccaaggtacgccgcgcgagatgctcaatgaggaaggccagcttatatgggcgcagcggctgagaacatgggggcaagtagatcgttttcaggtgatcgcctccaataacccagattatcatgtaaactgtaatctacggttctcaggccagtatgaggatgaggagtcggggctttactacaatcgctatcggtattactcgccggagaccgggcaatacatctcgcctgacccgataggactggcggggggcgtaaatccttacgggtatgttcacaaccctaccaattttattgatccattcgggttagcgaagtgtcctcttcctcctaaaaaaatcaacttaaccaaagacggtattcagcatgttaaagataggcatgttggcaatgttgctggttggtctcataagagcaaatggactcttaataatgctgatgttaaatcaacaataagagatgtattccgtaatccagatagaattactcgtgatggcgaccgatttatatatgaaaaagttatgaaaagagatgtcggtataactccagaacgttag

SEQ ID NO: 1131 - DNA, 5838 bp, Xenorhabdus sp.
  CDS (4920)..(5654)
gagcctgtaattatttttctatccctagccctgtatttttgatgcagatatacatatagccgtgtcttatcgcgatggatataacaatgcagcccgtttctgtaaatttaatcgcattatttaacaagttggaaataatttgctgaagcctcaccgggtcgttattaatgtagtcaggtacatccggttcaatatagcaatagaatcccagattttttttcgcaataaggggtagataatttgaaattacatgagatacgacttctttacagctgaattctttggcatcaattttcaactgattagattctattttggagaaatcaagaatatcactaataatctttaacagcagtgatgatgaattattcattgtcgataataaccgagcagcttcccgtgacaatggataggactgtagtaattcaagatttccgataatgccatataatggcgtccttaattcatgactcactgttgccaggaacattgattttgcctggttagcctgttttgcggctgaggccatttcctgtaatgatttctccatttttgcccgggtgctgatatcaatcagaacacagattgcgacttcttcattgcgatagcgtgaatgcacaaaactaatttgtagatgattattattgctggtgacaacatcgatgtagctgctgcttttgtcacaaatgatatcgataatgcgtttttgatcttcaaacgtcagcattctagtatagttatgtgcaagttcattacttaatatattagcaccatcactaatccgtaaaatactgatgccgacaggagctgaagcgacaattctatggttaaactgctcattttcttcaaggcgaagagcattattttcagcaggagagaacatttttctctcaaataaccaaacaaaaaagataatcagaatcgcagaggtgatattaagaataatactgttaataattttatgtttgaatgcattaaaaatattcactaagggttctgaatataccacactgaatgatgagggtgctaaacgccgttttaatattaaatgagaaaagttttcactatagccaaaataaggtacctgcgtattgtagccaatcgtgtcggatttattactattccttgcaggataatataattcgggcttattataattattcagtagtgtaagggtaatattcctgtcatgatcggggataaaagtatccagcctgatagattgttcgacgcctatcattgcaatcatttgtccattgctataaataggagaaagtatataaaagctaccactgtcggaacttgtattgggagctgcccaatagatattttgattttttcctttctcttggtcaaatatcaggcgtcggtaattttcataaaccattttttttagtatgtcaggatcggttattgtcccgcgaattggagaattcatcatgcacatactttgaatatcgactaaaaaaacctgattaataccctgtggcataacaatattatctttccagaagaagaacagctcatttaatgattttaagtagtgatcttgttcattactcagaaagtcacaattagaatgtatactcagcggtgtatacaaaaaatgggagttattatgtggcaggttaatagtcagttttttttcattcttctgggataaatatttttccgtcatatattggagatcatgcagagtaccagtcgtattccgaatatacgagaacattatatcgtagacagtattatagtcctgacgaatatctgatttgcccttattaaaaatattagtcagatagaaagtggttaataaggcgcctaatgcccataacataaaaccaagtacccgaaaaaggtagcgggatatctttagtgatgtatgaaatgaagatagatatctcaagaggtcgcctgataaaaatgtggtcaataataactgttaacagcatatactagtgtagcagggaatacaaagtagcatttggtactaaaaaaaatcacataaaaaagcaggtattttttatacctgctttttttaatgtatcagtggttcagaaaaagaggatgttattcctgattttctgctccattaccttcttcatcagaaggcgtgactatattaccgtcttcgtcttcatcatcatcaggttcagctacacgctgcaagccaaccactttttcatcttctgccgtgcggatcaaggtaaccccttgagtattacgaccgacggtgctgacttcagacactctggtgcgtaccaatgttcccgcatcagtaatcatcatgatttgatcggttggttcaacctgaattgccccaatcacattaccgttacgttcactgaccttgatcgagataacgccctgagttgcacgggatttggttgggtattctttctctgcggttcgttttccataaccgttttctgtcaccgtcaggatctgtccttctccgcgaggaataatcagagaaacgactttatctccttcagccagtttaataccccggactccggttgctgtacgccccattgcacggacgcctttcacgcgaaccgtaccatcttccagcgtttcttcctcttcttcaaggaagcgaactactttaccctgtgcagagaacagcatgacttcattactgccatcagtgaggtcaacaccgatcagttcatcgccttcattcagattaacggcgataataccggcgctacgcggacggctgaattcgctgagcttagtcttcttaacaacgccgctggcagttgccataaagatattcagaccttcttcatattcacgtaccggcagaatagcggtaatgcgttcgtcctgacctaatggcaacaggttgacgattggccggccacgggcaccgcgacttgcttctggcagttgatagactttgagccagtacattttgcctttgttagagaagcaaagaattgtatcgtgagtattggctaccagcagacgttcaatgaaatcttcttctttgatgcgtgctgcggatttacccttaccaccacggcgctgggcttcataatcagacagaggctggtattttacatatccctgatgggaaagtgtgacgacaacatcttcctgattgatcaggtcttcaatgttgatatctgctgagttttcagtcagttcagtacgacgtttatcgttatactgctctttgatggcaagtaactcttcccggattacttccagcagacgctcagggctttccagaatgaacatcagttcagcgataactatcagcagctcgcggtattcatcaagcagcttttcgtgctccagaccggttagtttctgcaaacgcagatccaaaatagcctgagcctgttgttcggtcagatagtacttgccgtcacgaataccaaattctggttccagccactcagggcgggctgcatcgtcaccggcctgagccagcatggctgcaacattacctaattcccatgcctgagaaatgaggtttgctttcgcttcagcaggagtaggagcacggcggatcaattcgataaccggatcgatatttgccagcgcaatagccagtgcttcaaggatatgagcacgatcacgggctttgcgtagttcaaaaattgttctgcgggtgacaacttcccgacggtggctgacaaatgcagaaagaatttctttcagattaagcagcttaggttgaccctgatgcagagcaaccatgttgataccgaatgaaacctgcaactgggtaagagagtacagattattcagaacaacttcaccgaccgcatcacgttttacttcgataacgatgcgcataccatctttatcggattcgtcacgtaacgcactaatcccttcgatccgcttatctttaaccagttcagcgattttctcaatcaggcgcgctttgtttacctgataagggatttcattgacgataatggtttcgcggccatttttctcgtcagtttcaacttctgcgcgggcacggatataaactttaccgcgaccggtacggtaggcttcctgaatgccacgacgaccattaataatggctgctgtcgggaaatcaggccccgggatatattccatcaggccttcaatactgatattttcatcatcaatatatgccagacagccatcgatcacctcagacaggttatgaggcggaatgttagttgccatgccgaccgcaatccctgatgaaccattcaccagtagattggggatacgggttggcattacatcgggaatttgctcagtgccatcatagttaggcacaaaatcgacggtctctttttccagatctgccagcaattcatgggctatttttgacatgcgtacttcggtataacgcatcgcagccgcagagtcgccgtcaactgacccaaagttcccctgaccgtcaaccagcatataacgcatggagaatggctgtgccagacgaacgatcgtgtcgtaaacagcggtgtcgccgtgtggatggtatttaccgatcacatccccaacaacgcgggcagattttttatagggtttattccaatcatttcccagtacattcatcgcaaaaagtacacggcgatgtacgggcttcagtccgtctcgaacatctggcagtgcgcgtccaacaataacggacatcgcataatccagatatgagcttttcagctcttcttcgatattgaccggggtgatttctctggcaatgtcgctcatggagccactgtccctcatactccgaattcaaaggcttagaattataccacaaattgacagttttataaaaatcagatgcgggtatttcaagattaaggtgtgtataatagtttcttatcacacatccccataatactgttacattttctgtgaatcagttttctgtgaaccagttttctgtgaagcagttcctaggagcgatattgctgatgaacgctaaaacccccgattcacacactcaatcacatgccaacgtggatcaacaggaaatcgaaaaatttgaagcagttgcttcccgatggtgggatcttgacggcgaatttaagccattacaccgtattaatccattacgcttgaactatatcctgcaacgagccgaagggctttttggtaaaaaagtactggatgtcggatgtggtggcggaatactgtcagagagtatggctcgtgaaggggcagatgtgaccggtctggacatgggttttgaaccattgcaggttgcccggctgcatgcattggagtccggtatgtcggtgacttatgtgcaggaaaccgtggaaagtcatgccgaacagcatccgcacgcctatgatgtcgttacctgtatggaaatgctggaacacgtccccgatccggggtcggctattcgcgcttgtgccaaactggttagacctggcggccatgtgtttttttccacgattaaccgcaatagaaaagcgtggctaatcgctgttatcggcgctgaatatattttgaacatggtgccaaaaggaacacatgatgcgaagaaatttatccgcccttcggagctaattggctggctggataaaacttccctgaaagatcaacatattattggtcttcattacaatccgttaacagataaatttcgtcttggacacaatgtggatgtgaattacatgcttcatacccaatccgcttaacaagatcaattaaaggattaataaaacaacaaatagatactttttttaagtttttatttttgagtttctgccgataggtttgcgaaagtaacatcaagtaactacgcaggttatcggctttttgacaaaattaatcctcaagttatccacaaaacttcccgatcttgtacacttgataaaatgc

SEQ ID NO: 1132 - DNA, 5838 bp, Xenorhabdus sp.
  CDS (3984)..(5828)
gcattttatcaagtgtacaagatcgggaagttttgtggataacttgaggattaattttgtcaaaaagccgataacctgcgtagttacttgatgttactttcgcaaacctatcggcagaaactcaaaaataaaaacttaaaaaaagtatctatttgttgttttattaatcctttaattgatcttgttaagcggattgggtatgaagcatgtaattcacatccacattgtgtccaagacgaaatttatctgttaacggattgtaatgaagaccaataatatgttgatctttcagggaagttttatccagccagccaattagctccgaagggcggataaatttcttcgcatcatgtgttccttttggcaccatgttcaaaatatattcagcgccgataacagcgattagccacgcttttctattgcggttaatcgtggaaaaaaacacatggccgccaggtctaaccagtttggcacaagcgcgaatagccgaccccggatcggggacgtgttccagcatttccatacaggtaacgacatcataggcgtgcggatgctgttcggcatgactttccacggtttcctgcacataagtcaccgacataccggactccaatgcatgcagccgggcaacctgcaatggttcaaaacccatgtccagaccggtcacatctgccccttcacgagccatactctctgacagtattccgccaccacatccgacatccagtacttttttaccaaaaagcccttcggctcgttgcaggatatagttcaagcgtaatggattaatacggtgtaatggcttaaattcgccgtcaagatcccaccatcgggaagcaactgcttcaaatttttcgatttcctgttgatccacgttggcatgtgattgagtgtgtgaatcgggggttttagcgttcatcagcaatatcgctcctaggaactgcttcacagaaaactggttcacagaaaactgattcacagaaaatgtaacagtattatggggatgtgtgataagaaactattatacacaccttaatcttgaaatacccgcatctgatttttataaaactgtcaatttgtggtataattctaagcctttgaattcggagtatgagggacagtggctccatgagcgacattgccagagaaatcaccccggtcaatatcgaagaagagctgaaaagctcatatctggattatgcgatgtccgttattgttggacgcgcactgccagatgttcgagacggactgaagcccgtacatcgccgtgtactttttgcgatgaatgtactgggaaatgattggaataaaccctataaaaaatctgcccgcgttgttggggatgtgatcggtaaataccatccacacggcgacaccgctgtttacgacacgatcgttcgtctggcacagccattctccatgcgttatatgctggttgacggtcaggggaactttgggtcagttgacggcgactctgcggctgcgatgcgttataccgaagtacgcatgtcaaaaatagcccatgaattgctggcagatctggaaaaagagaccgtcgattttgtgcctaactatgatggcactgagcaaattcccgatgtaatgccaacccgtatccccaatctactggtgaatggttcatcagggattgcggtcggcatggcaactaacattccgcctcataacctgtctgaggtgatcgatggctgtctggcatatattgatgatgaaaatatcagtattgaaggcctgatggaatatatcccggggcctgatttcccgacagcagccattattaatggtcgtcgtggcattcaggaagcctaccgtaccggtcgcggtaaagtttatatccgtgcccgcgcagaagttgaaactgacgagaaaaatggccgcgaaaccattatcgtcaatgaaatcccttatcaggtaaacaaagcgcgcctgattgagaaaatcgctgaactggttaaagataagcggatcgaagggattagtgcgttacgtgacgaatccgataaagatggtatgcgcatcgttatcgaagtaaaacgtgatgcggtcggtgaagttgttctgaataatctgtactctcttacccagttgcaggtttcattcggtatcaacatggttgctctgcatcagggtcaacctaagctgcttaatctgaaagaaattctttctgcatttgtcagccaccgtcgggaagttgtcacccgcagaacaatttttgaactacgcaaagcccgtgatcgtgctcatatccttgaagcactggctattgcgctggcaaatatcgatccggttatcgaattgatccgccgtgctcctactcctgctgaagcgaaagcaaacctcatttctcaggcatgggaattaggtaatgttgcagccatgctggctcaggccggtgacgatgcagcccgccctgagtggctggaaccagaatttggtattcgtgacggcaagtactatctgaccgaacaacaggctcaggctattttggatctgcgtttgcagaaactaaccggtctggagcacgaaaagctgcttgatgaataccgcgagctgctgatagttatcgctgaactgatgttcattctggaaagccctgagcgtctgctggaagtaatccgggaagagttacttgccatcaaagagcagtataacgataaacgtcgtactgaactgactgaaaactcagcagatatcaacattgaagacctgatcaatcaggaagatgttgtcgtcacactttcccatcagggatatgtaaaataccagcctctgtctgattatgaagcccagcgccgtggtggtaagggtaaatccgcagcacgcatcaaagaagaagatttcattgaacgtctgctggtagccaatactcacgatacaattctttgcttctctaacaaaggcaaaatgtactggctcaaagtctatcaactgccagaagcaagtcgcggtgcccgtggccggccaatcgtcaacctgttgccattaggtcaggacgaacgcattaccgctattctgccggtacgtgaatatgaagaaggtctgaatatctttatggcaactgccagcggcgttgttaagaagactaagctcagcgaattcagccgtccgcgtagcgccggtattatcgccgttaatctgaatgaaggcgatgaactgatcggtgttgacctcactgatggcagtaatgaagtcatgctgttctctgcacagggtaaagtagttcgcttccttgaagaagaggaagaaacgctggaagatggtacggttcgcgtgaaaggcgtccgtgcaatggggcgtacagcaaccggagtccggggtattaaactggctgaaggagataaagtcgtttctctgattattcctcgcggagaaggacagatcctgacggtgacagaaaacggttatggaaaacgaaccgcagagaaagaatacccaaccaaatcccgtgcaactcagggcgttatctcgatcaaggtcagtgaacgtaacggtaatgtgattggggcaattcaggttgaaccaaccgatcaaatcatgatgattactgatgcgggaacattggtacgcaccagagtgtctgaagtcagcaccgtcggtcgtaatactcaaggggttaccttgatccgcacggcagaagatgaaaaagtggttggcttgcagcgtgtagctgaacctgatgatgatgaagacgaagacggtaatatagtcacgccttctgatgaagaaggtaatggagcagaaaatcaggaataacatcctctttttctgaaccactgatacattaaaaaaagcaggtataaaaaatacctgcttttttatgtgattttttttagtaccaaatgctactttgtattccctgctacactagtatatgctgttaacagttattattgaccacatttttatcaggcgacctcttgagatatctatcttcatttcatacatcactaaagatatcccgctacctttttcgggtacttggttttatgttatgggcattaggcgccttattaaccactttctatctgactaatatttttaataagggcaaatcagatattcgtcaggactataatactgtctacgatataatgttctcgtatattcggaatacgactggtactctgcatgatctccaatatatgacggaaaaatatttatcccagaagaatgaaaaaaaactgactattaacctgccacataataactcccattttttgtatacaccgctgagtatacattctaattgtgactttctgagtaatgaacaagatcactacttaaaatcattaaatgagctgttcttcttctggaaagataatattgttatgccacagggtattaatcaggtttttttagtcgatattcaaagtatgtgcatgatgaattctccaattcgcgggacaataaccgatcctgacatactaaaaaaaatggtttatgaaaattaccgacgcctgatatttgaccaagagaaaggaaaaaatcaaaatatctattgggcagctcccaatacaagttccgacagtggtagcttttatatactttctcctatttatagcaatggacaaatgattgcaatgataggcgtcgaacaatctatcaggctggatacttttatccccgatcatgacaggaatattacccttacactactgaataattataataagcccgaattatattatcctgcaaggaatagtaataaatccgacacgattggctacaatacgcaggtaccttattttggctatagtgaaaacttttctcatttaatattaaaacggcgtttagcaccctcatcattcagtgtggtatattcagaacccttagtgaatatttttaatgcattcaaacataaaattattaacagtattattcttaatatcacctctgcgattctgattatcttttttgtttggttatttgagagaaaaatgttctctcctgctgaaaataatgctcttcgccttgaagaaaatgagcagtttaaccatagaattgtcgcttcagctcctgtcggcatcagtattttacggattagtgatggtgctaatatattaagtaatgaacttgcacataactatactagaatgctgacgtttgaagatcaaaaacgcattatcgatatcatttgtgacaaaagcagcagctacatcgatgttgtcaccagcaataataatcatctacaaattagttttgtgcattcacgctatcgcaatgaagaagtcgcaatctgtgttctgattgatatcagcacccgggcaaaaatggagaaatcattacaggaaatggcctcagccgcaaaacaggctaaccaggcaaaatcaatgttcctggcaacagtgagtcatgaattaaggacgccattatatggcattatcggaaatcttgaattactacagtcctatccattgtcacgggaagctgctcggttattatcgacaatgaataattcatcatcactgctgttaaagattattagtgatattcttgatttctccaaaatagaatctaatcagttgaaaattgatgccaaagaattcagctgtaaagaagtcgtatctcatgtaatttcaaattatctaccccttattgcgaaaaaaaatctgggattctattgctatattgaaccggatgtacctgactacattaataacgacccggtgaggcttcagcaaattatttccaacttgttaaataatgcgattaaatttacagaaacgggctgcattgttatatccatcgcgataagacacggctatatgtatatctgcatcaaaaatacagggctagggatagaaaaataattacaggctc

SEQ ID NO: 1133 - DNA, 5838 bp, Xenorhabdus sp.; identical to SEQ ID NO: 1132
  CDS (1129)..(3771)

SEQ ID NO: 1134 - DNA, 756 bp, Xenorhabdus sp.
  CDS (2)..(754)
aacagagacgaaggtacttttgcctgatggcgcctctccacatgattacgctttaaggccttcggatattcgcaaacttgatcaggcggatttggttgtctggattggcccggatatggaaacatttttagcgaagccaatagagaaaattgcacaaaataaacaactggaattggctgatttacctaccatcaaacccttattactgaaaaatagcgaaaataaacatgattcagttgaatcgaatcagcataaacatgaaacagatcacgaacatcatcaccatggccaatataatatgcatatttggttgtcaccaaacattgcacagaaggcggctcaggcgatatatactcgtcttgtcgagcgatatcctcaacataagcaacaattagaagtaaacctacgtaaattcaatggacagcttgtacaaactgacaagaatattacagatatgctaaaacccgcgttagggaaggggtatttcgtttttcatgacgcttatggctactttgaaaaacattataagttgacaccgttgggtgtttttactgtgaaccctgaaatacaacccggtgcgcagagattacataacatacgaacacaattggttgagcaaaaagcgaagtgtatttttgctgagcctcaattcaggccagccgtcattcatgccgttgcaaaaagtactgatgtacgtattggaacacttgacccattgggaagcggcattgtattgaataaagacagttatatgaa

SEQ ID NO: 1135 - DNA, 756 bp, Xenorhabdus sp.
  CDS (440)..(565)
ttcatataactgtctttattcaatacaatgccgcttcccaatgggtcaagtgttccaatacgtacatcagtactttttgcaacggcatgaatgacggctggcctgaattgaggctcagcaaaaatacacttcgctttttgctcaaccaattgtgttcgtatgttatgtaatctctgcgcaccgggttgtatttcagggttcacagtaaaaacacccaacggtgtcaacttataatgtttttcaaagtagccataagcgtcatgaaaaacgaaataccccttccctaacgcgggttttagcatatctgtaatattcttgtcagtttgtacaagctgtccattgaatttacgtaggtttacttctaattgttgcttatgttgaggatatcgctcgacaagacgagtatatatcgcctgagccgccttctgtgcaatgtttggtgacaaccaaatatgcatattatattggccatggtgatgatgttcgtgatctgtttcatgtttatgctgattcgattcaactgaatcatgtttattttcgctatttttcagtaataagggtttgatggtaggtaaatcagccaattccagttgtttattttgtgcaattttctctattggcttcgctaaaaatgtttccatatccgggccaatccagacaaccaaatccgcctgatcaagtttgcgaatatccgaaggccttaaagcgtaatcatgtggagaggcgccatcaggcaaaagtaccttcgtctctgtt

SEQ ID NO: 1136 - DNA, 3464 bp, Xenorhabdus sp.; identical to SEQ ID NO: 52
  CDS (3259)..(3459)

SEQ ID NO: 1137 - DNA, 4448 bp, Xenorhabdus sp.
  CDS (243)..(1832)
cttataccaagttaaacacagagttatcaacagaccgatattttactaaaaattctcgagcatcacgcaaacgtttgcgttacaatctcagcggaaaaaatcgccatgtgcttttttcggtttgttttgaaatgttattgtggaaagccattttttattcgaatgacgtttttctgacctaaaaggtaactatttttctcaataacacattcttgtttgatgaaatccaagggatcacaccaatgcaacagcttcgtccaatccgtcgtgccctgctgagtgtttctgacaaagcgggtattgttgaatttgctaaggccttatctaatcgcggtgttgaactgctttcaacgggaggaaccgcccgcctgttggctgaggcaggcctgaatgtcactgaagtttccgaccatactggttttcctgaaatgatggatggccgggtgaaaacacttcatcccaaagtacatggtggcattcttggcaggcgtgggcaggatgatgcagtaatggagcaacatcagattgcacctattgatatggtagtcgttaatctttatccctttgcccagaccgtcgcaaaaccggattgctctctggaagatgctgtagagaatattgatattggtggcccgacaatggttcgctctgcggccaaaaaccataaagatgttgcgattgttgtcaacgcacaggattacaataagattattgaggaaatggacaatcatcagaattccctcactcaacccactcgtttcgatttagccatcaaagcgtttgagcataccgctgcttatgacagtatgattgccaactattttggcaaactggttccggcttatcatggcgataacaataaaccatctggaaaattcccacgcacattaaatctcaactttattaagaagcaggatatgcgctacggcgagaacagccatcaggatgctgctttctatatagaagagaaaatcacagaagcctctgtcgctacagcaacgcaattacagggcaaagcactttcctataataatatcgcagacactgatgccgctctggaatgtgtaaaaactttcgccgaacccgcctgtgtcattgtcaaacatgctaatccttgtggtgtggcgatcggagcggatattcgtaccgcttatgatcgggcattcaaaactgaccccacatccgcatttggcgggattatcgcgtttaaccgtgagctggatgctgacacggctaaaatcattattgagcgtcagtttgtcgaagttattattgctccttctattaataaagaagcattgcctattctggcaaccaaacaaaatgtccgcgttctgtcatgcggcgaatggaattcagcggctgccagtctggatttcaagcgcgttaatggtggtttattggtacaggatcgcgatttaggcatggtaacagaagcagaattgcaggttgtttccaaacgccagccaacagaacaggaaatgcaggatgccttattttgctggaaagtggctaaattcgttaaatccaatgctatcgtttatgccaaagataatatgactattggcattggtgcaggccagatgagccgggtttattcagctaaaattgcaggtattaaggccggggatgaaggtctggaagttcagggatgtgcgatggcttctgatgccttcttcccattccgcgatggcattgatgccgcagcttctgtcggcgtgacttgtgtgatccagccgggaggctctattcgtgatgatgaggtcatttccgctgctgatgaacatggtattgccatgattttcaccggaatgcgtcatttccgccactaatcctcctaacacttatacccaatggatttcgagttgcttcgcggcggcaagggaatgacaaattcgtcgggaacgaatttgcccagccaaaggctggcctcaggtgagaggcaggagcctctcagtaatccccgggagcatagataaccgtatatttataaaaacggtgactggggtgagtgagcgtagccaacaaagaggcaacttgaaagacgaagggtatataatgagagataataatgaatatactaatcatcggtagtggtggacgggaacacgcacttgcatggaaagccgcacaatctccgctggcagagcgggtttacgttgctccgggaaatgcaggaacggctctggaacctaatttgaaaaatgtggatattgccgcaacagatattgagggattactggcatttgctcaaagccaccatattgatctcacaattgtagggccagaaacacctctggttattggcgtggttgatgctttccagcaggctgggctgacaatttttggcccgactaaagccgccgcgcaattggaaggatctaaagccttcactaaagatttccttgctcgccatcatattccaacggcggcttaccagaatttcaccgaaatagatcccgcgctcgcttatctggaaaaaacaggtgctccggttgtcattaaggccgatgggctagcggcaggcaaaggtgtcgttgttgccatgacaatagaagaagcgcagaacgcagttaaggatatgctggcaggtaatgcatttggcgatgccggtcacaggattgttattgaagagtttctggatggagaggaagccagttttattgtcatggtcgatggtaaaaatgtggttcctatggcaaccagccaggatcataagcgggtaggtgatggcgataccgggccaaataccggtggaatgggggcgtattcccctgctcctgtagtcacggatgaggtccaccagcgggtcatggaaaaagtcatttatccgaccattaaaggcatggctgctgaaggaaatacttatgtcggttttctgtatgccggtttgatgattgataaacagggtgaaccgaaagtcatcgaatttaactgccgctttggtgatcctgaaacacagcctattatgatgcgcctgcgttccgacttagtggaactatgtcttgccggagcaaaaggccagttagatggcaaaacctctgagtgggataaccgttctgcactgggtatcgtgttagctgcaaacggttatccggctgattattctaaaggcgatatcattagtggcctgaatcaagaacagcaagcggatgaaaaagttttccatgccggaacagctttgaaagataaagacgtagtcaccgccggtggccgtgttttgtgtgttacggcactgggagacaatatcgctgaagctcagacgaaagcctacctgagagcagaaaagattaactggaaaggctgtttttatcggaaagacattggctaccgtgctattgctcgtctgaaataacgatattcagaaaaaagccagaaataaaaagtcggcgaaagtaactggtttacagcttatctttcgtcggctcccaaagacaaaaatcgtcattggcaactaacaataactgtttaccttctggtgattccagccaggcaatggtgagtatgccataactgtttttacttctttcttcgagccatgcctgtgattgagggtcaaactcaatcgatattttatcccctgaacaggtagtcacttcaccgttttgccagtgcccctgcatcagctttaccttcccggtaataagaacatcgctggtttcttttattcggctggcctcaaacaatgacctgatgatgtcatcgttggaaagttgctcacgatgcccatcaaactcgcgttgcataaaaacaacgttgtcgtttttatctaaccgcaggatttcctctgtcggattatcattaaatacattgcggcacatctgccataaatgcccctgacggtattcgtagaaagtaacagtggtgtttttgtattggtaagggctgtaaacgctcatgataacctgaggtttactgttttgatcattcagacgccataagcggataacgccgccatcggtaatgaaaccactggcactgaaagtgggttctttcggtttgactgagcaggcgctgagcaatgagattaaccccaatgctaacagcccctgtatcatcaacaaaaggggcgttgacttcccctcttttttcttttttcgcaatacgattacttgactgcgtctttcagagctttaccagcagagaaagcaggtacgtttgcagctgcaattttgatttctttaccagtctgtgggttacgaccagtacgctctgcacgatgattaactttgaaagtaccaaagccaaccagttgtactgcatcaccgcttttcagagattcggtgattgcagccaaagttgattccagggcagctttagcctgagttttggtcagatcagcacctgctgcgattgcatcaactaattcagtcttattcatagattatccttacagtgtgtttatcgtttgcaaagcatcgagtgcgtcggatatacgactttagagc

SEQ ID NO: 1138 - DNA, 4448 bp, Xenorhabdus sp.; identical to SEQ ID NO: 1137
  CDS (2072)..(3355)

SEQ ID NO: 1139 - DNA, 4448 bp, Xenorhabdus sp.
  CDS (364)..(1044)
gctctaaagtcgtatatccgacgcactcgatgctttgcaaacgataaacacactgtaaggataatctatgaataagactgaattagttgatgcaatcgcagcaggtgctgatctgaccaaaactcaggctaaagctgccctggaatcaactttggctgcaatcaccgaatctctgaaaagcggtgatgcagtacaactggttggctttggtactttcaaagttaatcatcgtgcagagcgtactggtcgtaacccacagactggtaaagaaatcaaaattgcagctgcaaacgtacctgctttctctgctggtaaagctctgaaagacgcagtcaagtaatcgtattgcgaaaaaagaaaaaagaggggaagtcaacgccccttttgttgatgatacaggggctgttagcattggggttaatctcattgctcagcgcctgctcagtcaaaccgaaagaacccactttcagtgccagtggtttcattaccgatggcggcgttatccgcttatggcgtctgaatgatcaaaacagtaaacctcaggttatcatgagcgtttacagcccttaccaatacaaaaacaccactgttactttctacgaataccgtcaggggcatttatggcagatgtgccgcaatgtatttaatgataatccgacagaggaaatcctgcggttagataaaaacgacaacgttgtttttatgcaacgcgagtttgatgggcatcgtgagcaactttccaacgatgacatcatcaggtcattgtttgaggccagccgaataaaagaaaccagcgatgttcttattaccgggaaggtaaagctgatgcaggggcactggcaaaacggtgaagtgactacctgttcaggggataaaatatcgattgagtttgaccctcaatcacaggcatggctcgaagaaagaagtaaaaacagttatggcatactcaccattgcctggctggaatcaccagaaggtaaacagttattgttagttgccaatgacgatttttgtctttgggagccgacgaaagataagctgtaaaccagttactttcgccgactttttatttctggcttttttctgaatatcgttatttcagacgagcaatagcacggtagccaatgtctttccgataaaaacagcctttccagttaatcttttctgctctcaggtaggctttcgtctgagcttcagcgatattgtctcccagtgccgtaacacacaaaacacggccaccggcggtgactacgtctttatctttcaaagctgttccggcatggaaaactttttcatccgcttgctgttcttgattcaggccactaatgatatcgcctttagaataatcagccggataaccgtttgcagctaacacgatacccagtgcagaacggttatcccactcagaggttttgccatctaactggccttttgctccggcaagacatagttccactaagtcggaacgcaggcgcatcataataggctgtgtttcaggatcaccaaagcggcagttaaattcgatgactttcggttcaccctgtttatcaatcatcaaaccggcatacagaaaaccgacataagtatttccttcagcagccatgcctttaatggtcggataaatgactttttccatgacccgctggtggacctcatccgtgactacaggagcaggggaatacgcccccattccaccggtatttggcccggtatcgccatcacctacccgcttatgatcctggctggttgccataggaaccacatttttaccatcgaccatgacaataaaactggcttcctctccatccagaaactcttcaataacaatcctgtgaccggcatcgccaaatgcattacctgccagcatatccttaactgcgttctgcgcttcttctattgtcatggcaacaacgacacctttgcctgccgctagcccatcggccttaatgacaaccggagcacctgttttttccagataagcgagcgcgggatctatttcggtgaaattctggtaagccgccgttggaatatgatggcgagcaaggaaatctttagtgaaggctttagatccttccaattgcgcggcggctttagtcgggccaaaaattgtcagcccagcctgctggaaagcatcaaccacgccaataaccagaggtgtttctggccctacaattgtgagatcaatatggtggctttgagcaaatgccagtaatccctcaatatctgttgcggcaatatccacatttttcaaattaggttccagagccgttcctgcatttcccggagcaacgtaaacccgctctgccagcggagattgtgcggctttccatgcaagtgcgtgttcccgtccaccactaccgatgattagtatattcattattatctctcattatatacccttcgtctttcaagttgcctctttgttggctacgctcactcaccccagtcaccgtttttataaatatacggttatctatgctcccggggattactgagaggctcctgcctctcacctgaggccagcctttggctgggcaaattcgttcccgacgaatttgtcattcccttgccgccgcgaagcaactcgaaatccattgggtataagtgttaggaggattagtggcggaaatgacgcattccggtgaaaatcatggcaataccatgttcatcagcagcggaaatgacctcatcatcacgaatagagcctcccggctggatcacacaagtcacgccgacagaagctgcggcatcaatgccatcgcggaatgggaagaaggcatcagaagccatcgcacatccctgaacttccagaccttcatccccggccttaatacctgcaattttagctgaataaacccggctcatctggcctgcaccaatgccaatagtcatattatctttggcataaacgatagcattggatttaacgaatttagccactttccagcaaaataaggcatcctgcatttcctgttctgttggctggcgtttggaaacaacctgcaattctgcttctgttaccatgcctaaatcgcgatcctgtaccaataaaccaccattaacgcgcttgaaatccagactggcagccgctgaattccattcgccgcatgacagaacgcggacattttgtttggttgccagaataggcaatgcttctttattaatagaaggagcaataataacttcgacaaactgacgctcaataatgattttagccgtgtcagcatccagctcacggttaaacgcgataatcccgccaaatgcggatgtggggtcagttttgaatgcccgatcataagcggtacgaatatccgctccgatcgccacaccacaaggattagcatgtttgacaatgacacaggcgggttcggcgaaagtttttacacattccagagcggcatcagtgtctgcgatattattataggaaagtgctttgccctgtaattgcgttgctgtagcgacagaggcttctgtgattttctcttctatatagaaagcagcatcctgatggctgttctcgccgtagcgcatatcctgcttcttaataaagttgagatttaatgtgcgtgggaattttccagatggtttattgttatcgccatgataagccggaaccagtttgccaaaatagttggcaatcatactgtcataagcagcggtatgctcaaacgctttgatggctaaatcgaaacgagtgggttgagtgagggaattctgatgattgtccatttcctcaataatcttattgtaatcctgtgcgttgacaacaatcgcaacatctttatggtttttggccgcagagcgaaccattgtcgggccaccaatatcaatattctctacagcatcttccagagagcaatccggttttgcgacggtctgggcaaagggataaagattaacgactaccatatcaataggtgcaatctgatgttgctccattactgcatcatcctgcccacgcctgccaagaatgccaccatgtactttgggatgaagtgttttcacccggccatccatcatttcaggaaaaccagtatggtcggaaacttcagtgacattcaggcctgcctcagccaacaggcgggcggttcctcccgttgaaagcagttcaacaccgcgattagataaggccttagcaaattcaacaatacccgctttgtcagaaacactcagcagggcacgacggattggacgaagctgttgcattggtgtgatcccttggatttcatcaaacaagaatgtgttattgagaaaaatagttaccttttaggtcagaaaaacgtcattcgaataaaaaatggctttccacaataacatttcaaaacaaaccgaaaaaagcacatggcgattttttccgctgagattgtaacgcaaacgtttgcgtgatgctcgagaatttttagtaaaatatcggtctgttgataactctgtgtttaacttggtataag

SEQ ID NO: 1140 - DNA, 4448 bp, Xenorhabdus sp.; identical to SEQ ID NO: 1139
  CDS (68)..(340)

SEQ ID NO: 1141 - DNA, 4382 bp, Xenorhabdus sp.; identical to SEQ ID NO: 179
  CDS (4131)..(4352)

SEQ ID NO: 1142 - DNA, 4382 bp, Xenorhabdus sp.; identical to SEQ ID NO: 179
  CDS (840)..(1280)

SEQ ID NO: 1143 - DNA, 4382 bp, Xenorhabdus sp.; identical to SEQ ID NO: 179
  CDS (1331)..(1882)

SEQ ID NO: 1144 - DNA, 4382 bp, Xenorhabdus sp.; identical to SEQ ID NO: 179
  CDS (1968)..(2243)

SEQ ID NO: 1145 - DNA, 4382 bp, Xenorhabdus sp.; identical to SEQ ID NO: 180
  CDS (4206)..(4382)

SEQ ID NO: 1146 - DNA, 4382 bp, Xenorhabdus sp.; identical to SEQ ID NO: 180
  CDS (3781)..(3969)

SEQ ID NO: 1147 - DNA, 6071 bp, Xenorhabdus sp.; identical to SEQ ID NO: 320
  CDS (4959)..(6071)

SEQ ID NO: 1148 - DNA, 4820 bp, Xenorhabdus sp.; identical to SEQ ID NO: 53
  CDS (4686)..(4820)

SEQ ID NO: 1149 - DNA, 4820 bp, Xenorhabdus sp.; identical to SEQ ID NO: 373
  CDS (1590)..(2360)

SEQ ID NO: 1150 - DNA, 4820 bp, Xenorhabdus sp.; identical to SEQ ID NO: 373
  CDS (360)..(1589)

SEQ ID NO: 1151 - DNA, 6735 bp, Xenorhabdus sp.; identical to SEQ ID NO: 54
  CDS (17)..(199)

SEQ ID NO: 1152 - DNA, 6735 bp, Xenorhabdus sp.; identical to SEQ ID NO: 54
  CDS (3107)..(4645)

SEQ ID NO: 1153 - DNA, 6735 bp, Xenorhabdus sp.
  CDS (5829)..(6392)
tgtccaaaggtattgctgagggtggttgctttcatgacggtttctacggttatcattgacagaaaacggattgtaaatcacaaacgatcatcaatgttcctacctttatgtactgaaggcacatcactgaactaactgttcaatttagacccgtttgccctagccaaccggggctgatagtagcatgcagggtattgaatatggtataaaccccgttattttctcataacccgcatgccagaaaatgcttcattataaaaatgtgtagttttggcacgtaatttaaggtaacactgtgaatatacaggctattctttcagaaaaaatcagtagtgcgctgattgcagctggtgctccagccgatagtgaggctcacgttcgtcaatctgcaaaagctcaatttggtgactatcaggcaaatggtgtcatggcggcagcgaaaaaagttggtatgccaccacgacaactggcagaaaaagttgtcaatttgctggatctgcaaggaattgccagcaaaatcgaaatcgcaggtccggggtttatcaatatcttccttgataaagaatgggttgccacaaatgtagaaaacgcgctgtcagcagaaaaactgggggtatctcctgtagaaccacaaactatcgttatcgattattctgctcctaatgtcgctaaacaaatgcatatcggtcatattcgctcaaccatcatcggtgatgctgcagcgcgtacccttgaattcctcggccataaagttattcgtgctaaccaccttggcgactggggcactcagttcggcatgcttatcgcctatctggaaaaagtacaaaatgaaaatgccagtgatatggcattagaagatttggaagaattctatcgcgccgccaagaaaaattatgacgaagacgaagaatttgccattcgcgcccgcggctatgttgtaaaactacaaggcggtgatgaatattgccgcaatatgtggcgtaaattggttgaaataaccatgtcacagaatcaggcaacttatgaccgcctgaacgtcacgctgaccgaaaaagacgtgatgggtgaaagcctttataacgatatgctgccggggatcgttgctgacctgaaacaacgtggcatagctgttgaaagcgatggcgcaactgtggtttaccttgacgaattcaaaaataaagaaggcgaaccgatgggcgtgatcatccagaaaaaagatggcggctacctctatacaacgacagatatcgcctgtgccaaataccgtcatgaagtcctgaatgcagaccgtgtgctttattacatcgattcacgtcagcaccaacatttaatgcaggcttggacaattgtacgcaaagccggctacatccctgaatccatgtcactggaacatcacatgttcggcatgatgctgggcaaagatggcaaaccattcaaaacccgggcaggcggtacagtgaaattatccgacctgctggatgaagctattgaacgtgcagatgcacttatccgtgagaaaaacccggatatgccggaagatgagcttaaaaaagttatcgaggcagttggtattggtgcagtaaaatacgcagatctctccaagagccgcacaacagactatgtatttgactgggataatatgctggcctttgatggcaatactgctccttatatgcagtatgcatatacccgtgtctcctctattttcaaacgcgctgaaatcgatgaaagcagcctgacactgcctgttgtactgaatgaagaacgcgagcaaacgctggctacccgtcttctgcaatttgaagaaacaatcacaacagtagctcgtgaaggaacaccacatgtgatgtgtgcttacctgtatgatctggctggcctgttctccggtttctacgaacactgcccaatcctgaatgcggaaaatgcagagttgcgtcagagccgcctgaaactggcattgctgacggcaaaaaccctgaagcagggtctggatactctggggattcagactgtagagcggatgtgatcgaactataaaaatatcccgccgtttgcggcgggatatttaaacacactaatagattaaataatcactgtaatccccgatgtgcgaaatcctttaaccggaatcccaataaagctaatgcagcaaaataactgcctgccccggcaactacaacagccatcagtcttaacaaacgcattgccatattaccctgctcccagttcggcataaaccatagcattaccagcaaaacgccaaccataactgcaatggccaccagcaatttaagcaagaatactccccatcctgctaatggtttaaatatctcacgtttacgcaattgccagtacagcatcactgcattgaaacaagcagctaaaccaatggaaagcgctaatcctgcatgtttcagaggaccgataaaagcaaggttcattaactgagttaaaatcagggttgcaatcgcaatcttgaccggtgttttaatatcctgacgggaataaaaaccgggagccagaactttaacaacgatcaaccccattaagccgaaacagtaggcgatcaatgcccgttgtgtcatggctgcatcaaaagcagaaaaattaccatactgaaacagtgatactgttaatggttcagccaaaatccccaatgccactgcacaaggcaatgccagtaaaaagcaaagacgtagcccccaatccatcaatttccggtattcatcatgattaccactggaaaaacttttcgccaatgaaggcaataaaatcgttcctaatgcgacccctaagacaccagaaggtaattccattaatcgatctgcgtaatacatccatgaaacagagccggaaaccaaaaatgaagcaaaaatcgtattgataatcaaagaaatctggctgactgatacccccaaaatagccggtcccatctggcggataacacgccatacaccactatcacgaaaagaaacccgaggcagcactaacatacctatttttttcagatgagggagttggtaagccagttgcaaaataccaccagcaaccacagcccatcctagcgccatcacgggaggattacagtaaggtgccacgaacaacgcaaaaaagatcatactgacattaagcaaagttggtgcaaaagcaggtactgaaaaacggttccatgtattcaggattgcccccgccaaagatgccaaagagatcaagaaaatataagggaatgtgattctgagtaaatcacgagtcaacgtaaacttatccggtgtatcagcaaagcccggcgcggttacataaataacccacggcgcagcaattattccaattacagtaacaatcgctaagatcaacgtcagcatacccgacacataggcgataaaggttcgagttgcttcatccccctgctgatttttgtattcggcaagaatgggaacaaaagcctgtgaaaaagccccctcagcaaaaatacgacgtaatagattaggtaacttgaacgcaacaaagaaggcgtctgttgctacgcctgcaccaaatatacgggcaataatagcatcacggatgaaacccagaacgcgggaaaacatcgtcattgaactgacggctgccagtgattttagtaagttcatgatattgtttaataagtatatttctatgaaatgagcgtgaaagcgtaaagcaacgtcatcagatatgctatggaaccgaatatgatccgatgagatagcactgataggcaaagtttaacagacaaaaaccctgcctacattggctatctcctttttattaattatttttaaccctgtatgctctttcccgttcaccaatcattgttggttaatgccgtcagaacatgatcctgccagacaccatctatcattaagtatttttttgcatacccttcctgctcaaaattcagttttttaagcaaatttccacttcgttggttatgcggcatatagttagccataatccggtgcattttctggtgattttgcatataacaaagagccggctgcaatgcttcatacataaacccctgcccttgcaatttttccgccagcgaataacccagatagcaggagtgaaatgcacctcgtacaacattggtaaaatttgccacacctaaaatttcgttctcattaggatccaacaacacaaaattaaatgtcgcattttgccgttgtaattcggcaacataactcagcttattcgtccagcccgaaggttggtaaaaactccgatctcttatcggctcccacggtttaagaaaatctttattttctgaataataatcagccaaacgataagcatcacgctcatataccagacggacgatcatcctgtccgtaataaaacgaactttaggcgatgtagaccgataaccaaacatgccttctcccgatatttattttaaaaagatactcaataatttatagctaatagaagtcaatatcattattttacgataaaaaaatatcatatataaatcctctatcttaaaaataggattgcgtacagaataatagaaatttcatttttattttctcatatattgatggtgcgaaatgtcattggtttcacaggcgcgcagtttaggtaaatattttttattacttgataacctattagtcgttttaggatttttcgttgtttttccattaatttcgatccgtttcgtcgagcaaatgggttgggcggccgtcattgtcgggttcgctctgggaactcgccagtttgttcagcaagggctgggcatttttggtggtgccattgctgataaatttggtgccaagccgatgattgtctgtggaatgttactgcgtgcattaggcttcgctttgatggcaatagcttctgaaccgtgggtattaatcttttcctgtattttatctggtttgggcggaacattgttcgatccaccacgggctgcgctggtcattaaactaacccgcccacatgaacgcggtcgtttctattcactgttattgatgcaagacagcgcaggcgctgtgattggtgcactgataggaagctggttattacaatacaatttcaatatggtgtgctggataggtgccgggattttcgttctggctgctattgcaaatgcctggttgttacctgcatatcgtatctcaacaatccgcacccccatcaaagaaggtatgacgcgggttattaaagatcgccgcttcttttattatgtgctgaccctgacagggtattttattttatcagtacaagtgatgctgatgttcccgattattatccatgaaatgtccggcagccacacagccgtaaaatggatgtatgctatcgaagcggttatttccctgacattgctttaccctatcgcccggtggagtgaaaaacatttccgcatggaacagcgcctgatgataggcttatttttaatgagcctttgcatgtttcctatcggctggattaaccaattacacctgctttttgcccttattgccctgttttacttaggaactgttactgcagagcctgcccgggaaaccctcagcgctggtctggcagacccaagagcccgtggcagttatatgggattcagtcgattagggctggcgctcggtggtgtattgggctataccggtggcggctggctttacgataccggccatgcattgaatatgcctcaattgccgtgggttttattaggattaatcggcttgttcaccatttatgctcttcatcgccaatttaatcagaaaaaaatcgaaccagtaaccattagtagacattaacaatatgaataatggtgtagaatctgcccagcaaaaataaatataggagccggcatgaaaaaatttttattaggggcagcattagtgctgattggtttactcagtggttgcggccagtttaaagatctcagcatcagtgaaagtttgctcaatgattatttattaaagaaagtacattatcagaaagagattgggattgctggcatagcaaatttcaacgtttctctgggaaatttaagtagtcagataggccgtcaggatccggaaaaaatcatcctgaccagcaagggaaaagttgaaatttcaacattatttggttcaacacaggcagatatgacattggctatcagggccaagcctgtatttgatgcggaaaaaggggctatttttgttaaagggctggaaattatcgattatcaaactacccctgaaaaagtagccgggccgatcaaggcattgattccttatctgaatacctcgttaactgagttttttgatactcatccggtttatgttctgaatccggaaaaaagcaagtccgaagcagcagcggcaaaattcgctaagggactggaaattaagcctggaaaactggttattgggttaactgataaataatttttattgtcattgaaataataagggcaaattattcataaataatttgcccttattttatcgataattaacgcaattagcctcagctaagtgacaatgtcactcagcttccagctcctcacgtagtgcctgtaatgcctcacgggtaatcatagccagagtccgataaaaaccactgacagcatgagcttcaacttttccaaggaactgcccacaccacggcaataaatattcatcgaataatgttatctgagcctgaacttcatcttctgccgcctgatcttccaaccatgacgcagccagtaataaagagccaaactgatcggctgctctttagagcaca

SEQ ID NO: 1154 - DNA, 6735 bp, Xenorhabdus sp.; identical to SEQ ID NO: 1153
  CDS (4566)..(5774)

SEQ ID NO: 1155 - DNA, 6735 bp, Xenorhabdus sp.; identical to SEQ ID NO: 1153
  CDS (296)..(2026)

SEQ ID NO: 1156 - DNA, 5184 bp, Xenorhabdus sp.
  CDS (3115)..(4143)
ttagggactgttccagcccatgcaaaactggtcatcatcgcagagcttgccaataggctgatactcgcgcctttcacgactgtctgaagggcaaacttcactttagttaggctcttcaagcaataattttgccgttaacaataaagcaaataagaatacttatcaatgcgattgattcggtatatccgaaatttaatgacgataattttgctttaattccatgaaaaataaaaactgccgattccatcacagaacaggcagttgtttgcaaaataaaaataataatgtcttaattaataaatatcattttatcaaattattattaacattttattcatggtatgtatgctttatcgccggaaagtccatctcattgtatttgacgaaacgtgttttatttttcagtttatagccaaaccaaatgagcaagaataacggaataccaatataagtcgccgtaacaccgtaccagtctatcgtatcctgcaaaaatgcctgatagttctggcctaaggtgatcaatagacacaaaacaaaggcaaaaataggcccgacagggaaaaagccggagacatagggcagttcgttgatattacgcccctgagcgacataccctttacggaaacgataatggcttattgcaataccaagccatgcaataaatccagtcatgcccgaggtattcaacagccacagatacactgtctggttaccgaacatggagcttagaaagcataatccggcaaccacagttgtggcataaagtgcattacgaggaacaccgccttttgacaaatgtccaaaaatcttaggcgccttaccttcccgtgccaatgtaaataacatgcgggtagaagcatacatgcctgagtttccggcagaaagcactgcggttaagatcacggcgttcattaccgctgcggctgacaacagacctgcgttttcaaaaaccagcgtgaaagggctgacactgatgtcttttacgccatttcttaacaaacttgggtcagtataaggaataatcaggctaatgattaaaatggcgaatacatagaataataagatacgccagaatactttacgcacagcacggggaatgtttttggcaggatcttttgattctccggcggtaatcccaatcagttcagtcccctgaaatgagaaaccgacaatcatggcaaccccaatcatggccgcaaacccaccagcaaatggtgcctcacctatagtccagttatgccaccctgctccttctgcacctttcataataccgacgatcattaaaatcccaacgataatgaaaacaatcaccgtagagactttaatcaaagagaaccaatattctgcctcgccaaagctttttactgagatgaaattcagcaggaaaatcaggctgaggaacaaggcactccatatccatcccggtgcatccggaaaccagtaccccataaccaactgggcagcgacaaggtcaaccgcgatcgtaacagcccagttataccagtagttccagcccaatgcgaaaccgaagccttcatcaacatactttgagccataagtggaaaatgaccctgaaaccggcatgtaagcagccaattcacccagactggtcatcaggaaatagaccatcaggccgatcagcgcatatgaaagcagggctccaccggggccagcctgtgaaattgttgctccggaagcaacaaatagccccgtaccaattgaaccgccaatggctatcatcgccatatgtcgtgcttttagctcacgacgcagatttttgggcgcctgctcctgtggcacgctttgttcttgagacattatattcctatatcatcgagaataatttctaatgcggaattgtaacaaatcctcgtccccagaatagcggcgattggcggttataagataccttcatgatcagcccttaattataagctacacgattataggtacattaattctttaatttcatggtattggctcagcattactgacagtagcttaataacttttgtaacgcattggatatatgtttctgccggtgataaataagataaagcgtacgataaagatttaggcccggtatcaccagttcaaccagtgtgccgtttttcagttgttcccggacaacccggcgtgacagacaactgatccccataccatactgaactgcatgcttaattgcttccgagttccccagctccatggcaatattgaatctgggcatttgtgaaaaaagtaactgatcaagcacttcccgtgttcctgagcctttttccctcaatatccagggcgctttaattaaatcttccaaagtcagattggaacgcacaagcggactctctggtgaggaaaaaacaatcagctcatctttcatccatggctgggtaattaaatccgggttatgacacaacccttcaataaatgccaaatcgacccggaattcggcaaccgatttaatgacatcttcagtattgctgatatgtaattccagtggcgtatctggatactccttacgatatttcgccagcatttcaggcaacatataattaccaatcgtgctactggctgccagtcgcagtgctcccatttccaatttaaaaagctgttccacctctccagtctgctcaagcagcgccagagcttttgggtaaagtaagcgaccatgttcattggtaaccagtcgttttccaaccctgtcaaaaagctgtactcccaattgaccttcaagatctgtcagtgaagcgctcaccgcagattgtgataaagctaattgttgagaagcctgtgtcgttgaaccacttttcagaacttctgcaaaaatctccagctgtctcagagtgatacgcatatggcctcgcgggaaacataaaagtaaattgaaatgataagataaccttgattctagacactattacgcaacttaacaaaagtcatgttctatttatcttttttaataattaatcatataaatataatcaatttttacgattaaacaatttgctatatgcttattcataaaacatataagtgatatgagcgacaactatgtctaagagtaaaacagtgcctgaaaatcaacttaataaaacgggtactattcattgtcatcccttactgcaactcttccccgggctgatactaacagcaatactgaccgccgccgccacctatttgagccagttccctctactcattaatatgggactcagtgtcctgactatctcgattctaatgggaattattgttgggaatacgctatatccttcattgaaaccaatctgtggcaatggaattaatttcactaaacactatctgttaagagccggtatcattctttatggttttcgactgacattccagcagatagctgatgttggtatagccggcatattgattgatgtcattatgctttcttccactttctttatagcgttatggctcggacgtgtttttttccaaatagatagtcagacagtcatgctaattggagcgggtagcagcatctgtggtgctgccgcaatcatggctactgagcctgtcgtgaaagcctctgccgacaaagtcgctgttgccatttctaccgtcgtgatatttggcacccttgccatctttatttatccctggttttatcaactcaacatttattaccaatggtttcctttctctcaggtagagtttggcctattttctggctcaactattcatgaagttgcccaagtcgttgccgttggtcacacacaaggaaatgcagccgaagacactgctgttatcagcaaaatgctccgtgtcatgatgcttgcgccctttttattactactttcaggttatcttagtcgggtgaaatctaaaaactgtgtcaatgatcatggaaagtcgccaattaccatcccatggtttgccatcttttttattgttatggcagctttcaactctttccatttattacctgagctcattgtcagctctatcatagctattgatactattctgctggcaatggctatggctgctttagggttaacaacacatatcagtgctattcgtcaggccggaaccaagcctattttgttagccttccttttgtttatctggctaatggttggaggattaatcatcaacaaaggcattcatcatttacttggctgaaattttcatctaaaaaaacaatgtcactttttagcgtaccagccgactgggctgtatccaccttacagaatttcattaaccacaagaacaatgcataattaatgaaacagaacaggagaaagatatgaaatttgttggagcccatgtaagcgctgcgggtggtgtggatcaggcggtaattcgagcccatgaattaaaagcaactgcttttgccttattcacgaaaaatcagcgtcaatggaatgcccctcccctgtcaacagtagtcattgataagtttaaggcggattgtgagcgttacggttacggtaaaggtcagatcctccctcacgatagttacctgattaatctgggtcatccggaatctgaagggctggaaaaatcccgtgctgcattccttgatgaaatgcagcgttgtgagcaactaggtattgatttacttaatttccatcccggcagtcacctgaaaaaaattgatatagataaatgtctggcccgcatcgctgaatctatcaatattgtgctagaccaaacgcagggggtcacggcagtgattgaaaatactgccggacagggaactaatctgggcttcaaatttgaacatctggcagccattattgagggcgttgaagataaaagccgggtcggtgtctgtatcgatacctgtcacgcttttgctgccggttatgacttacgtaccgagcaaaattgcgatgccacattcaaagcatttgacgatattgtcggtttcgaatacctgcgagccatgcatcttaatgatgccaaaagcgagttttccagccgggttgaccgacatcacagccttggcgaaggtaacataggaaaaatccccttcagctatatcatgaaagatgatcgtttcaatggcattcctctgatacttgaaacgatcaatccggatatctgggatcaggaaaatgcgtggctaaaatcacagcaaagttagttatctgaccggtgtcaattggatcttcgacatcattgatgccagttcagtacgacgtctaatcccta

SEQ ID NO: 1157 - DNA, 5184 bp, Xenorhabdus sp.; identical to SEQ ID NO: 451
  CDS (3367)..(4854)

SEQ ID NO: 1158 - DNA, 5184 bp, Xenorhabdus sp.; identical to SEQ ID NO: 451
  CDS (5084)..(5182)

SEQ ID NO: 1159 - DNA, 5184 bp, Xenorhabdus sp.; identical to SEQ ID NO: 1156
  CDS (4274)..(5116)

SEQ ID NO: 1160 - DNA, 5184 bp, Xenorhabdus sp.; identical to SEQ ID NO: 451
  CDS (5108)..(5182)

SEQ ID NO: 1161 - DNA, 5952 bp, Xenorhabdus sp.
  CDS (367)..(612)
tgtcctctaaagagaaaatagatgaactggctgattgaagaattaagcatttggaatgctgtccggcatgttgagcgtgtttatagtcgttaaacttagccgttcggttattgagtccgataatacaatcagttaaagtattcccgccattggctcaatccaatggtcaaggcgtcgcggccttgtgttcacagacactggtaagaagttctaccagtgtgcctgcattcgccctttcaatggtgattcaggcgggggaggctatgcctcgctggtgtgaacccagtccgcgaaccctgtctgaatcgccaccatcaatattaattaatggaaggggtagcaggaatgaataacaatgttaaaaatgattggcatcaggccgatattattgccgcattacgtaaacgcggtacaactttagcggctgtttctcgtgagtcgggacttagctcatctacactagcaaacgcattcagtaggccttggcctaaaggcgaatggatcattgctgattatcttggcatccatccctcagaaatctggccaagtcgttatttcgattctcatactggagagttattagaaaggaaatcccgctctaagccacaggaatagcccgttttaatttgtgatctagttcgtaaaaatgataaatgtttatatgaagccttgagcgtgaaatggcagccaaatgtgaccattttcaaatctcatggcttttttgctttaacgtgatgattaaaaagttataaatctaattcctacgcacaatcgaccagatttaacgtagcaaaataatgtgggggtacaaccgggggtatgtgacatttttgataaaattaatttattaaatattaatatcttaacctaccagtattgcgctctcctccgtctattttcctcagtaaaatcaacaaataacaacaaactcaagtctcctgatatctcctaacatctcctgaaagcgacatgaaattgtgtatagttttgtgtatagtttttcctatacatcttcctatacacatgggtgaaatgatgaagctaacagacgtggcaattaagaaatctaagccagaagcaaaggcttatactctctccgatggtaacgggctttggttatcttccataccttttacaacgtgataatcacgaaaagcaagaatcctaatagacccatctccatctaacaacaagtgaataatatttaacaattagttaacttttgaaactaaactcaatatttttgctcgtttcctgagtggttaaagagatgcgaataatatatgttgccacttcatacctgtctcgatatggacaactaatacgcataaacattggctgatactccatgatggacaagtaatttctatgtatacaatcaattcagaacagggattgatagatctgggtcacagaaaaaagtaatattgtagaaaataaaaaccccaagtatgaactaagggttttagttaaatatttctatcattatctagcgtcgacactacgtggacatagatagatataaatgtatacatatcaacaaactacaagggtactttgaacaccatgccagtgttacataaccgtatttctaacaaagaactgaaagaacgtatgttggctgaaactgagccgcgcacaaccatctctttttataaatattttgctattcctgagccacaggattttcgcgacagcctgtatcaacaatttactgatttgtcagtgtttggacgggtttacatcgctaaagaaggtatcaatgcgcaaatcagtatcccttctaaaaatgttgatgctctgaaagcagtattaaataccgctgatcctgctttgtataacttgagactcaatattgcattagaagatgatggcaaatcattttgggtattacgcatgaaagtgcgtgagcgtattgttgctgatggtattgaagatgaaacttttaatccgtcagaaactggtgaatacctgaaagcggatcaggtcaaccagatgctggatgatcctgaaactgtatttgttgatatgcgcaatcactatgaatatgaagtcgggcatttcgaaaatgcgattgaaattccgtcagatacatttcgtgagcagttgcctatggcagttgagatgttgaaggatgataaagataaaaatatcgtcatgtattgtactggtggtatccgttgtgagaaagcaagtgcttatatgctgcacaatggttttaacaatgtttatcatgtcgaaggcggtattattgagtatgcccgtaaggcgaaagctcaggggctgcctgttcgttttattggtaaaaactttgtttttgatgagcgtatgggagaacgtatttctgaagacgttatcgctcagtgccatcagtgcggttcaacttgtgatagccatactaactgtaaaaatgatggctgccatttgctattcatccaatgtccgtcttgcgcagtgcggtttgagggatgttgtagtgatgtctgccgggaagaaatgttacttcctgaaggcgaacagcgtgctcgtcgggcaggaagagaaaatggggctaaaattttcaacaagtctcgttatcggttgaatgaaggtttgaatatcacttcgctgcaatccatcaaacaataaatcttatttaactgcctgtttagtctactgaatgaacaggtattgcaaactggcgtaataacttaaatgtaattgcgccagttgaattattaacagagatacttaaagatattataaataaaaagtaactccatctggttaactaatcctaatttttcaatgatatgtcgtttatgcgaataaacggttctgccgcttatttttaatatctttggcaatcttatatgtgcctatttccagcatccaataatagaggatcctattttcttgcgggctaaaaatagaactttttgcattgaaatgagaaaaatagtgttgaatatcatatgaagcaatttcttttaatcgttcaagtagtaagctaagattcctttttggtaaaataaaatccttattagtcagctggatatgattttctgcccatgggtatggcttatcaatatagatataaatgcgtctttcatgcattaaggagaaaaataacttcatgtattcacagtatgaactgcaataaccgtaatgtgttagattcatcagaacaatatctggtgaaaatacctgaagagtagttattgcatcatgaattgaatgcgtacctgctgtaaggatgttcgtattttctttcagggactcaatgatcccgagccgggtataatagcactcatcaatgattaatagcttcattagctgaacatccttgttctacagtggttatcattaagtgaaacagtctaccggatagttaaatatcaggtagtgtctggctgtttataatacagtattgtgaagaataataaactatatgaatgattctgtgagctgatatttgttttgatagcagtggcggacactcaatgttctgagtgtcctaataggtatgaaatttgctgttaatgttttgtatagtcaagttggtcgtattctgatgattcaatcttctcgatcccagcctgcaagattagaattagctgttttgcaactcctgtagttaaccacaatgttttgtcaatactgacattatctgtctttgtggtttgatctggggaggataagtaatgaaggcgaatcatcatggcgtcataggtgtcaacaatactgatgtcccaacctacaacagggtgggtttgaataatttcatctttttgtcccatataacctcctaatcagactacagcattgttattggtataattgactaagagctgcgaatctcatcaaagatgagtaatggcagtataaacctttttatcaaactaatactacaaccagtctcagaaacccgatggtgatcattttatctgagggtgagtattaacttgttaggtagggaaagcgggatgacgccttcatgcggaaactaagtatctccgcatgaagcacgatgagaggttacttacatatttttacttcccatccggcatcttctccagacaggaatgggatcaatttttcgccattatgttcgacgtattcgaaaactggggtaggcttgcgtgtaagttcaataaacccatcattaacaggtaaatcataaaatttcgggccattcagagagcagaatgcttcaaaatgctccattgcattcatttcttcaaaaacagttgcataagcagctaaagcggttggcgcattgaaaacaccagcacatccgcaggaagattctttacggtgcaataaatgaggagcggaatctgttcccaggaagaaacggtcacagccactggcaacagctgcgcgtaatgcctcctgatgaatattgcgctttaatactggtaaacaatagagatgtgggcggatcccgccaaccagcatatgattacggttgaacatcaaatgctgtggagtgagtgttgctcctaacttatcattgccttcaagaacatattcggcagcttctttggtcgtgatatgttcgaaaacaactttcagctcagggaactgcttacgtaacggctccatgacctgctctataaaacgggcttcacgatcaaaaatatcaatatgagccgcagtcacttcaccatggatcaggagaggcattcctaatttttccattgttgctagcagaggatagattttttgtatatctgaaacaccgtgactggaattagttgttgcattggcaggatagagtttacaggcagtgaaaataccttctttgtaacctatttcaatttgggagctgtttgttgaatccgtgagatagcaggtcatcagaggctgaaactggtgttctgatggaatggctgccattatcctgtctttataggccttagcgctggcaacatctgtcacaggcggggcaaggttaggcataacgatagcccggccaaagaaatggctggtatgaggaacgatagttttcagcatatcaccatcgcgaaaatggacatgccagtcgtcagggcggcggattttaatggtatatgattcagtagtcatggaaccggctccagaatataggtgagaaatggtggaagctgattcagcattccttaagccggaggtagatgataaagagaaaatagttaaatagctattattaaatgataaagttccgctatttttgcagaattaagatttttattttatataagctagggtattcagaggaaattaattgtatcaaaaaggaaaaaatagaagtaacaaaacgagggtgtattgaagttggctcctccaactggactcgaaccagtgacatacggattaacagtccgccgttctaccgactgaactatggaggaactccttcaagacggggcgaatattaacggctattttctcatttgtcaaaggggaaaatcataataactgattgtttgccgttaatatgtactttttgtcgataatatatgctttgtgattttcagctcatcagtgtatcttcagtagcaaagcaaaaagcccgactcactataactgaatcgggcttctttaaatttggctcctccaactggactcgaaccagtgacatacggattaacagtccgccgttctaccgactgaactatggaggaattgctgtgttcctgagaacgaggcgaataataggggaatggagagggcttgtaaagcataaaaataaaaaataagttcaagtgattgagatgcattcaaagtggtgggtttttatcattttttgtggcgaaaaataatcagcgacgcatttttttaggctttactcatgataacgaattaatatttcgttatatttttctggtgccagataaatgctccggcaaaaagtaaaaaagcaaaaagcccgatcagcaaaactgaatcgggcttctttaaatttggctcctccaactggactcgaac

SEQ ID NO: 1162 - DNA, 5952 bp, Xenorhabdus sp.
  CDS (883)..(1935)
gttcgagtccagttggaggagccaaatttaaagaagcccgattcagttttgctgatcgggctttttgcttttttactttttgccggagcatttatctggcaccagaaaaatataacgaaatattaattcgttatcatgagtaaagcctaaaaaaatgcgtcgctgattatttttcgccacaaaaaatgataaaaacccaccactttgaatgcatctcaatcacttgaacttattttttatttttatgctttacaagccctctccattcccctattattcgcctcgttctcaggaacacagcaattcctccatagttcagtcggtagaacggcggactgttaatccgtatgtcactggttcgagtccagttggaggagccaaatttaaagaagcccgattcagttatagtgagtcgggctttttgctttgctactgaagatacactgatgagctgaaaatcacaaagcatatattatcgacaaaaagtacatattaacggcaaacaatcagttattatgattttcccctttgacaaatgagaaaatagccgttaatattcgccccgtcttgaaggagttcctccatagttcagtcggtagaacggcggactgttaatccgtatgtcactggttcgagtccagttggaggagccaacttcaatacaccctcgttttgttacttctattttttcctttttgatacaattaatttcctctgaataccctagcttatataaaataaaaatcttaattctgcaaaaatagcggaactttatcatttaataatagctatttaactattttctctttatcatctacctccggcttaaggaatgctgaatcagcttccaccatttctcacctatattctggagccggttccatgactactgaatcatataccattaaaatccgccgccctgacgactggcatgtccattttcgcgatggtgatatgctgaaaactatcgttcctcataccagccatttctttggccgggctatcgttatgcctaaccttgccccgcctgtgacagatgttgccagcgctaaggcctataaagacaggataatggcagccattccatcagaacaccagtttcagcctctgatgacctgctatctcacggattcaacaaacagctcccaaattgaaataggttacaaagaaggtattttcactgcctgtaaactctatcctgccaatgcaacaactaattccagtcacggtgtttcagatatacaaaaaatctatcctctgctagcaacaatggaaaaattaggaatgcctctcctgatccatggtgaagtgactgcggctcatattgatatttttgatcgtgaagcccgttttatagagcaggtcatggagccgttacgtaagcagttccctgagctgaaagttgttttcgaacatatcacgaccaaagaagctgccgaatatgttcttgaaggcaatgataagttaggagcaacactcactccacagcatttgatgttcaaccgtaatcatatgctggttggcgggatccgcccacatctctattgtttaccagtattaaagcgcaatattcatcaggaggcattacgcgcagctgttgccagtggctgtgaccgtttcttcctgggaacagattccgctcctcatttattgcaccgtaaagaatcttcctgcggatgtgctggtgttttcaatgcgccaaccgctttagctgcttatgcaactgtttttgaagaaatgaatgcaatggagcattttgaagcattctgctctctgaatggcccgaaattttatgatttacctgttaatgatgggtttattgaacttacacgcaagcctaccccagttttcgaatacgtcgaacataatggcgaaaaattgatcccattcctgtctggagaagatgccggatgggaagtaaaaatatgtaagtaacctctcatcgtgcttcatgcggagatacttagtttccgcatgaaggcgtcatcccgctttccctacctaacaagttaatactcaccctcagataaaatgatcaccatcgggtttctgagactggttgtagtattagtttgataaaaaggtttatactgccattactcatctttgatgagattcgcagctcttagtcaattataccaataacaatgctgtagtctgattaggaggttatatgggacaaaaagatgaaattattcaaacccaccctgttgtaggttgggacatcagtattgttgacacctatgacgccatgatgattcgccttcattacttatcctccccagatcaaaccacaaagacagataatgtcagtattgacaaaacattgtggttaactacaggagttgcaaaacagctaattctaatcttgcaggctgggatcgagaagattgaatcatcagaatacgaccaacttgactatacaaaacattaacagcaaatttcatacctattaggacactcagaacattgagtgtccgccactgctatcaaaacaaatatcagctcacagaatcattcatatagtttattattcttcacaatactgtattataaacagccagacactacctgatatttaactatccggtagactgtttcacttaatgataaccactgtagaacaaggatgttcagctaatgaagctattaatcattgatgagtgctattatacccggctcgggatcattgagtccctgaaagaaaatacgaacatccttacagcaggtacgcattcaattcatgatgcaataactactcttcaggtattttcaccagatattgttctgatgaatctaacacattacggttattgcagttcatactgtgaatacatgaagttatttttctccttaatgcatgaaagacgcatttatatctatattgataagccatacccatgggcagaaaatcatatccagctgactaataaggattttattttaccaaaaaggaatcttagcttactacttgaacgattaaaagaaattgcttcatatgatattcaacactatttttctcatttcaatgcaaaaagttctatttttagcccgcaagaaaataggatcctctattattggatgctggaaataggcacatataagattgccaaagatattaaaaataagcggcagaaccgtttattcgcataaacgacatatcattgaaaaattaggattagttaaccagatggagttactttttatttataatatctttaagtatctctgttaataattcaactggcgcaattacatttaagttattacgccagtttgcaatacctgttcattcagtagactaaacaggcagttaaataagatttattgtttgatggattgcagcgaagtgatattcaaaccttcattcaaccgataacgagacttgttgaaaattttagccccattttctcttcctgcccgacgagcacgctgttcgccttcaggaagtaacatttcttcccggcagacatcactacaacatccctcaaaccgcactgcgcaagacggacattggatgaatagcaaatggcagccatcatttttacagttagtatggctatcacaagttgaaccgcactgatggcactgagcgataacgtcttcagaaatacgttctcccatacgctcatcaaaaacaaagtttttaccaataaaacgaacaggcagcccctgagctttcgccttacgggcatactcaataataccgccttcgacatgataaacattgttaaaaccattgtgcagcatataagcacttgctttctcacaacggataccaccagtacaatacatgacgatatttttatctttatcatccttcaacatctcaactgccataggcaactgctcacgaaatgtatctgacggaatttcaatcgcattttcgaaatgcccgacttcatattcatagtgattgcgcatatcaacaaatacagtttcaggatcatccagcatctggttgacctgatccgctttcaggtattcaccagtttctgacggattaaaagtttcatcttcaataccatcagcaacaatacgctcacgcactttcatgcgtaatacccaaaatgatttgccatcatcttctaatgcaatattgagtctcaagttatacaaagcaggatcagcggtatttaatactgctttcagagcatcaacatttttagaagggatactgatttgcgcattgataccttctttagcgatgtaaacccgtccaaacactgacaaatcagtaaattgttgatacaggctgtcgcgaaaatcctgtggctcaggaatagcaaaatatttataaaaagagatggttgtgcgcggctcagtttcagccaacatacgttctttcagttctttgttagaaatacggttatgtaacactggcatggtgttcaaagtacccttgtagtttgttgatatgtatacatttatatctatctatgtccacgtagtgtcgacgctagataatgatagaaatatttaactaaaacccttagttcatacttggggtttttattttctacaatattacttttttctgtgacccagatctatcaatccctgttctgaattgattgtatacatagaaattacttgtccatcatggagtatcagccaatgtttatgcgtattagttgtccatatcgagacaggtatgaagtggcaacatatattattcgcatctctttaaccactcaggaaacgagcaaaaatattgagtttagtttcaaaagttaactaattgttaaatattattcacttgttgttagatggagatgggtctattaggattcttgcttttcgtgattatcacgttgtaaaaggtatggaagataaccaaagcccgttaccatcggagagagtataagcctttgcttctggcttagatttcttaattgccacgtctgttagcttcatcatttcacccatgtgtataggaagatgtataggaaaaactatacacaaaactatacacaatttcatgtcgctttcaggagatgttaggagatatcaggagacttgagtttgttgttatttgttgattttactgaggaaaatagacggaggagagcgcaatactggtaggttaagatattaatatttaataaattaattttatcaaaaatgtcacatacccccggttgtacccccacattattttgctacgttaaatctggtcgattgtgcgtaggaattagatttataactttttaatcatcacgttaaagcaaaaaagccatgagatttgaaaatggtcacatttggctgccatttcacgctcaaggcttcatataaacatttatcatttttacgaactagatcacaaattaaaacgggctattcctgtggcttagagcgggatttcctttctaataactctccagtatgagaatcgaaataacgacttggccagatttctgagggatggatgccaagataatcagcaatgatccattcgcctttaggccaaggcctactgaatgcgtttgctagtgtagatgagctaagtcccgactcacgagaaacagccgctaaagttgtaccgcgtttacgtaatgcggcaataatatcggcctgatgccaatcatttttaacattgttattcattcctgctaccccttccattaattaatattgatggtggcgattcagacagggttcgcggactgggttcacaccagcgaggcatagcctcccccgcctgaatcaccattgaaagggcgaatgcaggcacactggtagaacttcttaccagtgtctgtgaacacaaggccgcgacgccttgaccattggattgagccaatggcgggaatactttaactgattgtattatcggactcaataaccgaacggctaagtttaacgactataaacacgctcaacatgccggacagcattccaaatgcttaattcttcaatcagccagttcatctattttctctttagaggaca

SEQ ID NO: 1163 - DNA, 5952 bp, Xenorhabdus sp.; identical to SEQ ID NO: 1162
  CDS (2174)..(2434)

SEQ ID NO: 1164 - DNA, 5952 bp, Xenorhabdus sp.; identical to SEQ ID NO: 1161
  CDS (1567)..(2628)

SEQ ID NO: 1165 - DNA, 4819 bp, Xenorhabdus sp.
  CDS (4244)..(4540)
aagccgtgcgtggcgtgaaaatgatcactggatggtagaagccaaagatctcgtcaccggtgagagcaaaacatggcgggcaaaaggtctggttaacgcaactggcccgtgggttaagaatttctttgataatggcctgcaactgaaatcaccttatggtattcgtcttatcaaaggcagccacatcgttgtcccacgtgttcatgacgaacctcaggcttatatcctgcaaaacgaagataaccgcatcgtgtttgtgatcccgtggaatgatgaattctccatcatcggcacaacggatgttgaatataaaggcgatccaaaagacgttaaaattgacgatcaagagatcgattatctgctgaaagtttataacgaccatttcaaaaaacaacttaaccgtactgatgtcgtttggacttactccggtgtacgtccgctgtgtgatgatgaatcagattcaccacaagccatcacccgtgactacacactagatgtacaggatgagcagggccagactccgttgctatccgtcttcggcggcaaattgacaacttaccgtaagctcgcagaacatgcgatggataaactagcacagtactatccaaacgccggtcaggcgtggacgaaaaacggtaaattgcccggcggcgagctggaaggccaagaccgtgatggatatgcccgtttacttcgccagcgttatgactggttgccagaaggcattgcgcgacgttattcccgcacttacggtagcaacagcaatatcattctgggtgatgcgaaagaactggcagatttaggtgaattcttcggttatggactgtatgaagctgaactgcgttatctggtcgaacatgagtgggttactcagctggatgatgcgatctggcgccgtaccaaactaggtatgtggctgacagatgagcagaaacagcgcgttgctgattggctggcacagaacgttaaatcagcataatcacaaaactgatttaatctgacaaactcgtatacttaaaaacggcgataattttttatcgccgttttttatttccttccgctcaaaccctcacagaaaaaaatcataaattttcgaaatcaatcatcaatacgttctatcaaaatttctttattttcattcgattctactgagcgatttgatagtacatttttaccactgtggtaggctaatggccggcaggtgaaacattaatctggtaataacttaatccattataattcattgaagagatgacttatgttgaaaatccagcaagcagtcacagaagataatctattgctatcccaaatgcttgaagaaagttatcgttttcatttttctcaattatggaatgataaagatgaattggaagaatatattgccgaagagagttcaccagaaagcatagcgagttcgctcaacactccgaatcataaatggtttattgccgagactaaccggcctattggatttataaaaatagctgtaaataaaactattccggatagtgaattaacaggattatatttacataaactctatctgctgccacacctgactgggcaaaattatggtcagcaattgtttgactatgttgaaaaattaggacaagaacaaggccaaaaatggctttggctggaagtactggaaagtaacaagcaggcgcgaaaattctatgaaaaaaatggcatgacatggtacagagatattatattcaccagccctaaacagcaaagcacactgcatattatgattaagaaaatataatctttatcctttctctgaattcattcacagaggaaggagagtaaaagattaatcaacgttatatctgatttcatctattttatgctctttacctttcagtctacctctttgttggttgcatcatgcagaaacggaataatttcctcagtcatagcctgcataaacgacggtggaaaagtgtgtcccatttgctgcactggtaagaacttagccccgctaatacgtctggcggtatcttctccacaagccatcggaattaaaggatcatcctcaccatgtacaaccagtgcagggcaactaatccggctcaaaagctcagcccggtcagaatctgcaattatcgccaaaatctgacggatgaaacttttgggataatagccgccacgacgaaaagccattctcagatgctgagcctgttcatctatatttagtggttcagaaggagaaacgataagccggattattttcagttgatgagcaaccagttcttccatactggtatcgacgggtttggataacaacgctgccattacctccggctttggcaaaggaagcccatgagcaccactcgaactcatgatgctcaccagactttttgcccgatcaggattagttgccgccaacctctgggcaatcatccctcccatggaagcgccgataatgtgagcctgagggatattcagcgcatcaagcacccccaaagcatcatcagccatgtcctgcatactataagaagcgcgaacaggtagtcccagacgaaaccgaactttctgccacaataaggaacgctgtgggctatgatcaaatctctggctcagccccgcatcacgattatcatgccgaatcacccgaaacccggccacaactaacaggtttactatgtcatcgggccagtcaataagctgcattcccagacccatgataagcaacaccaccggtcgcttctcaccattagccccttcaccactatcttctatttcaattgggacatcatttgctataactttcataagaaataacctcatgatatatcaatgaaaaataaataattggcctgataaatatactattcccgtcttttattgcagcaggatagaataaaatttaatagtaatgaaataaaaaaagagaaaactgtttagttgatgactctatattgaggtaaagaacaaaataccatcaaattgtttcatgttgtgacaaatagtgtagcaaaaatcaccatacagacagaaaaatacagcagacataagggcaggaatcaggctatttccctatattctcccatgatgcttatttttatatcttcagaccaaaataataatatatcttcaaaatattgataatattagtttttatcatttattaaattttcatttattctgtaattgtgatattactcccttttctttaattcgctggttgcggtttatgttcaaatttatgaagataaataagaatggataaaaacttgtaatgatgagtcaaacattcattaaaaaagaggggattgcgcaatcatttctggctcgttatctcctctcagaacaatgtggcaatcgcctgaaaaccatagagttactggcaaaagagtgtgggttgtccgtaggtttaatgcaggcagcattaaaatctcttgagcaatcgcaggcggttggaattaagcgtcgtggtcggaatggcagttttctctcgcagattaaccacaaattactactggaatacgccgatatcggcaatgtagtctgcgcgatgcctcttccctatacccgcgcctatgagggtctggccagtggtttaaaagcattatgtgcaggagttcctttttactttgcacatatgcgaggctcagatatccgcattgagtgcttactgaatggcgtctatgacttagcagtaacatcaagactcgccgcagagcagcatccagataataaagatatatatattgcgctatcactagggacccaaagttacacagacagacatcggttaatctttcgtcagggggagatggaaactatccgccgcgtagggttagacagcacctcagctgaccagaaaataatgacaaagcagtattttgcaggaaaagaaattgaactggtcgaggtttcttaccatgaatgtctgaatcaaatcatgaaaggccacattgatgcggctatctggaacgttggacaaggccacgagctgattgcacaaggcctgatgacccagcttcccgatgacggtgagtgttttatcaaagcctccgaagcggttatccttgcccgcaaggataatatccctatccagcaactcttgcataccatggttgacagagaagcactactaactcatcagcaaaacgtggtatcaggcataatcgaacccatttactgaaccttaattagccccaaaataaggtctcagccaaaaacagactcagaccaaacataatcaattaaatctgacgtgtaacaaaaagcgatggtagaacaacggctaactatcctgttgcaaggtggtgtcatcgatcaggatatctacgataatatgcttgatgtcgtgcatattctggaggagttctggttaatcccagtccgccatccacaaggtgaaatggcgcttactcacatggcaagtgcttttatgcgatcacgtcgtggggaaattgtttctcctatagaaaaagacattctggacaaaataaaacaatccgggaattattcacagttactcaaaattcatcattccctgttggaaaaatttacacttaccctacaccccaatgaggaaggctatctgttaataaatttatatggtttaatacttgcaacaacaagttactgatttttacacaccataaatattcaaaaaaatgaagattaaaaaacttcaagtgtttttatttttcgcacacacgtactgctttgcagctacaaagagaaacctatgtttattaatgcgttaaaaaaacagaatcctaaattaatagaagtagcaaaaaacctttggcagcagggtacgattctaccagatacttacgtcattgatgtcgatcaggtc

SEQ ID NO: 1166 - DNA, 4819 bp, Xenorhabdus sp.; identical to SEQ ID NO: 1165
  CDS (2)..(979)

SEQ ID NO: 1167 - DNA, 4819 bp, Xenorhabdus sp.; identical to SEQ ID NO: 1165
  CDS (1259)..(1768)

SEQ ID NO: 1168 - DNA, 4819 bp, Xenorhabdus sp.; identical to SEQ ID NO: 1165
  CDS (3248)..(4153)

SEQ ID NO: 1169 - DNA, 4819 bp, Xenorhabdus sp.; identical to SEQ ID NO: 1165
  CDS (4706)..(4819)

SEQ ID NO: 1170 - DNA, 4819 bp, Xenorhabdus sp.
  CDS (2042)..(2956)
gacctgatcgacatcaatgacgtaagtatctggtagaatcgtaccctgctgccaaaggttttttgctacttctattaatttaggattctgtttttttaacgcattaataaacataggtttctctttgtagctgcaaagcagtacgtgtgtgcgaaaaataaaaacacttgaagttttttaatcttcatttttttgaatatttatggtgtgtaaaaatcagtaacttgttgttgcaagtattaaaccatataaatttattaacagatagccttcctcattggggtgtagggtaagtgtaaatttttccaacagggaatgatgaattttgagtaactgtgaataattcccggattgttttattttgtccagaatgtctttttctataggagaaacaatttccccacgacgtgatcgcataaaagcacttgccatgtgagtaagcgccatttcaccttgtggatggcggactgggattaaccagaactcctccagaatatgcacgacatcaagcatattatcgtagatatcctgatcgatgacaccaccttgcaacaggatagttagccgttgttctaccatcgctttttgttacacgtcagatttaattgattatgtttggtctgagtctgtttttggctgagaccttattttggggctaattaaggttcagtaaatgggttcgattatgcctgataccacgttttgctgatgagttagtagtgcttctctgtcaaccatggtatgcaagagttgctggatagggatattatccttgcgggcaaggataaccgcttcggaggctttgataaaacactcaccgtcatcgggaagctgggtcatcaggccttgtgcaatcagctcgtggccttgtccaacgttccagatagccgcatcaatgtggcctttcatgatttgattcagacattcatggtaagaaacctcgaccagttcaatttcttttcctgcaaaatactgctttgtcattattttctggtcagctgaggtgctgtctaaccctacgcggcggatagtttccatctccccctgacgaaagattaaccgatgtctgtctgtgtaactttgggtccctagtgatagcgcaatatatatatctttattatctggatgctgctctgcggcgagtcttgatgttactgctaagtcatagacgccattcagtaagcactcaatgcggatatctgagcctcgcatatgtgcaaagtaaaaaggaactcctgcacataatgcttttaaaccactggccagaccctcataggcgcgggtatagggaagaggcatcgcgcagactacattgccgatatcggcgtattccagtagtaatttgtggttaatctgcgagagaaaactgccattccgaccacgacgcttaattccaaccgcctgcgattgctcaagagattttaatgctgcctgcattaaacctacggacaacccacactcttttgccagtaactctatggttttcaggcgattgccacattgttctgagaggagataacgagccagaaatgattgcgcaatcccctcttttttaatgaatgtttgactcatcattacaagtttttatccattcttatttatcttcataaatttgaacataaaccgcaaccagcgaattaaagaaaagggagtaatatcacaattacagaataaatgaaaatttaataaatgataaaaactaatattatcaatattttgaagatatattattattttggtctgaagatataaaaataagcatcatgggagaatatagggaaatagcctgattcctgcccttatgtctgctgtatttttctgtctgtatggtgatttttgctacactatttgtcacaacatgaaacaatttgatggtattttgttctttacctcaatatagagtcatcaactaaacagttttctctttttttatttcattactattaaattttattctatcctgctgcaataaaagacgggaatagtatatttatcaggccaattatttatttttcattgatatatcatgaggttatttcttatgaaagttatagcaaatgatgtcccaattgaaatagaagatagtggtgaaggggctaatggtgagaagcgaccggtggtgttgcttatcatgggtctgggaatgcagcttattgactggcccgatgacatagtaaacctgttagttgtggccgggtttcgggtgattcggcatgataatcgtgatgcggggctgagccagagatttgatcatagcccacagcgttccttattgtggcagaaagttcggtttcgtctgggactacctgttcgcgcttcttatagtatgcaggacatggctgatgatgctttgggggtgcttgatgcgctgaatatccctcaggctcacattatcggcgcttccatgggagggatgattgcccagaggttggcggcaactaatcctgatcgggcaaaaagtctggtgagcatcatgagttcgagtggtgctcatgggcttcctttgccaaagccggaggtaatggcagcgttgttatccaaacccgtcgataccagtatggaagaactggttgctcatcaactgaaaataatccggcttatcgtttctccttctgaaccactaaatatagatgaacaggctcagcatctgagaatggcttttcgtcgtggcggctattatcccaaaagtttcatccgtcagattttggcgataattgcagattctgaccgggctgagcttttgagccggattagttgccctgcactggttgtacatggtgaggatgatcctttaattccgatggcttgtggagaagataccgccagacgtattagcggggctaagttcttaccagtgcagcaaatgggacacacttttccaccgtcgtttatgcaggctatgactgaggaaattattccgtttctgcatgatgcaaccaacaaagaggtagactgaaaggtaaagagcataaaatagatgaaatcagatataacgttgattaatcttttactctccttcctctgtgaatgaattcagagaaaggataaagattatattttcttaatcataatatgcagtgtgctttgctgtttagggctggtgaatataatatctctgtaccatgtcatgccatttttttcatagaattttcgcgcctgcttgttactttccagtacttccagccaaagccatttttggccttgttcttgtcctaatttttcaacatagtcaaacaattgctgaccataattttgcccagtcaggtgtggcagcagatagagtttatgtaaatataatcctgttaattcactatccggaatagttttatttacagctatttttataaatccaataggccggttagtctcggcaataaaccatttatgattcggagtgttgagcgaactcgctatgctttctggtgaactctcttcggcaatatattcttccaattcatctttatcattccataattgagaaaaatgaaaacgataactttcttcaagcatttgggatagcaatagattatcttctgtgactgcttgctggattttcaacataagtcatctcttcaatgaattataatggattaagttattaccagattaatgtttcacctgccggccattagcctaccacagtggtaaaaatgtactatcaaatcgctcagtagaatcgaatgaaaataaagaaattttgatagaacgtattgatgattgatttcgaaaatttatgatttttttctgtgagggtttgagcggaaggaaataaaaaacggcgataaaaaattatcgccgtttttaagtatacgagtttgtcagattaaatcagttttgtgattatgctgatttaacgttctgtgccagccaatcagcaacgcgctgtttctgctcatctgtcagccacatacctagtttggtacggcgccagatcgcatcatccagctgagtaacccactcatgttcgaccagataacgcagttcagcttcatacagtccataaccgaagaattcacctaaatctgccagttctttcgcatcacccagaatgatattgctgttgctaccgtaagtgcgggaataacgtcgcgcaatgccttctggcaaccagtcataacgctggcgaagtaaacgggcatatccatcacggtcttggccttccagctcgccgccgggcaatttaccgtttttcgtccacgcctgaccggcgtttggatagtactgtgctagtttatccatcgcatgttctgcgagcttacggtaagttgtcaatttgccgccgaagacggatagcaacggagtctggccctgctcatcctgtacatctagtgtgtagtcacgggtgatggcttgtggtgaatctgattcatcatcacacagcggacgtacaccggagtaagtccaaacgacatcagtacggttaagttgttttttgaaatggtcgttataaactttcagcagataatcgatctcttgatcgtcaattttaacgtcttttggatcgcctttatattcaacatccgttgtgccgatgatggagaattcatcattccacgggatcacaaacacgatgcggttatcttcgttttgcaggatataagcctgaggttcgtcatgaacacgtgggacaacgatgtggctgcctttgataagacgaataccataaggtgatttcagttgcaggccattatcaaagaaattcttaacccacgggccagttgcgttaaccagaccttttgcccgccatgttttgctctcaccggtgacgagatctttggcttctaccatccagtgatcattttcacgccacgcacggctt

SEQ ID NO: 1171 - DNA, 4750 bp, Xenorhabdus sp.
  CDS (2)..(1006)
tgctctaagagcagagcatcactcggtgcgtactgacgcgggtatgttcgatgtttcccatatgaccatcgtggacttacacggcactggttgccgcgatttcctccgctatcttctggcaaatgatgttgccaaactgactgaaaaaggcaaggcactctataccggcatgctgaatgcttccggcggtgttattgatgacctgattgtctattttttcacaaacgatttttatcgcatggttgttaactcagcaacacgcgagaaagacttagcatggataaaacagcatgctgaaaaatatccggttgagatcaccgtgcgtgatgatttggcgcttattgcggtgcaaggcccgaatgcacaatctaaagttcaatctttgttaagtgatgaacaaaaacaagccattacaggtatgaagccattttttggtgtgcaggccggtgatttatttattgcaactaccggttataccggtgaggccggatatgaaatagccatgcctcaggaacaggctgctgatttttggcaacaattactgaaagaaggcgtcaagccggcaggattgggggcgcgggatacattgcgtcttgaagccggaatgaacctttacggtcaggaaatggatgaatccatctctccattggcggctaacatgggatggacaatcgcatgggaaccggaagatcgccagtttattggccgcgaagctctcttaaaacaacgtgaggccggaacagaacaactagtcggattaatcatgcgtgagaaaggtgtattgcgcagtgggttaacagttggttttacagatgaaacgggtgcaacacattttggtgctattaccagtggaacattctcccctacattaggattcagtattgcccttgcacggataccgcgaggggttggaaagcaggcggttgtccagatccgtaatcgtgagatgcccgttcaggttgtgaaaccgggctttgtgcggatgggtaaatcgcttgtaggatgattttgatcgcaacattttaattaataaaaaataaggagatggaaccgatgagtcatgtacccgttgaattaaaatataccgagtcacacgagtgggttcgttctgaagggaatggcgaatacaccgtgggtattaccgaacatgcccagcagttattgggcgacatggtgttcattgacttacctgaaatcggaatgcaggtaaatattggtgatgattgcgctgttgttgaatcagttaaggctgcttctgatatttatgcaccactgagtggcgaagtcattgctgttaacccggctctggaaggctcgccggaattagtgaatagcgagccttataatgatggctggttgttccgcatcaaggtgactgatgaaagtaaattgtccgagctgcttgatgcagaaaaatatcgggcattactggtagaagaagagtaagcatttatcgccccgcaccactggaactataccgtgagcggggcgttttttatatgtgccgtttttagctagtttcaggaaattattatcaatgacccagactctaatccaacttgaaaatcaaggtgaattcattcgtcgtcacattggttcttctgccggacagcaagaagaaatgttggcaatggtagatgcaagctcccttgacgatctcactaataaaattgttccccgtgatatcgcactggcagaaccaccagcagtaggagatggtgcgacagaacaacaggcactggctgaactgaaggcaattgcaggtcagaacaagcgttaccagtcttatattggtatgggatatgctccttcaattctcccgccggtcatcctgcgtaacctgttggaaaacccgggttggtatacggcatatacaccataccagccggaagtttctcaggggagactggaagccctgctgaattttcagcaagtcaccatcgatctaaccggattagatctcgcttcagcatcactattggatgaagcaactgcggcggcagaatcaatggcaatggcaaaacgtgtcagcaaactgaaaaatgccgagcgtttctttgttgctgatgatattcacccacagacactggatgtggttcgtacaagagcggcgacatttgggtttgatgtcattgttgataaagcagaaaaagtactggaactggaaggcatctttggtgttctgcttcaacaggtaggtactaccggtgaagtccatgattacagtgatctcattacaaaactgaaacagcaaaaaattattgtcagcgttgctgctgatatcatgacattggtcatgctgacagcaccgggtaaacagggtgctgatattgtctttggttcagcgcagcgttttggtgttccgatgggttacggcggcccacatgccgcgttctttgcctgtcgtgatgaatacaaacgttcaatgcccggccgaattattggcgtttcccgtgatgctgccggaaatcgtgcattacgtatggcgatgcagacacgtgagcaacatattcgtcgtgaaaaggcgaactccaatatttgtacgtcgcaggtattactggcaaatattgcgggtatgtatgcggtttatcatggtgctgaaggtctgaaaagaatagcagggcgtattcaccggctgactgacattttagcttcagctctgcaaaaagcgggcttaaccctgcgccacaaaacgtggttcgatacattaacggtagaagtcaccgataaggcaccaatactggcacgtgctgaaaaagcacacatcaatttacgtacagatattcttggtgcaatcggtgtgtcattaagtgaaaaaaccagtcgtgaagatttgataaccctgtttcaggttttaactggcactgaaacggtgttagatattgatgcacttgatcttgaaatttcagaaggcagccagtctgttccggtttcaatgctgcgtaatgatgaaattctgacccatgataatttccgtcgttatcacagcgaaacagatatgatgcgctatctgcacagtctggaacgtaaagatctggcattgaaccaagcgatgatcccgttgggttcatgcacaatgaaattgaacgcagccgctgaaattatgccaatcacatggcctgaatttacagatttacatcctttctgccctccagaacaggcacagggttatcagcaattaattagccagctgtctaactggctggtattgctgacgggttatgatgcagtatctatgcagccaaactcaggtgctcagggagaatatgccggtttactggctattcgccattactatgccagccgtggcgagcaacatcgtcatatttgcctgatcccaagttctgcacatggcacaaacccggcatccgcgcatatggctggcatgacagtggttgtggtcgattgtgataaagatggcaatatcgatctgactgacctgcgggaaaaagccgaaaaacatcgtgatgaactagcttgtatcatggtgacatatccatcaacccacggtgtatacgaagaaacaattcgccaagtttgtgacatcattcaccaaaatggcgggcaggtttaccttgatggcgcaaatatgaacgctcaggtagggattactacgccgggctttatcggtgctgatgtctcacaccttaacctgcataaaaccttctgtattccgcacggtggtggcgggcctggcatggggccaattggtgtaaaaaaacaccttgcaccgttccttccggggcactcggtggtggaaatggattcattaacctcgcagggagcagtatccgccgcgccatttggtagtgcgtccattttgccgattagctggatgtacattcgtatgatgggtgcaaaaggtttgaaacaggccagtcaggttgcgatcctgaatgcaaattacattgctgctcgcctgaaaggggcttatgacatcctctataccggtcgtgatggttatgttgctcacgaatgtattctggatattcgcccattgaaagaagagttcggtatcagtgaaatggacatcgccaagcgtttgattgactatggtttccatgcaccaactatgtcattccctgttgcgggaactctgatggttgagccaactgaatctgaaagcaaaatggaaattgatcgcttcattaatgccatgctggcaattcgtgaagaaatcaacaaagtggcaaaaggtgattggccactggaagataacccgctggtgaatgcaccgcacgttcaggctgagctggtttctgagtgggatcacgcgtatagccgtgaagtcgccgttttcccaaccatagagacaaaagaaaataaatactggccgacagtaaaacgtctggacgatgtgtatggtgaccgcaatctgcattgttcctgcgcacctatcgaagattatcgttaatatagacataactttattagggcgtgttgacgttttgttttcatcacttactcgacccacatgggtaaccagataatgataaatgccagtgctaatgtgctggcgtaatttctcgctaatttatcgtatcttgtggcgattgcacgaaaatgtttgattctggcaaatgcattttcgactaaatgacgataacgatataaatccttatcccactttttatccgaatttcggctattttttcggtagggaataaccgctgttgcaccttgttcttcaatataagttctcaatgcctgactatcgtatcccttgtcagcaacgacaaaattccggggc

SEQ ID NO: 1172 - DNA, 4750 bp, Xenorhabdus sp.; identical to SEQ ID NO: 1171
  CDS (1045)..(1446)

SEQ ID NO: 1173 - DNA, 4750 bp, Xenorhabdus sp.; identical to SEQ ID NO: 1171
  CDS (1538)..(4414)

SEQ ID NO: 1174 - DNA, 4750 bp, Xenorhabdus sp.
  CDS (2)..(289)
gccccggaattttgtcgttgctgacaagggatacgatagtcaggcattgagaacttatattgaagaacaaggtgcaacagcggttattccctaccgaaaaaatagccgaaattcggataaaaagtgggataaggatttatatcgttatcgtcatttagtcgaaaatgcatttgccagaatcaaacattttcgtgcaatcgccacaagatacgataaattagcgagaaattacgccagcacattagcactggcatttatcattatctggttacccatgtgggtcgagtaagtgatgaaaacaaaacgtcaacacgccctaataaagttatgtctatattaacgataatcttcgataggtgcgcaggaacaatgcagattgcggtcaccatacacatcgtccagacgttttactgtcggccagtatttattttcttttgtctctatggttgggaaaacggcgacttcacggctatacgcgtgatcccactcagaaaccagctcagcctgaacgtgcggtgcattcaccagcgggttatcttccagtggccaatcaccttttgccactttgttgatttcttcacgaattgccagcatggcattaatgaagcgatcaatttccattttgctttcagattcagttggctcaaccatcagagttcccgcaacagggaatgacatagttggtgcatggaaaccatagtcaatcaaacgcttggcgatgtccatttcactgataccgaactcttctttcaatgggcgaatatccagaatacattcgtgagcaacataaccatcacgaccggtatagaggatgtcataagcccctttcaggcgagcagcaatgtaatttgcattcaggatcgcaacctgactggcctgtttcaaaccttttgcacccatcatacgaatgtacatccagctaatcggcaaaatggacgcactaccaaatggcgcggcggatactgctccctgcgaggttaatgaatccatttccaccaccgagtgccccggaaggaacggtgcaaggtgtttttttacaccaattggccccatgccaggcccgccaccaccgtgcggaatacagaaggttttatgcaggttaaggtgtgagacatcagcaccgataaagcccggcgtagtaatccctacctgagcgttcatatttgcgccatcaaggtaaacctgcccgccattttggtgaatgatgtcacaaacttggcgaattgtttcttcgtatacaccgtgggttgatggatatgtcaccatgatacaagctagttcatcacgatgtttttcggctttttcccgcaggtcagtcagatcgatattgccatctttatcacaatcgaccacaaccactgtcatgccagccatatgcgcggatgccgggtttgtgccatgtgcagaacttgggatcaggcaaatatgacgatgttgctcgccacggctggcatagtaatggcgaatagccagtaaaccggcatattctccctgagcacctgagtttggctgcatagatactgcatcataacccgtcagcaataccagccagttagacagctggctaattaattgctgataaccctgtgcctgttctggagggcagaaaggatgtaaatctgtaaattcaggccatgtgattggcataatttcagcggctgcgttcaatttcattgtgcatgaacccaacgggatcatcgcttggttcaatgccagatctttacgttccagactgtgcagatagcgcatcatatctgtttcgctgtgataacgacggaaattatcatgggtcagaatttcatcattacgcagcattgaaaccggaacagactggctgccttctgaaatttcaagatcaagtgcatcaatatctaacaccgtttcagtgccagttaaaacctgaaacagggttatcaaatcttcacgactggttttttcacttaatgacacaccgattgcaccaagaatatctgtacgtaaattgatgtgtgctttttcagcacgtgccagtattggtgccttatcggtgacttctaccgttaatgtatcgaaccacgttttgtggcgcagggttaagcccgctttttgcagagctgaagctaaaatgtcagtcagccggtgaatacgccctgctattcttttcagaccttcagcaccatgataaaccgcatacatacccgcaatatttgccagtaatacctgcgacgtacaaatattggagttcgccttttcacgacgaatatgttgctcacgtgtctgcatcgccatacgtaatgcacgatttccggcagcatcacgggaaacgccaataattcggccgggcattgaacgtttgtattcatcacgacaggcaaagaacgcggcatgtgggccgccgtaacccatcggaacaccaaaacgctgcgctgaaccaaagacaatatcagcaccctgtttacccggtgctgtcagcatgaccaatgtcatgatatcagcagcaacgctgacaataattttttgctgtttcagttttgtaatgagatcactgtaatcatggacttcaccggtagtacctacctgttgaagcagaacaccaaagatgccttccagttccagtactttttctgctttatcaacaatgacatcaaacccaaatgtcgccgctcttgtacgaaccacatccagtgtctgtgggtgaatatcatcagcaacaaagaaacgctcggcatttttcagtttgctgacacgttttgccattgccattgattctgccgccgcagttgcttcatccaatagtgatgctgaagcgagatctaatccggttagatcgatggtgacttgctgaaaattcagcagggcttccagtctcccctgagaaacttccggctggtatggtgtatatgccgtataccaacccgggttttccaacaggttacgcaggatgaccggcgggagaattgaaggagcatatcccataccaatataagactggtaacgcttgttctgacctgcaattgccttcagttcagccagtgcctgttgttctgtcgcaccatctcctactgctggtggttctgccagtgcgatatcacggggaacaattttattagtgagatcgtcaagggagcttgcatctaccattgccaacatttcttcttgctgtccggcagaagaaccaatgtgacgacgaatgaattcaccttgattttcaagttggattagagtctgggtcattgataataatttcctgaaactagctaaaaacggcacatataaaaaacgccccgctcacggtatagttccagtggtgcggggcgataaatgcttactcttcttctaccagtaatgcccgatatttttctgcatcaagcagctcggacaatttactttcatcagtcaccttgatgcggaacaaccagccatcattataaggctcgctattcactaattccggcgagccttccagagccgggttaacagcaatgacttcgccactcagtggtgcataaatatcagaagcagccttaactgattcaacaacagcgcaatcatcaccaatatttacctgcattccgatttcaggtaagtcaatgaacaccatgtcgcccaataactgctgggcatgttcggtaatacccacggtgtattcgccattcccttcagaacgaacccactcgtgtgactcggtatattttaattcaacgggtacatgactcatcggttccatctccttattttttattaattaaaatgttgcgatcaaaatcatcctacaagcgatttacccatccgcacaaagcccggtttcacaacctgaacgggcatctcacgattacggatctggacaaccgcctgctttccaacccctcgcggtatccgtgcaagggcaatactgaatcctaatgtaggggagaatgttccactggtaatagcaccaaaatgtgttgcacccgtttcatctgtaaaaccaactgttaacccactgcgcaatacacctttctcacgcatgattaatccgactagttgttctgttccggcctcacgttgttttaagagagcttcgcggccaataaactggcgatcttccggttcccatgcgattgtccatcccatgttagccgccaatggagagatggattcatccatttcctgaccgtaaaggttcattccggcttcaagacgcaatgtatcccgcgcccccaatcctgccggcttgacgccttctttcagtaattgttgccaaaaatcagcagcctgttcctgaggcatggctatttcatatccggcctcaccggtataaccggtagttgcaataaataaatcaccggcctgcacaccaaaaaatggcttcatacctgtaatggcttgtttttgttcatcacttaacaaagattgaactttagattgtgcattcgggccttgcaccgcaataagcgccaaatcatcacgcacggtgatctcaaccggatatttttcagcatgctgttttatccatgctaagtctttctcgcgtgttgctgagttaacaaccatgcgataaaaatcgtttgtgaaaaaatagacaatcaggtcatcaataacaccgccggaagcattcagcatgccggtatagagtgccttgcctttttcagtcagtttggcaacatcatttgccagaagatagcggaggaaatcgcggcaaccagtgccgtgtaagtccacgatggtcatatgggaaacatcgaacatacccgcgtcagtacgcaccgagtgatgctctgctcttagagca

SEQ ID NO: 1175 - DNA, 597 bp, Xenorhabdus sp.
  CDS (1)..(597)
tctaaggtttttatcgatctgcgtgaccgctggtttccttctggcgctgacacgccacagacccgaaaagcgggcgcaggagcggagttttttccgcgtcggttccggcgttcccgcggagtaaacgatcatgagcaagggtattgttcttcttgccgccggtggaaccggcggccatgtctttcagccgaggctctggcgcatacgctggaggcgcggggttatcaggtgcatctcgtcaccgacagccgcgccgagcgttatgccggcaaatttccggcggatgaaatccatgtcgtgccttccgccaccatcggctcgaagaatccgatttccgtcgtgcgttcgctctggaagctgtgggtgggtcttcgcgcggcgcgccggctggttgcgaaactgaagccggtcgcggttgtcggtttcggcggttatcccactgtgccgccgcttctggcatcgaccgggcttggtgtgccctccatcatccatgagcagaatgcggtgatgggtcgcgccaacaaggcgctggctgcccccctgaaagcgattgctggcggtttcctgccgcccgccaacgggcaatattccgacaag

SEQ ID NO: 1176 - DNA, 4317 bp, Xenorhabdus sp.; identical to SEQ ID NO: 452
  CDS (259)..(1002)

SEQ ID NO: 1177 - DNA, 4317 bp, Xenorhabdus sp.; identical to SEQ ID NO: 452
  CDS (1093)..(1446)

SEQ ID NO: 1178 - DNA, 4317 bp, Xenorhabdus sp.; identical to SEQ ID NO: 452
  CDS (3965)..(4315)

SEQ ID NO: 1179 - DNA, 4404 bp, Xenorhabdus sp.
  CDS (3)..(1349)
aggcccaaaaaatcctgcaaaccccacaacggccgaacgacagaatacagttgcgcttaatggtaaaaaccggatctctggcggagaaaagctatcagcagggttatacttacctcatacccaaaatcgttctctcttccagtaaagatttatcctcacaaaaactggaaaatctgtggcacaacgcagttgatagcaaaaaccctttcccaccagccatagtttcctatgatttcaccctttatagccttagcttaccgaataataagcctgaattattgcaggatgcactgatatggctatccgatattgcaggtggtgctgtattcacaccgcaaacattaactccggcgatgaaaacatcggagcatctggtagcaactttaccatcagacatacatgatcctgtatggcgtacacgattacagggttcaacgctgattggtcatgatcccggagcgaatgtatcaatccctgtcgatgtcaaaaaagtcgaagcattttatcggcagtggtatacgccggatgcaatgactttatatattgcgggtaatgtggatagccggatattgccagagcgccttaatcaggtattttcatcattagaaggtaaacgtcagacccctgttgcggttcctatcctgctgccattaaaaacagaaacactgggagtagaaagtgagaaagccatacaggacaggctttctttagcctggaacctgaactggcagccgattaatgattctcagacactatttcagcactggtctaatgaacttgcccgtgaggccctttaccattatttgcaactgaagctggaagaaaatcaaaataacgccaaattggatttggattgtcgggttgtgtatcaacgggcaaactgctacttaaacttgaacgccccatcaggcaaactgactgattccacactttatctggcttccgccctggcatcactacgtgaaagcgggttaccacaagagcagtttgatgaattgtacaagcagaagcgcattcaacttcagcatcttttcgccgtctatgctcgtacagacacagacgtactcattaatcagcgcctgatttcccaacagaacaatgtgattgatattgcacccgagcaatacagcagactgagacagatatttttatcttccctcacaccgcaagtgttaaacaaaaaactgcaagagatgttatctcaggaaacttcatttattctggtgcagccaaaaggggaagcgattattgatgtgaatcagctcagggatagctttaaccagattatgcgcccagggccattgccggaagaaccgaaggaaactgaagcgataaaaaaagcagactaaccttatcccaatcaaggagaattatatgattagtctttatactgacagttcccctaacggatttaagataacgattgctctggaagagcttgagcttccatatgtagtaaaccatgttcatattgagaaaggtgaaaacttactaccagaatttttacagcttaatcctcatggccgtattcccgttttgtctgacagcgagacaaatacgactatttttgaatctgcggcaattcttctttatttagcggataaaacaaataaattacttccttctgagcataatgcccgttggcaggcgattcagtggctgatttttcatgcatccagtgttggcccaattataggtcagagagttaattttgaaatttttgatgagggaaaaaacaaagaagccactgagcgctataagaagctgacagagcgggctttttcaaccatggataatcatttagccaataatttatattttggtggaaaagagtattcaattgctgatatcgcgaattttggctggacgcatattgcacgtattatcaactttgattttcaccattataaaaacttaagcgaatggcatcatcgaattgcagccagaccagcagtgcaacgtggaattttaatcccagaacctgcgacaggtccctaaaaataaaacttttcggaaaaatatgcagtaaagggttttagtttttcaggaaaagagcaaactcctacatcgctttagcggtaggagatatgatttgaaagcaagagatataaatcctttttataggtttttatgctgttataggttatgggaataataaaatacattgaacatttttaaataaaatcaacagtgattctatctgtataaattttgacatattcattttcaaagtatgaatgattatacaaaatatcgtctttgaatgttaaattagacatgattattttattttcgaataagtaaccatttatttcataagcaaatgtattatttatttgctgtaatgagaattgtgtattttttgatgtctctatttttatctcatctaaaaatatcaatccaagttcaactaaataagtgttaccaatatacaactgctctttaaattcattgataaagcaacatattttttgttctccaaatgataaagtaacttcttcttcaatgtgttcatttagagcaattacttttgcataatatttcatcactatatctctattgctgtaagagtaattgaattattagacgttatttctgtgcggtgatagacatcataacgttatgcaataattcttcacccaattaaaaatcataaccacccgtataacgggtggtttgctcttgccctataagggcttgttaccgactgcgcctaaatgacgctgctttctcttcgttcaagctaagtgtctttgctgctttggcctaccccttgaaggggtctacatgctctttactactcaatttatccgagattaaatccgacttttcttgctctctgatatacttttgaattgtcgcttcatttagccctaccgtactgacatagaacccttccgcccaaaactttctgttgccaaatttatattttaaattggcgtgtctatcaaagatcatcaacgaacttttacccttcaaatatcccataaagcttgaaacgcttagctttggtggaatactcaccaacatatgaacatgagctggcatgagatgaccttcgattatttccacacctttatacttacaaaggtctctgaggatctctcccacacttgaacgaatattattaaaaatcactttccgtctatatttcggcgaaaagacgatatggtatttacacagccactttgtatgcgctgagctttgtgctttaatgcccataaacacctttccttatttgagttacgaatattagcttgaacatctatatcgtaacggaaaggtgtttttcttggtataacctttgaactccacccgcaaagcgggtggttttatgtttaagacgctaacgcgacttaaactggctaaagccataaataaaagccgctttttcagcggctttaatatcaatataggattgtgtactaatgcaacttacagtacagcaacaatcgcttcacacagaggaaccatgttctccagtgttaaaccagcgacgttaatacggccggagctgactgcataaacagcgtattcttcacgcaggcgttcaacttgttctttagtcagaccgctgaatgagaacataccattttgagcacagatgaagctgaaatcctgttttgcacctttttcttgtaaggtgttgacgaacaattggcgcatacgctgaatgcgctcacgcattgttgccagttcctgaatccactctgctttcagttcttcgttggacagaattgtcgtaacaacagaagcaccatgagccggtgggttagaatagttggtacgtacaataaatttagcctgactaaacgctttctctgcggtatcgctgtctgctgcaacaatagtacaggcaccaacacgctcattgtacaggccaaagtttttggagtaagagctggcaacgatcaattcattatggtttttggcaaaaatgcgcagaccttccgcatcttcatccagacctttagcaaagccctgataagcgaaatcgaatacaggcagccagccatttgccgcagataaatctgccagtttttgccactgttctggagtaggatcgataccggtcgggttatggcagcaaccgtgcaacagaacaacatcacccgcttgtgcttcagacaggcttgccagcatgccttcgaaattcagagcgtgtttttctgcatcgtaatagttatattcgcggatctctaaacctgcgctggaaaaaacacctttatggtttggccaggttgggttactgatccaaacacgtttggcattagtttgcttggcaataaaatcagcggcagtacgcagtgcgcctgttccgcctgggctttgtacggtacgggcacgtttttcagtaacgatggcactggtacttccaaaaagcagttcctgaatcacccggcc

SEQ ID NO: 1180 - DNA, 4404 bp, Xenorhabdus sp.; identical to SEQ ID NO: 1179
  CDS (1375)..(1998)

SEQ ID NO: 1181 - DNA, 4404 bp, Xenorhabdus sp.; identical to SEQ ID NO: 374
  CDS (1)..(969)

SEQ ID NO: 1182 - DNA, 6329 bp, Xenorhabdus sp.
  CDS (3610)..(4173)
atgcagcgttcattattaccgatgatcacaggctgaatagcggtttcagaatccgtcagagaaaaagataagttttgtgcttcacgacgaaaatactggatattattttgcagacgctggcgcaattcatctcctgccctaatctggcgcgtggcctcggaaagtgcaactgcctgagccggtggcatagaagtgctataaatcaggtgtcgggaatattgaacaaagtattctgcggtctgttcatcacacaataccgcagccccgctcaaaccaaatgccttaccacaagtaacgattaagatctccggcttaacattctgtaaccagcagctccctctcccctcatcaccataaataccaataccgtgggcatcatccaccatcagccagctacctgtagattgtgccagccgggtaatttcactgagtggtgcgctgtctccatccatgctaaaaacaccttctgtcaccaccagtgttttacctgcacatgctttgcctaaatgctgttttagcgaaatcgggttattgtgcaaaaaacgccgaaactgagccggtgaatgcatagccgcctccatcagggaggcgtggttcaggcgatcagcaataatgcgatcctctttttccattagagccgctatcacgccctgattagccgaatagccagaaataaacagcaaggcacgggaataaccaagccactccgccagttgttgctctagcgcatggtgagccgaggtatatccggttacatgccctgagccgccactaccaacaccgtattgctcagcgccttgttgccacgcagcaataacctcaggatgctggctcaatccgagataatcattactggaaaagttcagatattgttgcccatcagaggtgtagagatgtcgtccatttgaactttgatgagcctgtctgcggcgccataacgatgtgccccggcgttcggccaatcgccgggaaagagaatctgaccagctcatcatattgccgcattatagaattgttcattgtcagcattattaatgatggcttccgtcaggtgttgctgctgctgtttgtcaccaaatgctatttttgtctgctgagggttaatgcccagtctacggaacagttgcaagtctttgtcttcgcccgggttcggggtagtcagtaatttgcagccataaaaaatggagttagcgcctgccataaaacacatggcctgtgtctgctcattcatctgctcgcgccccgcagataaacggacatgagatttcggcatcataatacgagctacagcgatagtacggataaaatcaaatggatcgacttcttcattattttccagcggtgttcctttcactttcaccagcatattaatcggaacgctttccggtggtttgggcaggtttgccagttgcactaacagagctgcacggtcacgaatttcttcacccagtcctacaataccgccagagcacactttaatacctgcatccctgacattttccagtgtatccagcctgtcctgataactgcgcgtagtaataatattgccgtaaaattccggtgaggtatccagattatggttgtagtaatccagacctgcttctgccagacgctgtgcctgagacggattcagcattcccagtgtcatgcaggtttccatgcccaatgacttaacttcctgaaccattttttccagataaggcatatcccgttcgtgtggatttttccatgcggcacccatgcaaaaacgggtcgaacctgcatttttagccttacgagctgattcgataactttctccacttccatcaggcgttctttttccagacctgttttgtaacgggagctctgtgggcaatatttacagtcttcagggcaggctcctgtttttattgaaagaagtgtactgacctgtacctgttgcggatcaaaatgttcgcgatgtacttgctgtgcctgaaacagtaattcaaaaaaaggcatatcaaacagggactgagcctgcttaattgtccattgctgacgctcactcacaataacttctccaacatgaaataaaacatgaaataaaagttgtcagtttaaataacgccgctatcatgtcaaccaaaactagatcaaaaaggtttacaactaatttattatgaatccttcagatattgactttgacctgcgacacatctggcatccatatacttccatgagcaacccactaccgacttatccggtcgattctgccagtggtgttgaattggtattgtcagatgggcgtaaattaattgacggtatgtcttcatggtgggcggcaattcacggctacaatcatcccgtacttaatgaagccgcaaaatcgcaaattgataaaatgtcgcatgtgatgtttggcggcattactcatccaccagcagtagaattgtgtaaacaactggtagcaatgacgcctgcatcactggaatgtgtttttctggccgattccggctcggttgccgtggaagttgccatgaaaatggctttgcaatactggcaggcaaaagggcagcagcagaaaagacgacaaaaattcctgacactacgtcatggttatcatggtgatactttcggcgccatgtctgtttgtgatcccgaaaactctatgcacagtctgtatcagggctatctccccaatcatttgtttgctgatgccccacaatcccgctttgatggcgaatggcagccagaagatatctcttctttccaacaattattgttacagcatcatgatgaaatcgccgccgtgattctggaacccattgttcagggagcgggtggaatgcggatctaccaccctgaatacctgcgtcaggtgcgcaacctttgtgatgaataccaaattttgctgatcgcggatgaaatcgccaccggcttcgggcgaacaggcaaactatttgcctgtgaacacgccaatatcgaaccagatattttgtgtttaggtaaggctctgacaggcggctatatgactttatccgcaacattaacgacccgccatgttgccgaaaccatcagtcagggtgaagcaggctgttttatgcatggcccgacatttatggggaatccgctggcctgtgccgttgccggagccagtctgaaattactcactgaaagcccgtggcaacaacgcattcactcaattgaatccggcttaaaagcagagttattgcctctgaaatcatataattcggttgaagacgtccgggtattgggtgccattggtgtggtggaaatgaaacaacctgttgatgtagcagcattacagcgccactttgtccaacagggagtctggatcaggccattcgggcgtttaatttatttaatgccgccttatgttattcagcctgagcagttattgaaactgacaaatgctattgctgatgcggtaatttaatcattaacggcagcattaataataatgctgccacttttatttattataaaaaataacaggccatttattagtaaaagtcaattcctgataaatattggcaatcaattaaatgcattctttctcatctaaagaaaatatttttgttatattccactcagtcttatttactttaatcagagaggaatacactatgaatcaggaaaaattgtccgtaccttctaatgaagaaatggaagctatatttaaacaatctcaggatatttatgaacaagaacaattacattatgaggctatagcaaaagaaaagcctgaacttgctaatttgtttgggggaattcctgtaataaacccaccaatttatcctattcctgtcattaaaacggcagagtatgttagcggatattttaatattaacacctatcatcaaattggaagctatccattcattcaggtatcatcttatcctgttttaattggcaacaatccacatacaagaagaaatgctaatttcaacggatatatttatggcagctataacatgccacaaataaatcttaacaatctttatcttagcggagtagttcatcacaccaatacaatcataaacacaccacttaattttcagctttttatttacccacaaaaaattcacctgcgtttatttaaaggaaatgtttatttaggtgatttaatttctgtatatcagcataatatattggttacataccctatcgttttctccgggattggaacttttaatttcgtctaaaataatttttaaatccagatttactttttctgcatattacagaaaaatgattaatggccgcgctaaaaatctgcgcggctttttatttatagtgccagtaccgttacccacattgggcctttaccaaccggataacgcgccaactgagtaagttttccggtgtatttatcaataccggatacggaaatatgatctgatttttgtccagaggcaattaagaaacgcccgctgtgatcgatagcaaaaccacggggctggctttctgttgggtaatgccctgccaatgtcagatgataaccatcttctgacacaataaagtgactgataacactctcagagcgctcgctggtataaagatggcggccatcaggtgtaatgtgaatatccgcagaccagcgaacagctgagaaatcagcaggtaacgaatcaattgactgcacaatccgatatttttcccatttgcgcagtacatcaacggttgaatcgagttcattgatgcaataaatggcctctttctcagggtggaaagccatatgacgtgggccagctccggcttttgtcgtcatttcatcagcacgacgttctgtcagatatccgtgatcattcagatcaaaaatacggatgtgaacttccttcaggcatggaaccagtaactgacggttttcccgatcaatattggcggaatgtggcgctttcagtccttctacgacttgaatgggcgccttagcaatgccatcttcatcaataggatggacacttaagttattgaagctataggaagcagaaaataaaaaacgccctgctctatccgttgagatatgtgtcggacttcccggcaacggggcaatagattgctgctccaatcgtccgtcagtactgatttcataagttatgatgctgaactgagggcgtatcccaacatataaatgctttccatcaggatggatgaccattggctgtacttcgcccggcacactgactgtctgaagcagtgaaagttctccgacaatattcagggaccagacgtggatctgacgactattcggactcgctgtataaactacttgtttcattttctctccttaaagctccatcactattttattgatctgcaatgattcctgaaaatatatgtctgttaaacttataattatcagtttaactgtttttcattaacatataatgtttgttcaaatcatcaacagtctagaggctaattcatgtcataccgcgttatcgcactggatctggatggaacgctgctcgatccacaaaaaaatattctgccagaatcgctcgcggctctaaatgaagcccgtcaagcgggtattaaggttttgatcgccaccggccgccatcatgttgccatccatccgttctatcaggcgcttaagctcgacactccggcgatttgctgtaacggggcttattcatatgattatcaggctaaaaaggttctggacgctaatcctctctctattcaggaagcctctcaagtactttcttatttacagggcactgaaattgatcatctgatgtatgttgatgatgctattttatatgaatctccacataccgttacccgaacccttgcatggtcagattctctgcctgagcatcagcgccctactctcctgcatatcaacaactttcaggaagcactgaataatgtcaatttcatctggaaacttgccactacgtcccctgatttggcgaaattacgtgaggtcagtgagcagatcagggaagaagtcgatctggagtgtgaatggtcatggtttgatcaggtcgatatcgccaaaaagggcaatagtaaagggctgcgtttacagcaatgggttgaatcacaagggatgagtatgaaagatgttattgcttttggcgataattttaatgacatcagtatgctggaatccgcaggtttgggggttgcaatgggaaatgccgttgatgatgtcaaagcgcgggcagatcttgttaccaaagataatgttcagcccggtattggcgaagttatccgaaaatatgtgctgtaatttgtttcacttaatgaaggagcataagccacccgtgctccttccattccactaatattcaagttataagtgccgatttaacgcaatacttttaatttgcgcata

SEQ ID NO: 1183 - DNA, 6329 bp, Xenorhabdus sp.
  CDS (1069)..(2055)
tatgcgcaaattaaaagtattgcgttaaatcggcacttataacttgaatattagtggaatggaaggagcacgggtggcttatgctccttcattaagtgaaacaaattacagcacatattttcggataacttcgccaataccgggctgaacattatctttggtaacaagatctgcccgcgctttgacatcatcaacggcatttcccattgcaacccccaaacctgcggattccagcatactgatgtcattaaaattatcgccaaaagcaataacatctttcatactcatcccttgtgattcaacccattgctgtaaacgcagccctttactattgccctttttggcgatatcgacctgatcaaaccatgaccattcacactccagatcgacttcttccctgatctgctcactgacctcacgtaatttcgccaaatcaggggacgtagtggcaagtttccagatgaaattgacattattcagtgcttcctgaaagttgttgatatgcaggagagtagggcgctgatgctcaggcagagaatctgaccatgcaagggttcgggtaacggtatgtggagattcatataaaatagcatcatcaacatacatcagatgatcaatttcagtgccctgtaaataagaaagtacttgagaggcttcctgaatagagagaggattagcgtccagaacctttttagcctgataatcatatgaataagccccgttacagcaaatcgccggagtgtcgagcttaagcgcctgatagaacggatggatggcaacatgatggcggccggtggcgatcaaaaccttaatacccgcttgacgggcttcatttagagccgcgagcgattctggcagaatatttttttgtggatcgagcagcgttccatccagatccagtgcgataacgcggtatgacatgaattagcctctagactgttgatgatttgaacaaacattatatgttaatgaaaaacagttaaactgataattataagtttaacagacatatattttcaggaatcattgcagatcaataaaatagtgatggagctttaaggagagaaaatgaaacaagtagtttatacagcgagtccgaatagtcgtcagatccacgtctggtccctgaatattgtcggagaactttcactgcttcagacagtcagtgtgccgggcgaagtacagccaatggtcatccatcctgatggaaagcatttatatgttgggatacgccctcagttcagcatcataacttatgaaatcagtactgacggacgattggagcagcaatctattgccccgttgccgggaagtccgacacatatctcaacggatagagcagggcgttttttattttctgcttcctatagcttcaataacttaagtgtccatcctattgatgaagatggcattgctaaggcgcccattcaagtcgtagaaggactgaaagcgccacattccgccaatattgatcgggaaaaccgtcagttactggttccatgcctgaaggaagttcacatccgtatttttgatctgaatgatcacggatatctgacagaacgtcgtgctgatgaaatgacgacaaaagccggagctggcccacgtcatatggctttccaccctgagaaagaggccatttattgcatcaatgaactcgattcaaccgttgatgtactgcgcaaatgggaaaaatatcggattgtgcagtcaattgattcgttacctgctgatttctcagctgttcgctggtctgcggatattcacattacacctgatggccgccatctttataccagcgagcgctctgagagtgttatcagtcactttattgtgtcagaagatggttatcatctgacattggcagggcattacccaacagaaagccagccccgtggttttgctatcgatcacagcgggcgtttcttaattgcctctggacaaaaatcagatcatatttccgtatccggtattgataaatacaccggaaaacttactcagttggcgcgttatccggttggtaaaggcccaatgtgggtaacggtactggcactataaataaaaagccgcgcagatttttagcgcggccattaatcatttttctgtaatatgcagaaaaagtaaatctggatttaaaaattattttagacgaaattaaaagttccaatcccggagaaaacgatagggtatgtaaccaatatattatgctgatatacagaaattaaatcacctaaataaacatttcctttaaataaacgcaggtgaattttttgtgggtaaataaaaagctgaaaattaagtggtgtgtttatgattgtattggtgtgatgaactactccgctaagataaagattgttaagatttatttgtggcatgttatagctgccataaatatatccgttgaaattagcatttcttcttgtatgtggattgttgccaattaaaacaggataagatgatacctgaatgaatggatagcttccaatttgatgataggtgttaatattaaaatatccgctaacatactctgccgttttaatgacaggaataggataaattggtgggtttattacaggaattcccccaaacaaattagcaagttcaggcttttcttttgctatagcctcataatgtaattgttcttgttcataaatatcctgagattgtttaaatatagcttccatttcttcattagaaggtacggacaatttttcctgattcatagtgtattcctctctgattaaagtaaataagactgagtggaatataacaaaaatattttctttagatgagaaagaatgcatttaattgattgccaatatttatcaggaattgacttttactaataaatggcctgttattttttataataaataaaagtggcagcattattattaatgctgccgttaatgattaaattaccgcatcagcaatagcatttgtcagtttcaataactgctcaggctgaataacataaggcggcattaaataaattaaacgcccgaatggcctgatccagactccctgttggacaaagtggcgctgtaatgctgctacatcaacaggttgtttcatttccaccacaccaatggcacccaatacccggacgtcttcaaccgaattatatgatttcagaggcaataactctgcttttaagccggattcaattgagtgaatgcgttgttgccacgggctttcagtgagtaatttcagactggctccggcaacggcacaggccagcggattccccataaatgtcgggccatgcataaaacagcctgcttcaccctgactgatggtttcggcaacatggcgggtcgttaatgttgcggataaagtcatatagccgcctgtcagagccttacctaaacacaaaatatctggttcgatattggcgtgttcacaggcaaatagtttgcctgttcgcccgaagccggtggcgatttcatccgcgatcagcaaaatttggtattcatcacaaaggttgcgcacctgacgcaggtattcagggtggtagatccgcattccacccgctccctgaacaatgggttccagaatcacggcggcgatttcatcatgatgctgtaacaataattgttggaaagaagagatatcttctggctgccattcgccatcaaagcgggattgtggggcatcagcaaacaaatgattggggagatagccctgatacagactgtgcatagagttttcgggatcacaaacagacatggcgccgaaagtatcaccatgataaccatgacgtagtgtcaggaatttttgtcgtcttttctgctgctgcccttttgcctgccagtattgcaaagccattttcatggcaacttccacggcaaccgagccggaatcggccagaaaaacacattccagtgatgcaggcgtcattgctaccagttgtttacacaattctactgctggtggatgagtaatgccgccaaacatcacatgcgacattttatcaatttgcgattttgcggcttcattaagtacgggatgattgtagccgtgaattgccgcccaccatgaagacataccgtcaattaatttacgcccatctgacaataccaattcaacaccactggcagaatcgaccggataagtcggtagtgggttgctcatggaagtatatggatgccagatgtgtcgcaggtcaaagtcaatatctgaaggattcataataaattagttgtaaacctttttgatctagttttggttgacatgatagcggcgttatttaaactgacaacttttatttcatgttttatttcatgttggagaagttattgtgagtgagcgtcagcaatggacaattaagcaggctcagtccctgtttgatatgcctttttttgaattactgtttcaggcacagcaagtacatcgcgaacattttgatccgcaacaggtacaggtcagtacacttctttcaataaaaacaggagcctgccctgaagactgtaaatattgcccacagagctcccgttacaaaacaggtctggaaaaagaacgcctgatggaagtggagaaagttatcgaatcagctcgtaaggctaaaaatgcaggttcgacccgtttttgcatgggtgccgcatggaaaaatccacacgaacgggatatgccttatctggaaaaaatggttcaggaagttaagtcattgggcatggaaacctgcatgacactgggaatgctgaatccgtctcaggcacagcgtctggcagaagcaggtctggattactacaaccataatctggatacctcaccggaattttacggcaatattattactacgcgcagttatcaggacaggctggatacactggaaaatgtcagggatgcaggtattaaagtgtgctctggcggtattgtaggactgggtgaagaaattcgtgaccgtgcagctctgttagtgcaactggcaaacctgcccaaaccaccggaaagcgttccgattaatatgctggtgaaagtgaaaggaacaccgctggaaaataatgaagaagtcgatccatttgattttatccgtactatcgctgtagctcgtattatgatgccgaaatctcatgtccgtttatctgcggggcgcgagcagatgaatgagcagacacaggccatgtgttttatggcaggcgctaactccattttttatggctgcaaattactgactaccccgaacccgggcgaagacaaagacttgcaactgttccgtagactgggcattaaccctcagcagacaaaaatagcatttggtgacaaacagcagcagcaacacctgacggaagccatcattaataatgctgacaatgaacaattctataatgcggcaatatgatgagctggtcagattctctttcccggcgattggccgaacgccggggcacatcgttatggcgccgcagacaggctcatcaaagttcaaatggacgacatctctacacctctgatgggcaacaatatctgaacttttccagtaatgattatctcggattgagccagcatcctgaggttattgctgcgtggcaacaaggcgctgagcaatacggtgttggtagtggcggctcagggcatgtaaccggatatacctcggctcaccatgcgctagagcaacaactggcggagtggcttggttattcccgtgccttgctgtttatttctggctattcggctaatcagggcgtgatagcggctctaatggaaaaagaggatcgcattattgctgatcgcctgaaccacgcctccctgatggaggcggctatgcattcaccggctcagtttcggcgttttttgcacaataacccgatttcgctaaaacagcatttaggcaaagcatgtgcaggtaaaacactggtggtgacagaaggtgtttttagcatggatggagacagcgcaccactcagtgaaattacccggctggcacaatctacaggtagctggctgatggtggatgatgcccacggtattggtatttatggtgatgaggggagagggagctgctggttacagaatgttaagccggagatcttaatcgttacttgtggtaaggcatttggtttgagcggggctgcggtattgtgtgatgaacagaccgcagaatactttgttcaatattcccgacacctgatttatagcacttctatgccaccggctcaggcagttgcactttccgaggccacgcgccagattagggcaggagatgaattgcgccagcgtctgcaaaataatatccagtattttcgtcgtgaagcacaaaacttatctttttctctgacggattctgaaaccgctattcagcctgtgatcatcggtaataatgaacgctgcat

SEQ ID NO: 1184 - DNA, 6329 bp, Xenorhabdus sp.; identical to SEQ ID NO: 1183
  CDS (4295)..(5338)

SEQ ID NO: 1185 - DNA, 6329 bp, Xenorhabdus sp.; identical to SEQ ID NO: 1183
  CDS (5698)..(6327)

SEQ ID NO: 1186 - DNA, 6329 bp, Xenorhabdus sp.; identical to SEQ ID NO: 1182
  CDS (5409)..(6224)

SEQ ID NO: 1187 - DNA, 6329 bp, Xenorhabdus sp.; identical to SEQ ID NO: 1182
  CDS (2142)..(3419)

SEQ ID NO: 1188 - DNA, 5537 bp, Xenorhabdus sp.; identical to SEQ ID NO: 375
  CDS (3449)..(4036)

SEQ ID NO: 1189 - DNA, 5537 bp, Xenorhabdus sp.; identical to SEQ ID NO: 375
  CDS (222)..(719)

SEQ ID NO: 1190 - DNA, 5537 bp, Xenorhabdus sp.; identical to SEQ ID NO: 375
  CDS (753)..(2297)

SEQ ID NO: 1191 - DNA, 5537 bp, Xenorhabdus sp.; identical to SEQ ID NO: 375
  CDS (2681)..(2908)

SEQ ID NO: 1192 - DNA, 5537 bp, Xenorhabdus sp.; identical to SEQ ID NO: 375
  CDS (4059)..(5537)

SEQ ID NO: 1193 - DNA, 5194 bp, Xenorhabdus sp.; identical to SEQ ID NO: 376
  CDS (4292)..(5155)

SEQ ID NO: 1194 - DNA, 5194 bp, Xenorhabdus sp.; identical to SEQ ID NO: 376
  CDS (8)..(244)

SEQ ID NO: 1195 - DNA, 5194 bp, Xenorhabdus sp.; identical to SEQ ID NO: 376
  CDS (2121)..(2516)

SEQ ID NO: 1196 - DNA, 5194 bp, Xenorhabdus sp.
  CDS (1749)..(2642)
tgatattagaaccaacataaaatgtgctaaatgtgactttccatatggcaatgaataaaggaaaatataagttcgattatatttattttggccttttttcaaagtagagcttccactaaggctgacaaaatcagataaccccagcgggctatcaaaactcgtgtttactcttcctacccattttcctgtatttttttgcccataattatctgttgttaaagaaactttccacggagaactatgtttattattcagaaaaacaatagatcccccattaattgtaccaggcaaaatatctagcgttgttttatttgattgtaaacgatttgcctgatctagcccttggtcaagttgatgtatattcaatggcatattctttagatcaggaaaaagagtctgactgtttacccagagacttcctcccctaatatcttcgataaacccttctataacatgaatccctaattttttctcatagtcaggaggaaccaattttactctggctgtaacatatcctttttggacataaaggttcgtaatttcagatgttaatctattgatattattactggtaatacagctattagaaattggacttaatgtttttaagtccgatgatgataataatgatatcccttgaagataaatcccactaattggcaagcattttttctcacctttcagatttacgagtgattcttttgtagaatatcgccttgaacggttaatcatctcctgatgccgcctttcttcaatcaacctgtttatctctctttcgctattctgtaaattattaatcccttcgttcatggttaatgaaggtaagttttcattaaaatttaccggagatgctattgttaaaggaacatataatattaataatattcctatgttttttataatcataaaacaccaatcataaaattttcattaacatagtaattcaatattttcagtgagattaattaatatcaaattatcactcacatattgccatatccctacagtcagaatacaaacacttcataaacatgagcaaaaaataaacaccgccaagtcatttaataaaatcacattcacaagatgtttcatcatcaccatatgaaatataaaaataaaaaatgaattatttttagtcatatatccaaatgaataaaccgatattttttatagaaaataataaaaataacttctctactgtatttaactggtcaaaatatgtaacttgtagtttagccttgataatataatttcttaaattacatataattattgcattaatatctaaaaaccaaacacttgtttgaaaagaacaaaaaccatcacaacccattgatataaatatactttatacaggataaaatatagtttacattataaatcttttcattatcctaaacaccaaagctttatcagaataatattttagatatagatcacattattgatcataaaaaacctttattaaacttacgatcactttctcaaaaatagaataaatcataagatcagtctttactgtttgatagatatacaatagaaatatagtcacaaaaaatagccaaggccacaatatgtcaaacagggaaaatcagatactgcaaatattaaagagggatccttttatacaacagcaagaaattgcagatattcttggtattagtcgttcctgtgttgcagggcatattatgaacctaagtaaaaaaggctatataaaaggtaaaggttatattcttgccagtgatgtttatgctgttactattggagcaaccaatatagatataaccagttatgcatttgataaactagtatataatgattccaacccagggaaaatcatttccacccccggtggggtaggaagaaatattgcacaaaacattgctgcattaaaaaatgaaagctatttgatttctgttgttggtaatgaccaacacggtaaaatattatcagaaaaaacaaaatcatccggtgttaatactaaatacctacataagctggatgatgaaaaaacatcagtctgtaattcatttattgatgaaaatggaaaatgtattatttcgataaatgatatgagcattcttgataaacttaatccatcattactctctcaatccaagaaattgattcagagtgccagtgtactggttattgattgtaacttatctcatgaatcattagagtggatatttcttaattccaataatgtcccgatttttgctgatacagtttctacattcaaagcatctaatatccgtcactggctaccttatattcatacactgaagcctaatcgttctgaagctgagatgttaagtggtatcaaaattgaaacactggaagatgctactctcgctgcttcttggtttcaccagcaaggtgttcaacggataattttgagtatggatgcagaaggcgtctattacagtgaactagataataaatccggttactcacgtgcattaacaaataacgttgttaatgccaatggtgctggtgacgttatgatggcagggcttgctcattgctggctggcaggaatggagttggaagacagcgttcacttttctcagcaatgttctgcttttactctatcatcagaaaatattgatatatttcctaataaattcagtcttcggtaaaaaccggtactaattttttaaataaatatccgggcgaaatatttgccaaacaaaattttcacgattaacaggtgaataacccaatttttcatataaccaatgtgcagatgaagttaccaacataactcgtcgaagtttctgaataacaggatgagattggcaacattccattagccagcttcccagatgctgtttttgatatttttccaatacataaacatcacataaatacccaaaagttgaaaagtctgtcacgaatctagcaaaccctatttgattttcctcatcatacaatccgaatgtcagactattttcaattgagcactgaacagtttcaatatcgattcctttcgcccaatgggattgggtaaggaactgatggattgctgtaacatctaacaaagatttatctgttgatacgtgataattttcttttttccaatatagctgttgtttcatattttactctattattttattgagtgtttgctttacaatatcaaattaaattatgactgcaataaaaatttattaatacccttaatcactcacctaccggtttcatgaataatataaataatgtgaaagttactaatacaatttatcgtataagtttattaaatatcatatcaagaaaaaggtatttgcactttaaatatcctttttgtgacgaccgataattggatagattgtactaagaaaattgagccagaaaatatttggtaggaaaattttttatccagcgttacaactcgtaaatcattacggcaatacaggctatctcgccggttgtcatatcacttcgtctgcctacagcggatattgctgatgataccccgtttttctcaggagcatgggttattcgtattcctttaaccactaagggaatgggtgaaaaatactgattttaatttcaagggttaactaattattaagaatcattcatttattattcgatagagataaggttattaggcttatccatttcttgataatcacgttatgggtggatagtaaaatgaaaaaatatcttcttctttccctaatcgcagggacgactctttttacttcagtgcagacctatgcttggttttgtagatctgagttggtcgacccagcagcatatgagcgctgtgtagctcaatacgacgcgttgaatcctggagaagcgggacatttgcattgtttataatcataaccacccgtataacgggtggtttgctcttgccctataagggcttgttaccgactgcgcctaaatgacgctgctttctcttcgttcaagctaagtgtctttgctgctttggcctaccccttgaaggggtctacatgctctttactactcaatttatccgagattaaatccgacttttcttgctctctgatatacttttgaattgtcgcttcatttagccctaccgtactgacatagaacccttccgcccaaaactttctgttgccaaatttatattttaaattggcgtgtctatcaaagatcatcaacgaacttttacccttcaaatatcccataaagcttgaaacgcttagctttggtggaatactcaccaacatatgaacatgatctggcatgagatgaccttcgattatttccacacctttatacttacaaaggtctctgaggatctctcccacacttgaacgaatattattaaaaatcactttccgtctatatttcggcgaaaagacgatatggtatttaaccccaattctgtttaagctgtcactggaatatcttcttcttctgagtagaaaactttcagtgatggtttcttctttttatgacaataagcaattaaccccgttaaaacagtcaacagaaacccttttatacttcgatgacgagaatgttctatttgacagatatttttcaattgcccattaaccgtctcgataataaaacgccttgataacattatcttatcccaatcttccagcacactcgctttaatattactccgctttttcgtgatgaaagtgacaccgttttgtgctaaatcgtttgccagttcctgactaagataacctttgtcgccatacaaggaaccgattaattcttttgctaattcccgaaccactttcctgtcatccgtatttccagccgtgattttgagggccagaatttcgccaagatggttaataatcaggtgggaacctctaaaaactctcaatacaaaaaataagatcaattttgaactcaccaataactgaccttattgtgtatgactttttcttgcttgttcaggggaaaaaaacaaacgcatcactttttcatcacatctcgaaattaaaaagcatgaatacccgattttccgaaataaaccaaacgttgcaaatcatagcaggttgccttcatcgtcatcgcaaaattggctcgcagctggcctatcgtccgaataattttttcacccatctgagagagtgagccaaagatatgttctacgcgtgcccgagttttcgctattttcttatttcggcctttttggcagtgtgataagggcttattacgtgccgcttttctctgaatatgcaca

SEQ ID NO: 1197 - DNA, 5466 bp, Xenorhabdus sp.; identical to SEQ ID NO: 427
  CDS (5133)..(5465)

SEQ ID NO: 1198 - DNA, 5466 bp, Xenorhabdus sp.; identical to SEQ ID NO: 427
  CDS (4283)..(4951)

SEQ ID NO: 1199 - DNA, 5466 bp, Xenorhabdus sp.; identical to SEQ ID NO: 427
  CDS (2683)..(3636)

SEQ ID NO: 1200 - DNA, 5466 bp, Xenorhabdus sp.; identical to SEQ ID NO: 427
  CDS (1995)..(2537)

SEQ ID NO: 1201 - DNA, 7386 bp, Xenorhabdus sp.; identical to SEQ ID NO: 181
  CDS (2973)..(3137)

SEQ ID NO: 1202 - DNA, 7386 bp, Xenorhabdus sp.; identical to SEQ ID NO: 181
  CDS (7262)..(7360)

SEQ ID NO: 1203 - DNA, 7386 bp, Xenorhabdus sp.
  CDS (7273)..(7386)
agccgttaatcactaacccaccgactctagtcggtggtagttgagtttattgatctctgatcaatataaatggaataacttaagtcatccatttttaatgctgacaaatcagctagtacttccactgtcaaccgatattgcccatattgatatggggatccaaaatccactaaaccaaataaattattacctgaccacccagatgaagaagttactcttgtgtgagttttttcatatactatgctttctgttaaatcatcatttattttatatatttttatatcaaaaataagctttcctttaaggttatgtatagggccgcttcctctaaatatgtcactaacatagaaccctaaattagaattttcgcgttttttaatattcaaactaattttaggtgatggagtattagcaggaataagatagagaagtttaggtttaggttgaggaaccttccaaaacaccaaatctactttttcccctttttcatacagcttaatcggagcttcgatcgcgtggtaaccaccaagtgtagttggtttaggatttaaaaaaaagtaaggatcttctgtggggggacgcatccactggattagcattacgatacccgcacctaaaaaagcagccaaagccagtaacatagtttttttcaccatatttgctctttccattcatcagaagcaaagaaaatttaggattccgtgccacagttaaattaatagctacgatctcattacatctgagaagctaagccgactaaaacctgtttcttatcaatgacaacgacttaccgtaagtacatataccgaataagatataacagaataatttatctattcaagtgtaaatagagatacctcaaaagaattgtgattaacttctcttcttaaataaaatcagttaattacatcatttaaatttcacgtaacacaatagattcaaattacactgacgcgctacgcttgtcttctatgggttacctggctaatgtattaaccagataacccatagaatctgaaaaatattattcctgccagaaaaactatttttcacaatcctaccctattaaagaattagagataagactgttcaccctgttcacttgtaaatatttttatttaaattcaattaattaaatgatgataacttgaaagcaaactcatcattagtcttcatccaacccttcaccttaaaccggaaaaaggtgaacagggttgaacacttatgaatagttctaaaataactcttcatactataatgcattgatatatctggtttaaattatagagtgaacagtggtgaatacttttttatatttatctgataactgtttttgatagaagaaatttattcttctggctgatcattccttgtcagttttggcatccactcactggccgtgtcaatattcaggttcatattgctgcgaataccgtatttgctttttttgcgtaggtaatgctgtccatactctgccagtgcgcccggcatatccatgccaaagcgggttacggaaatgggtttattcagattattacctttcatataagcaaggtaggcgtgataaaggtacttacggggattgaacggcacaatctccgcattaccgattaacaggccatcggcttcatcagatgcgagcaggtgcccgcagaaatcgactagtgggtcggtgccgcgtttaatatccaatgcttcttctgacttctgttgttcggccagtaaacgtcttgcagcttgtggttcagcgaaccgatgcagcaggtgccggataatcacaggcaattctgccgcgattttatcccgcaggagtggatcgcgttcattttctggcacgacttcggaaaagttgaaaattacccgacgccgtgacacacccccactacgatcactgaaactcatggcattattgtttactgccagcaccacagcaggaattcgggtggaatagggttgtttatgctttggatcaatggctacttcatcaccgccagtaatggctttgatgccggagccatcacccacatagcgggtctggtctggcaggataatcagtgaatatccgacaatcaacgctcgttctcgtgggttttccagtgcggccatactggcggaaacagtgtggcctttacctgccagcatcgagcagatttcagcaaagatactctttccactacctccagcaccggtgacttccagaaaaagctgccagtcatagcggttcgccagaaccataaacagggctgccagtacccgatcaaatttgttttcacagttagctgttgccttgttcaaccagcgccagaactgtggcgcataatcttgcagggtttcccccggaacgggtgaattgaattcaacatcactggcaagcaatagccaatcatgtttgcgatgaggccggaactgacagcgtttcaaatcaaacacgccgttattgaacccgattaagtggtgttttggtggttgcatcatgggaagctgcaatttcagtgcatctacggcagaactaataccatgcggtgaatacggttgtttctcttccataaaggccgcgaccatttcccgttttaaatcacggtcactgaccggacgccagacaataccatcataatgatggacggtttctgaagcaccatccagcgctaaatcaccgttataacgcgccagtaacacctctccgcgttggctggctcccatctggcataatgtcagtttcgaaggctcggtatcattggactgagtggctgattttttcttgacgggtactggttgatagagctcttgagaaaaggcctgctttgctgcattaatgccatgctgctgacgataatcatcccaatcagccttgtattccgttggtggcaacgtaatccaaccgttcactgcaagggctgctttttctgctgagatcttaccgatattgactttgggtttgccgttcttatccagttcgtcgggatgatgccagtcgttatctgctgccagaataattttcgtatcaggccagtgttcacgaacggctttagtgacagaaagcaaattgccagcatccagtgccgccagaacagtgcctttatagagcttgctaaccgtcagtgccgtggcataaccctcggtaatgattactgtgtcgggatttttttccagtactgatacagtaataaacgcgcctttcttctggctgccagacagtaattttttctcaccgtcaggtttgatgatttgtgcaccagtgacctttttatctaacgctgtcagtaccaataatagggaatcatcttccagtaaacgctgattatggtgttgtagtccctttgcagccagatagggcgatggcccagcaacagtttgagccattagtgccgcgactctttcggcaatcggctgtactggataagtgatttctttggctggtttggattctggcaaaggtaatgccagtacgttagcaacaatcttagcagcctcaagaactgagagacggttggttttcgctactaaatccaatccatcgccgtagttcggaagatcacactggcgacagtgccagttgccgtgatggtggtcatcaataaagtgaaaacggtcggtgccgccgcagacagggcaagcgctatgtttaccctttgcaggaatatcgataccacaggcaggtaacagattttcccaatggtacatagcggattgcttcacggtttggataaattcgagcggtttttggctgtctgatttatccaaagatgtaaatttagggcgagtttggttatgctgtgtatcagccattatcgttatctctcaacggttattggtcagacgccctgtatgtgttgcgagcactatggggcgttgttttatttggttactaaaattaaaatggtcattaccatgtaatttaaaatatccttgggtaattaccatgtcaacacaaaaagaaaagcgatctccccaataccaaatgagattgacggaagaatttaggcaacaacttgaagaacaagcaaaaactgatggtgatgcttcccttgctacttggatcaagcgtgtacttcgtaaagaactccaatcacgtggtattgaacccaagggttgaaccaacctatagttcatcaggaggatagctcccatgttgctatccttttgttgtttaaataataatttcaaaacttgcatatctcttaatgaaagaattatctgcattgtgaactaatgcactaaaattcaggccagtactttatcaggcacgagactcagcaattcgttgatctacccaaccatcaatttctgattcaacaaacgcaaccgaacgagggccgattttgacttgtttcgggaattgaccttctttaatcagcctgtagatccatgccttgctatagcccgttctgcgctgaacttctggcaggcgaataagactttctttagatgttgtaatcgttggcatgtataccccctgttatcgagtccttgaaatgccttggtagacgttatttgatgacagaggattatttaaaaattctgtttaattgaaagcgtaaactctttatgcaattcgtaaaattaaatgcggggatattgactgtatggaaaatagccctgcgtgccacgggcacagaagattaaaaaacaatcatatgtataatgaatgctttttattaatgaattgaaaaataaggaaatatattatttatgcagagcgtggagctttaattatttattttttgtatgaaaaatggtctttgttgtcttgggcaaaaaagtttaaaaaatcgtcttttgcgtaagttttaatcaaaagaaaggtaaggtaaattgttgacaagatcagaacataaaattcttcatagtttatgaattgcacgtaaatagtttgctggcactgccagaaaaggataaaaatcaccatatgatgatttttatactatgatggatttatccgttactctatctggcaggattctgtaggaaggtacggctaaatctgaaagtcggcgatgagcgaattatgtacactcacaccctaagaattacactttcaggtaattcagggtatgtactcactggttacgaatagtgagcgagaatcatttaatgatcgccgcttttctttcgaaccagaaaatgtagatgaattttatttctttcttgatgatagaagctgctctgctagatctgtacttacccattcttctacgatcaatttatcctcaaagcgactcaccaccatttctcgccacacgatctggcggttgcaggctgggaaccccttgtaagcccctttttgtactccgcgtagtgtcctttgccatgccactctatcgctgccctcaagaagaatttccacttctacttgtggctcaggaaacgccttacgaacttggttgatggctgcttggatgacattgtgccccccgaaatagtcttggctcgtaagatgtacaacatagtctgacgagaaaaactcgccgattgattgcatttcacctctctcaaaaaggctgtttgctgcggcttggacgattgaggaaagcgacttgctcatagttttctccattgtggattgtgaaactaccatactcagcatatgtggtctaaatcaatggaaattagccattgcgaatgaataaaaagtttgttgaatgactcagtgcataaagctggctatcagattaaagatgaaataatacaactatgggttgtataaaaagcagactttgttggcactaccaacaaagtctaaaaaatcatcttttattcagtatattagaagtattaataaatgttacttccggcgtttcttagcaaaatcatacggcgtgatatgtttttcgcggttggcatccagataatcggcccaccattgcaccatcagtcgccgttcatccagatgtttagaggtgtgaatataggcggctctgacgttttttctttccacatggcttaactggcgttcgatggcgtcatcgttccataatcctgattctcccattgcaccacgtgccattgttcggaacccatgcccgcaaacatcggttttggtgtcgtatcccatgccacgaagggcattattaaccgtgctttcactcatgaccttttgtggatcgtgatcgttagggaacatgacttcacaatcaccgctcagctcgcgtaatgatttgaacaaaacgacagcctggcgactcaacggcacaatatgctccgttttcattttcatgcctcgttcggaaaacttaacgccttcaatggattttcttgtggcagggattttccagacagtattttcaaggtcgagttcttcccaacgggcaaatctcaattcactggaacggacaaatgttaataaagtcagttccaccgcgatacgggtgattaagcgtccacgatagcgagaaagtcggcttaaaaattcaggtaaacgttcgtggggaagggcggggtgatgttgagatttaacagtggaaagtgcgccagccatatcattagctgggttgaattcaaggatatcattttggacagcataacgcatgatggaagtgatacgttgctgtaatcgctgggcaatatcatgttttccatcagcatcaacggttttgatcggcgctaaaagttggcttgtccgtaaagtggaaatatcaagcctgccaatatgcgggaatatataatgttcaaggctgcgtagaatgcggttgccgtgatcttcgctccagcgtttgttgctggcgtgccagtcacgggcgactttttcaaaggtatgttttccttttgctccagcatgtgcgtcttttttctcggctttgggatcaataccttgagcaattagcttttttgcttcatctcgtttggtgcgagcatcagctaaagagatggcaggatagacaccgaaagccagtcggtcttcttttttatcagtggggcggtagtacttcatacgccagtacttcgagccgcgtgtcgtgacttctaaatagagaccaccaccatcggcgagtttgtaggttttttctttgggctattgctgtttcgatttgtcgtgcgtttagtttcattataaggggcacatttaaaatagaagtgtaggtgcccctgattatgccccgccgtgcatattgattgggatagactagagtagacctaaaaataaaaggccgtgttgattaatcaggtctttctaggagttagtttcctagtgtacacgttagtgaatttatatttggtgcgcagggcgggacttgaacccgctcagctttacagccgagggattttacattctttgtgtcaaccgatttcaccacatgggctaaatttgaaggcgcgtcccggagtcgaacccaggttgacggatttgctatccggtgcatggcctgtctagccacgcgttcagcttta

SEQ ID NO: 1204 - DNA, 7208 bp, Xenorhabdus sp.
  CDS (1492)..(1926)
  unsure (1)..(7208): unsure at all n locations
tcgcactcagttaaatgcaatcaaaaaatttgaatatttcaatatgctgcttatgcgtacagaagtgagccagttcagagaggaaatttagtggtgaattttttgaaaaaaataacgatgaccgttcttcaatataaaatttggtgcgcatgattcagaaggaaaaattagactctaaacaggtaaaacggcctgttttttttgttactctttcttacaaatggaaatggttttgttacaaataaaaacacctcagaggggaatctgaggtgccttagatttaacttcacgtgcattttacgtgcactttgaagtccctttactgtcatgacagtgacctaccaactttgctaactgcctgtttttcaagttgttgtcctaacactgtcctaccaaatttggtggagctggcgggagttgaacccgcgtccgaaattcctacatcctcggtactacatgcttagtctaatctttacattcgcttgccagctgcggacagacacgccactaacaaactagcctgattaagtttaacgcttcaaccccaggcaaggcatccacgcgatctcttttgggtttgacctctcttgatccccgtcctaagagcggaggctagggagagagggctctgcgcaggttattaagctgccagtgcgtagttttcgtcgtttgcgactattgttttgcggctttttacgaggccaaccgcccctcggcatgcaccttgggtttcgcgaatcccgtcgaatccagaatcagccccaagtatgttaaacgcaagtatatcagaatattgagcagtaatgctagtgattaacgcccagcattcttcataatgggcgctttgtctaatttccactcacgctctttaatatctgaacgtttatcgtgcgcttttttacctttggcaacgccgattttgattttacaccaagcgtttttccaataaagggnaaaggggcganncgatagtataaacccccttcacgattggnatgcggncncnngtatagggggnaanntcaagnnttcggcggttttgggtttaaggntaaccagttntttaccgntggaccccgtgtaggatcacagaccacatgggaagaggcgacatttaatggtgtaattgtggcaccaaaaagataagcatcaccatttttaagcaaaacgtaactttcactgatgtttgccttgccagcgcgcactgatttgacttcccaaccttgtagcgataagccagcttcgaattcttcttcaataaagaattcgtggcgagctcgcttattcatggcaattgttgccgaaccgggtttgtgtgcttttttctttgtcataatgcgttgtattatactgtaagcgctaatgaaagaaatctcttctgtatgatatttagtgataactgcatatttattgcgctaaagatcatcaggtttttatttaaccacattaaagtgatattattcggcgctgttatgttttacaggaaatgatatgccacagattaatcgctctgcgttagttccatacagcgtggaacaaatgtataaattggtcaatgatgtgaaatcttacccggattttttgccgggatgtgtcggcagccgcgttataagtagtcatggtaatgaaatgacggcttctgttgatgtctccaaagctgggatcagtaagacgtttataacgcggaatacgttatctgacaatcaaagcatcagtatgcagttggttgatggccccttccgtaaactcatgggtggatggcacttcattccacttagcgaaaatgcctgtaaggttgaattacatctcgattttgaattcactaataagttgattgagctcgcttttggtaaagtatttaaggaactggccggtaatatggttcatgcttttacccaacgtgcgcgagaggtttatagtgtctgaaatcaatattgaagtcatttatgctttaccagaacggcaatatctgcgtaatgttaaattgcctcagggagccactgtcgaacaggcaattatggcatcggggcttttagagttacgtagcgacattgatttggctaagaataaaatcggcatttatagccgtccggctaaattggcagatactttggaagaaggggatcgtgttgaaatttaccgtcctcttattgctgatccgaaagaaatgcgtcgtaaacgcgcagaacgtgcaaaaaatagtactcagtagatatctgcttgatatttactcgccagaaattaattcactggcgagtaaataaaatctcgaaccttacccatttttcggcaaagatttctcatttttgatatcggttaaaacaccattactatcaaatgtgagtgtcagtgtttcttgttttactttctcgtgcccgggttgctgacggaatatgtaataccatgtctggctaccaaatgggtctgtcagcataggtgttcccaaagtgtaagtaacctgctgttgagtcattcctttatggatttttgatactgcatccggtgtcaggtaattcccctgatttatatcaggacgataaataactcgctcaaacatagagcaacccgcagtcagcataactagagatatagttgcggcagtcaacaatttacagcgcatagtaatcacattcctttaggagttaggctgtcgatgataataaacattatagagtttgaaaacctctatgctatttgtctatagctttaattttgaaatcggtaagatatatgacttcaattatacaaaaaagttgtagtaagttatgcggctaagagttccttcgcgttagccagcgtattttttgtcacttcactgcctgcgagaagtcgggcaagctcctgcaaccgagcttttctatctaacagctgcatttgggtttctgtttcttctccatcagtctgtttactgacataaaaatgctgatgaccacatcctgcaacctgcggtaaatgcgtaacacacataacctgcgttgattcgcccaattcccggagaagccgccctacgatcattgctgtcgggccactgataccaacatcaacttcgtcaaagattagtgcaggcgtttccatttttttggcagtaattacctgaatagcaagagcaatgcgggaaagctcaccacctgaagccacttttgccagtgattggtgaggttgcccgggattagttgtgacattaaattctaccttactggcgccatcaagatttaaatgctcaggctcgaaaataacatcaatggtgaatcggccgtgaggcatagaaagttgatgcatgctgttggtgataagctgacttaattcgatagcgtattgctggcgaatttggtggagcttttcagcaacactgagcgcttgttgatagtgtacgctgacgagttcactgaggtgagcacaatcatcttcctgctgtgaaagctggtgctgttcttccaataactgttgatgtaaggcgggtagctcttcgggagaaacataatgtttacgggcgatactgatttgctgtgagattttttgttccagctcaaacaggcgattagggtctaattccagttgatcgctgtaatgacgtagctcatcactcacttcacttatctgaatagaggcttcttccagcatattcagtaacccgctgagtttatgatccatgctggcgagttcagtcagttcatttcgtgcgtaatttagcaggctaacgatattttgttcatcattgtcacttaaaacctgaaggatatcctgactgccagacaaaaactgaccgcagtttgccagacgtttatattcgctatcctgttcctgatattcgccagcctgaggtgccaattcattcagttctttcaggtggtattccagtagctgttgccgtgaacggcgctcaagagcctgctgttggaattgggcaagatcctgacagctttgcctccattgctgatatgcctgcttcatttcattttttagtgtgaattcaccggcgtaagtatccagcaagtgtctttgatggcggttttctaaaagcagctgatgggcatgttgaccatggatctgaatcagatgtgaacccaattcacgcagctgagaaagagggacggcggtaccattgataaaaccacgggagcgcccgtctgcggtaatagtacgccgtagcaggcactcattatcatcatcaaaactgccatcgagctggtgtgtttctagccatttacgggcagaaggtgtatctgccagcgaaaaccgggcacagatgtcagtacggggagcaccagctcgaaccatattcgcttctccacgattaccgagacataaacccagcgcatcaattgcgattgatttacccgctccggtttctccggtgatggtcgtcattcctgagcgaaaatcgatttcaagttcgcgaacaatggcaaaattactgatggtcaattgagctaacatcgtgcctctcctacctttttctatacttaaaactatgtttctgtatataagtccatgttcctgtgcataaaaacatgtctgttcttttgcacagtataaactggttttttatacagtaaagtagggaggcatcttttttttagaacattttttttgaccagcctaacttggtactcagtgtattgaaataattgtaatctttcggatggattaaatgcaggttatattcactacgcttaatgataacttcttcaccatcctgaatcggtagtacaatctggctgtcacaactgacttcgtaatcattgctgttttgggaaaactttagacgaatgctactttcgctgctgaccacaagaggacgggcagagagtgtatgtggaaacatcggcactaatacaatagcattcagattcggtgtcagtattggcccgccggctgacagagaataggcggtagagccggttggtgtcgctataatgaggccatctgaacgctgcgaaaaggcaaaacgttcatcaatataaacctcaaaatcgatcatatgggcgactttgcccggatgcaggacaacttcattcagtgctgtactgcgccgcggtttctggcctttttttgtgacctgcgcttccagtagaaatcgcttttcatcccgatattctccattgagaacctcagaaagcatgttgcagggcgttatccggatctaaatctgttagaaagcctaaattaccgcggttaatgccaataactttaatatcataacgggacagtactctggcggctcccagcatgttaccgtcaccgccaactacgatcactaaatcggcggttttgccgatttcagttaaacctccggtttgtgcgtcttttaaattaatatcttttgcaacttgtctgtcctcaatgacgcaataacctttagataccagccagtgataaagcatttcatgagtggccagtgcttcagggtgacgtggacgcccgacaataccgatgcatttgaattcattattcattgctgttatttcctgcagcatatggttttgccctcacaatatgatgtgttcccttgaatccctcgttttgatccccataataagcgagagttgcgaatataatacaaaatacgcggagatattcatgagtagtaaagaccaaaaagtacctgacgagcaagtctcagaaaatacagaaaatgtatttgagcaacaaatggatgcagaaaaggcagacgcgccagagactgaaagcattgttgacccgcgtgttgccgagttggaagaagaactgaaacaggctcagtctcgtgaacgtgatgcgattctgcgggctcgtgctgaagtagacaacattcgtcgtcgtgctgagcaggatgtggagaaagcacataaatttgcactggaaagattttctaatgagcttctgccagtaattgataatctggaacgtgctctggaagcagcagatcggaccaatgagactttggttccaatgattgaaggtattgaattaaccctgaaatcatttattgatgcagtgggtaaatttggtattgaagttgttggtgatatcaatgttcctttcaatccggaagtgcatcaggcgatgactatgatggagtctgatcagcatgaaccaaatcatgtaatgttggttatgcagaaaggttatactctgaatggacgtctgctgcgtcctgcaatggttgctgtttctaaataagagatacagtttccattatttaatgccgccgttttaagcggcatttttgtaggtataaaataattactcaggaagtaccggattccagtcaattgatgctaacccttgggcttcaaggaggtggttagcttgcgagaagtgcttgcaccccaaaaaaccgcgatgtgctgataaaggagaaggatgtggtgctttcaggacatgatggcgctgggtatcaataatacggccttttttctgagcatgagcaccccagagcaggaaaataacaccacttcggtgttcattgatcgcagcaatgaccttatcggtgaaagtctcccagcccagatttgcatgagagtgagcattaccccgttcaactgttaacactgtattcagtaataaaaccccttgttttgcccagctaagcaggcagccgtgattgggacgctgaaatcctgcaatatcagattccagttctttgtacatattaacgagtgaaggtggagcgggaatgcccggctgtactgaaaaagccaggccatgagcctgattcgggccgtgataagggtcttgtcccaggatcacgactttcacatcagccagttcggtatagcggaaagcgttgaaaacatcctgttgtggcggataaatggttttacctgctttacgttcgttggcgacatacgtcaatgtatcagtaaagtaaggctgtgctttttcattgccgatgacatcatgccatgtaaggggagcggacatagcgggttccgttttaaataaaagattaccagatagggttaagcttaccgattcccttagcatagggaaagctttcatctaataagttcctatacctctctctcttttaaatagtcttctcgtttgctgcattgactcactttagccacatctaactactatagttgtgtatgcttcagaaggtgcttccttactactttgatgcaaattgaaatgccttaattatataaaagttaacacgcctgattgttaaataaaaattaaaattgatataaaaatgtaaatcattctgcccatagatg

SEQ ID NO: 1205 - DNA, 7208 bp, Xenorhabdus sp.; identical to SEQ ID NO: 1204
  CDS (1919)..(2212)
  unsure (1)..(7208): unsure at all n locations

SEQ ID NO: 1206 - DNA, 7208 bp, Xenorhabdus sp.; identical to SEQ ID NO: 1204
  CDS (5581)..(6162)
  unsure (1)..(7208): unsure at all n locations

SEQ ID NO: 1207 - DNA, 7208 bp, Xenorhabdus sp.
  CDS (5875)..(6186)
  unsure (1)..(7208): unsure at all n locations
catctatgggcagaatgatttacatttttatatcaattttaatttttatttaacaatcaggcgtgttaacttttatataattaaggcatttcaatttgcatcaaagtagtaaggaagcaccttctgaagcatacacaactatagtagttagatgtggctaaagtgagtcaatgcagcaaacgagaagactatttaaaagagagagaggtataggaacttattagatgaaagctttccctatgctaagggaatcggtaagcttaaccctatctggtaatcttttatttaaaacggaacccgctatgtccgctccccttacatggcatgatgtcatcggcaatgaaaaagcacagccttactttactgatacattgacgtatgtcgccaacgaacgtaaagcaggtaaaaccatttatccgccacaacaggatgttttcaacgctttccgctataccgaactggctgatgtgaaagtcgtgatcctgggacaagacccttatcacggcccgaatcaggctcatggcctggctttttcagtacagccgggcattcccgctccaccttcactcgttaatatgtacaaagaactggaatctgatattgcaggatttcagcgtcccaatcacggctgcctgcttagctgggcaaaacaaggggttttattactgaatacagtgttaacagttgaacggggtaatgctcactctcatgcaaatctgggctgggagactttcaccgataaggtcattgctgcgatcaatgaacaccgaagtggtgttattttcctgctctggggtgctcatgctcagaaaaaaggccgtattattgatacccagcgccatcatgtcctgaaagcaccacatccttctcctttatcagcacatcgcggttttttggggtgcaagcacttctcgcaagctaaccacctccttgaagcccaagggttagcatcaattgactggaatccggtacttcctgagtaattattttatacctacaaaaatgccgcttaaaacggcggcattaaataatggaaactgtatctcttatttagaaacagcaaccattgcaggacgcagcagacgtccattcagagtataacctttctgcataaccaacattacatgatttggttcatgctgatcagactccatcatagtcatcgcctgatgcacttccggattgaaaggaacattgatatcaccaacaacttcaataccaaatttacccactgcatcaataaatgatttcagggttaattcaataccttcaatcattggaaccaaagtctcattggtccgatctgctgcttccagagcacgttccagattatcaattactggcagaagctcattagaaaatctttccagtgcaaatttatgtgctttctccacatcctgctcagcacgacgacgaatgttgtctacttcagcacgagcccgcagaatcgcatcacgttcacgagactgagcctgtttcagttcttcttccaactcggcaacacgcgggtcaacaatgctttcagtctctggcgcgtctgccttttctgcatccatttgttgctcaaatacattttctgtattttctgagacttgctcgtcaggtactttttggtctttactactcatgaatatctccgcgtattttgtattatattcgcaactctcgcttattatggggatcaaaacgagggattcaagggaacacatcatattgtgagggcaaaaccatatgctgcaggaaataacagcaatgaataatgaattcaaatgcatcggtattgtcgggcgtccacgtcaccctgaagcactggccactcatgaaatgctttatcactggctggtatctaaaggttattgcgtcattgaggacagacaagttgcaaaagatattaatttaaaagacgcacaaaccggaggtttaactgaaatcggcaaaaccgccgatttagtgatcgtagttggcggtgacggtaacatgctgggagccgccagagtactgtcccgttatgatattaaagttattggcattaaccgcggtaatttaggctttctaacagatttagatccggataacgccctgcaacatgctttctgaggttctcaatggagaatatcgggatgaaaagcgatttctactggaagcgcaggtcacaaaaaaaggccagaaaccgcggcgcagtacagcactgaatgaagttgtcctgcatccgggcaaagtcgcccatatgatcgattttgaggtttatattgatgaacgttttgccttttcgcagcgttcagatggcctcattatagcgacaccaaccggctctaccgcctattctctgtcagccggcgggccaatactgacaccgaatctgaatgctattgtattagtgccgatgtttccacatacactctctgcccgtcctcttgtggtcagcagcgaaagtagcattcgtctaaagttttcccaaaacagcaatgattacgaagtcagttgtgacagccagattgtactaccgattcaggatggtgaagaagttatcattaagcgtagtgaatataacctgcatttaatccatccgaaagattacaattatttcaatacactgagtaccaagttaggctggtcaaaaaaaatgttctaaaaaaaagatgcctccctactttactgtataaaaaaccagtttatactgtgcaaaagaacagacatgtttttatgcacaggaacatggacttatatacagaaacatagttttaagtatagaaaaaggtaggagaggcacgatgttagctcaattgaccatcagtaattttgccattgttcgcgaacttgaaatcgattttcgctcaggaatgacgaccatcaccggagaaaccggagcgggtaaatcaatcgcaattgatgcgctgggtttatgtctcggtaatcgtggagaagcgaatatggttcgagctggtgctccccgtactgacatctgtgcccggttttcgctggcagatacaccttctgcccgtaaatggctagaaacacaccagctcgatggcagttttgatgatgataatgagtgcctgctacggcgtactattaccgcagacgggcgctcccgtggttttatcaatggtaccgccgtccctctttctcagctgcgtgaattgggttcacatctgattcagatccatggtcaacatgcccatcagctgcttttagaaaaccgccatcaaagacacttgctggatacttacgccggtgaattcacactaaaaaatgaaatgaagcaggcatatcagcaatggaggcaaagctgtcaggatcttgcccaattccaacagcaggctcttgagcgccgttcacggcaacagctactggaataccacctgaaagaactgaatgaattggcacctcaggctggcgaatatcaggaacaggatagcgaatataaacgtctggcaaactgcggtcagtttttgtctggcagtcaggatatccttcaggttttaagtgacaatgatgaacaaaatatcgttagcctgctaaattacgcacgaaatgaactgactgaactcgccagcatggatcataaactcagcgggttactgaatatgctggaagaagcctctattcagataagtgaagtgagtgatgagctacgtcattacagcgatcaactggaattagaccctaatcgcctgtttgagctggaacaaaaaatctcacagcaaatcagtatcgcccgtaaacattatgtttctcccgaagagctacccgccttacatcaacagttattggaagaacagcaccagctttcacagcaggaagatgattgtgctcacctcagtgaactcgtcagcgtacactatcaacaagcgctcagtgttgctgaaaagctccaccaaattcgccagcaatacgctatcgaattaagtcagcttatcaccaacagcatgcatcaactttctatgcctcacggccgattcaccattgatgttattttcgagcctgagcatttaaatcttgatggcgccagtaaggtagaatttaatgtcacaactaatcccgggcaacctcaccaatcactggcaaaagtggcttcaggtggtgagctttcccgcattgctcttgctattcaggtaattactgccaaaaaaatggaaacgcctgcactaatctttgacgaagttgatgttggtatcagtggcccgacagcaatgatcgtagggcggcttctccgggaattgggcgaatcaacgcaggttatgtgtgttacgcatttaccgcaggttgcaggatgtggtcatcagcatttttatgtcagtaaacagactgatggagaagaaacagaaacccaaatgcagctgttagatagaaaagctcggttgcaggagcttgcccgacttctcgcaggcagtgaagtgacaaaaaatacgctggctaacgcgaaggaactcttagccgcataacttactacaacttttttgtataattgaagtcatatatcttaccgatttcaaaattaaagctatagacaaatagcatagaggttttcaaactctataatgtttattatcatcgacagcctaactcctaaaggaatgtgattactatgcgctgtaaattgttgactgccgcaactatatctctagttatgctgactgcgggttgctctatgtttgagcgagttatttatcgtcctgatataaatcaggggaattacctgacaccggatgcagtatcaaaaatccataaaggaatgactcaacagcaggttacttacactttgggaacacctatgctgacagacccatttggtagccagacatggtattacatattccgtcagcaacccgggcacgagaaagtaaaacaagaaacactgacactcacatttgatagtaatggtgttttaaccgatatcaaaaatgagaaatctttgccgaaaaatgggtaaggttcgagattttatttactcgccagtgaattaatttctggcgagtaaatatcaagcagatatctactgagtactattttttgcacgttctgcgcgtttacgacgcatttctttcggatcagcaataagaggacggtaaatttcaacacgatccccttcttccaaagtatctgccaatttagccggacggctataaatgccgattttattcttagccaaatcaatgtcgctacgtaactctaaaagccccgatgccataattgcctgttcgacagtggctccctgaggcaatttaacattacgcagatattgccgttctggtaaagcataaatgacttcaatattgatttcagacactataaacctctcgcgcacgttgggtaaaagcatgaaccatattaccggccagttccttaaatactttaccaaaagcgagctcaatcaacttattagtgaattcaaaatcgagatgtaattcaaccttacaggcattttcgctaagtggaatgaagtgccatccacccatgagtttacggaaggggccatcaaccaactgcatactgatgctttgattgtcagataacgtattccgcgttataaacgtcttactgatcccagctttggagacatcaacagaagccgtcatttcattaccatgactacttataacgcggctgccgacacatcccggcaaaaaatccgggtaagatttcacatcattgaccaatttatacatttgttccacgctgtatggaactaacgcagagcgattaatctgtggcatatcatttcctgtaaaacataacagcgccgaataatatcactttaatgtggttaaataaaaacctgatgatctttagcgcaataaatatgcagttatcactaaatatcatacagaagagatttctttcattagcgcttacagtataatacaacgcattatgacaaagaaaaaagcacacaaacccggttcggcaacaattgccatgaataagcgagctcgccacgaattctttattgaagaagaattcgaagctggcttatcgctacaaggttgggaagtcaaatcagtgcgcgctggcaaggcaaacatcagtgaaagttacgttttgcttaaaaatggtgatgcttatctttttggtgccacaattacaccattaaatgtcgcctcttcccatgtggtctgtgatcctacacggggtccancggtaaanaactggttanccttaaacccaaaaccgccgaanncttgannttnccccctatacnngngnccgcatnccaatcgtgaagggggtttatactatcgnntcgcccctttnccctttattggaaaaacgcttggtgtaaaatcaaaatcggcgttgccaaaggtaaaaaagcgcacgataaacgttcagatattaaagagcgtgagtggaaattagacaaagcgcccattatgaagaatgctgggcgttaatcactagcattactgctcaatattctgatatacttgcgtttaacatacttggggctgattctggattcgacgggattcgcgaaacccaaggtgcatgccgaggggcggttggcctcgtaaaaagccgcaaaacaatagtcgcaaacgacgaaaactacgcactggcagcttaataacctgcgcagagccctctctccctagcctccgctcttaggacggggatcaagagaggtcaaacccaaaagagatcgcgtggatgccttgcctggggttgaagcgttaaacttaatcaggctagtttgttagtggcgtgtctgtccgcagctggcaagcgaatgtaaagattagactaagcatgtagtaccgaggatgtaggaatttcggacgcgggttcaactcccgccagctccaccaaatttggtaggacagtgttaggacaacaacttgaaaaacaggcagttagcaaagttggtaggtcactgtcatgacagtaaagggacttcaaagtgcacgtaaaatgcacgtgaagttaaatctaaggcacctcagattcccctctgaggtgtttttatttgtaacaaaaccatttccatttgtaagaaagagtaacaaaaaaaacaggccgttttacctgtttagagtctaatttttccttctgaatcatgcgcaccaaattttatattgaagaacggtcatcgttatttttttcaaaaaattcaccactaaatttcctctctgaactggctcacttctgtacgcataagcagcatattgaaatattcaaattttttgattgcatttaactgagtgcga

SEQ ID NO: 1208 - DNA, 7208 bp, Xenorhabdus sp.; identical to SEQ ID NO: 1207
  CDS (4589)..(4933)
  unsure (1)..(7208): unsure at all n locations

SEQ ID NO: 1209 - DNA, 7208 bp, Xenorhabdus sp.; identical to SEQ ID NO: 1207
  CDS (2772)..(4445)
  unsure (1)..(7208): unsure at all n locations

SEQ ID NO: 1210 - DNA, 7208 bp, Xenorhabdus sp.; identical to SEQ ID NO: 1207
  CDS (2228)..(2632)
  unsure (1)..(7208): unsure at all n locations

SEQ ID NO: 1211 - DNA, 7208 bp, Xenorhabdus sp.; identical to SEQ ID NO: 1207
  CDS (1753)..(2097)
  unsure (1)..(7208): unsure at all n locations

SEQ ID NO: 1212 - DNA, 7208 bp, Xenorhabdus sp.; identical to SEQ ID NO: 1207
  CDS (303)..(983)
  unsure (1)..(7208): unsure at all n locations

SEQ ID NO: 1213 - DNA, 4513 bp, Xenorhabdus sp.
  CDS (1805)..(3850)
gtgctctaaagttacccgataaacctgttgtgggtcttgatgcttttaaaaataaacaaataatattagattatatctctaattcactcacaataaaaaatagtgttaccgataaaaacaaaccaccaaaagggtttaaagaacttcctttccagagatcttccaatggaatggtttttgatgtcgagctatctggtcataaataccacatgatcctggataccggtgccaccgtatctatgatatggcgtgaaagacttaaagcttatacgccaacaagttgcctcgtggttaatccggaaatggataataaaggatgtgaagccgcaatgcttacagttaaatcagtaaccggaaaagcagaacagttcggggctgtaattgttgacggacattttcagcatatggaaaaaattgatggccttctcggaaacagctttctccgaaaccgaaaattaatcatagattttaaaaataaaaaggtctttttttccgatgagcacagaaaagcatgaaaactcaatctatcgtgccgaagctctacaacataaacaggagggatggcttggcgtatcttatctggatattccatccagcctctccatttgtattctgacaggcatgctgactgttgcttttattgtctcaatcattatattcggctcttatagcgaaagagttaacgccaccggtaatgtcatttatgaccctccggcggtatcactcattgcacaaaacaatggcataattactaattcagtcgcttcagaaaaaaaactcattaagcaaggtgaagttattttttctgtgagtgatgaaactgaaactaatctcggtgctaccaaatttgaaatagaagagagtttgaaaaaacaacagaatattctgttgaaaaaaatgaatattatcaccaccgaagctgatgaaaataaaacttactttattgagagaataaaaaataaagaacaggaaataaatggcttaaatatcctgataaaaaattcggaagaacagaggaaatggttcgaaaaaaaatccggcttatatgagcagttacgtaaaaaaggccttgcacgtgattctgaatttattgacaggaagaaggattattattcagccatagtaaatctctcgtctgcaagggtaaaaataattaccctgcaaggagagttgctggatttgaaaaataaaatatcagccactgacagggagtcggattcagcaaaaaaattaattacagctgaaatcgcaggcataaaacaaaagattctgaatatagaaaggcaaagagaatatctgattgttgcaccatttaatggaaagataaccagtgtaacagcccataaaggtgagagagtaaaaacaggccagcaagtcgccgtcatcgttcctctggctgcaaggccaaaaatcgaactgctttcttcatccgattctctcggcgaagtggctgatggacaacaggtaaagatgaggatagcagcgtatccatatcagtggtatggaaaggttgcaggagtcatcgaaacaatttcagaagccccggtcaatattcccccatcaactcagaccaatagtgaaggtaaagcacttttccgcataacggtacggccagttatgacagaacaacaaaaatcactctctcttctgccgggtatgaaagtagagacagagatatatgtaagaaccagaaagaattacgaatggctctttatgccagtgaagagggtatatgaaagaatatgtgacaacacacaataaggatacacaatataaaatcagtggctttttcgagtttttcactaaaaaactacctgtaatcatgcaaacggaggtgacagagtgcggattagcctgtttagccatgattgcaagctggcacgaacgggaaactgatgtttacagcatgaggaaaattttcgacgtatcaaacaacggcatgtcattaagacaactcatcacagtagcagatagaataaatatgaatgccagagccatacgccttgatctcggagaactcagaaacgtcaggcttccatgtattctgcactggtcctttaatcatttcgtcgtgctaaaaaaaatcacaaagaaaaacgccatcatccatgatcctgccttagggaaaaaaaccatttccctaaaagaattatcaaataaattcacaggaatagttctggaagtatggccacgatctgattttaaaaaggaaaaagtgagtgaaagtatcactatcacagatatgttccggggcgtagctaaccttaaaatcacgctgctaaaaatcattctgatatcactttttattgagggactcgctctctcaattcccctcagttctcaatttattattgatattgttttgcgatccagtgacttcgaaatgctgaatttgattgttattggcgttatttttctacttattctccgctctgcactcagtattatccgggcctggaccctgatggcgatgcgctactctttgggaatacaatggagtataggcttttttaaccagctactgagccttccgttaacattctttgaaaagcgtcacgtaggagatatagcgtcccggctgacatcactcaatgaaattaaagaagccttcaccgcagaaatgctgacttccttgcttgatgtgctcattctactaacactgataactctgatgttttgttacagcgcgcttctggctcttaattccctgctcattatctttatttatctcagcgtaaaacttgccctttataacacatacaaaagtgcccgaattgaggccattcacaatgaagcattacagtcatcacatttccttgaaaccgtgcggaatgtggcatgtgtcaaagtcttttccctgacagaaaatcggcgtatgacatggcttaataaagttatcaacacagctaatgcccgagcgcatttgttcaagatagatcttataaaccaaaccctgtcagggtttctcaccgggctctcatcagcaacaattttgttttttggtggcaaacttatggaacatggaataattacaacagggattctgtttgcttttatgctctacgctgatatgttccttacccgctctattaaagtgatcaattcacttttcaattttcgccttatatcaatacattcagatcgcctaacggacgttgcaaccgcagaaacagaggatgcttggtattcaaaaaacttaattccgcttgaggctgtagaaggtcggataacgctcaataatctctcctatcgttacggagaagctgaaccatttatttttaaagatatcaatctggaaattaatgcaggtgaaaatatcgcaattatcgggtcgtcgggttgtggtaaatccactcttctcagaataatggcgggcttagccattccccaatcaggaagtgtattgattgatggaaccagcatacgacagattggtattgacgaatatcggcgacataccgcatttgtgatgcaggaagacaaactttttgcggcctccctgatggataatatttcctcttttgatcctcagcccgaccttgaatggatgtatgagtgtgccaaagcagcagcaatccataacgaaattatagctatgccaatgcagtacgaaacaatgataggtgatatgggaagtattctttcaggaggccagaagcaacgcgtatctctggccagagcactttataagcgcccacgaatcctttttcttgatgaagcaacgagtgaccttgatgtatttaatgaacgcaagatcaataacgctataaaacagatgcccattacccgcatttttgtagcgcatcggcctgaaacgattgctgccgcggatagaatatataatctaaaagacaaaacttttacggaattttccagatccgacactgttttattctgattgtacttaagattcaaaaaaataagccccattcaacatctgtctcttgatcatatttcataggtcaagagacttggacagtaaataaccgtcaaggatggtttgtaacatgaaccatccttcccacagcctttcccatcctactcggccatttcgtttagagtcataccagcccgccagtttgcccaaattaatataggcccaataaacgcttggggctgtcttagggagttttttcttctcttgctttgtccacaataacttccacgctaacgggcttaataacgtttcacaactttgtttctccgcctctgatttattgagtcccacatagcgtaactgatgaacacgaaccgcaataaacgccaggatcaccaccattttttccagattctctttacattgcatccgtagcgcttcgacccgtgtcccgccacttttccacgctttgtgaaactcttcaatgagccaacgtttttcatagtaatccagaatacggtgggcatcttctttacaggttaccggttctgaggtcaaaatgtgccagctcagttctttatcgttattggtttcctgacaactcacataatacagggcgaccgatctttagagcac

SEQ ID NO: 1214 - DNA, 4513 bp, Xenorhabdus sp.; identical to SEQ ID NO: 1213
  CDS (496)..(1761)

SEQ ID NO: 1215 - DNA, 4753 bp, Xenorhabdus sp.
  CDS (69)..(1118)
atgggatttgtaggccgtaaagaaggtattgcctgtgaagcggtagctttactggtgaaggaataagcatgatattgagtgaattacactggctttatgggcgtccggaagccactggcgttgttaaatcgatcccggaagattttattgtgcgggaagacttaggtttttctcctgatggagaaggtgagcacttaatggtgcatatccgcaagacaggatgtaacacgcagtttgttgctgataaccttgcccgttttgccaaaataccggcacgttccgtcagttatgcgggcttaaaagatcgtaatgcggtgacagaacagtggttctgtttgcatctgccgggaaaacaggatcctgatctggctgcatttcagcttgaaggatgtgaaatattggctaccgctcgccagaaacgcaaactgcgcattggtacgctaaaaggcaatgattttacactggtattgagagacgtttctgatcgtcaggtagtagaaaaacgtttagggcagatagctcagacaggcgttcctaattattttggtgaacagcgttttgggcgtgatgggcagaatctggttcaggcgcagcgctgggcaacaaatgaaatacaggttaaagagcgtaatcgccgtagtttttacctttctgccagccgtagcgctatgtttaacgcaattaccagtatacgtatcggacgaggcgaacatcagcaagtacaaaatggcgacgcattgcagttaacggggcgtggcagctggtttgtggcggatgaatctgaactggctgtgttacagcagcgggttatggacggtgaattgcagattacggcgccattaccgggtgataaagcattgggaacgctacatcaggctctggattttgaacagcaatgtttacaggattacgaatctctttggggattggtgaaacgtgaacgtgtcgacagtgctcgcagagcgatgttagtaaaaccacttaatctgcactgggaatggctggatgaccaaacggttactcttcatttttctttgccatcgggcagctttgctaccagtgttatcagagagctgattaatcagaagcaaaacaatatggctgatatttctgagtaatgatttttgcctgagcactactctagatatttcaagttgcagctttgtcagtaagctgcaacttgaaagtcaatggaagagtactactgtgcggtatatccaccatcgacaagtaatgtcgtgccggtaataaatgatgcatcatcacttgctaagaataatacggctttcgccacctcttctggttttcctaaacgtcccagtggatgaagagaaataagctgctcttttagttcttcggggatcttgcttaatagcggagtgttgatatagccggggcagactgtattcaccctgatattatttttggcgtagtcaatcgctaaagtctggcttaataactttacaccgcctttagaggctgtataagctgtaatggcttcccggctgacaaagctatggatcgaaccacagttgacgatcaccccgcctgattcttgtttaagcatttcatggataacaaacttatcgcacagaaaaaccccggtcagatttacatcgatagttttctgccagctggcaaccgtcagtttatctgcactgttatcggcggctatccctgcattggcaaataagacatctatacgtttaaatttttcaatcgttttcgagaccatatacttaatgctctcttcgcttgtgacgtcagttttaataaaaatactttcattgccttttggatgaagttcctcagcaacttttttcccatgatctgagaaatcggcaatcacaacatgagcaccttcggcagcaaatgcttttgctgtagcttcaccaattccacttgccccgcctgtaataattaccacgctattttggaatctcatataagcctctgttatttctatttaatgtagataataactctaaagtggtattaactattctaggacaatataattacgttagtgaaaattattttcagagataatatagatattatttttacgagaggattgtttaaattatctgaaagttgatctggttattgcaattgaagttttctatattaatttttggagtgtatttcacataattaattgaaatttgtgggctgtattattatttcacactcaacggaataaagtggattttgtctaatctagttagtgttggtctcaaatgaaaatgcttttgtgagttaataaactttatattgcactgattaatggaagataatttaatgtattcatcaaaaatatcctcatcggaaaatactctttgccaagataaatctatttctcaggaaaaaacgactcagcagcaaaaagcggtttttcacatattatgtggaaaaattgcttcgggaaaatcgaccctatctgaaaagttatctcagcaaccaatgtcaattgttatgaatgaagattattggctatcaacactttatggtagtgaaataaaaaccgtggccgattatgtgtgctattcggaaaaactcagaaatgcgatggagccccatttaatctctttattgaatgccgggatttctgtcattcttgattttcctgctaatacgattgaaaatcggaaatggatgaaaaaaatcattgaggcaacagaggtcgagaactaccttcattttcttgatgttcctgatagtgtttgtctggctcgcctacatctgcgcaatcagtctggtgagcaccaattttcggtgacagacgagcaatttgcggccatcacccgcgcttttgtcgctcctcaggaagaggaagggtttaatattgtgctacatggtaataaagagataaatctctgaacaaaagtgagtgcaaccaacaaaggtacaacttaaaagatgcagagtataagtatgctcttatttaagtaaacgggatgcaaagcgctctacaaaactgcttgcgtcatgctaagatcaaacgattttctgacaaaccctgatgttgtgtaagcagagatctttaagacgcgggcagaatagcacatagggaaagttactgtattaatctatgttttaacaaataccatgtttcaacatttgccattttttaagtaaatttaagagatattttaatgcttcggatattgctgagtaatgatgatggtgttaccgccccgggtattcaaacgttagcggccaaattgcgggaacagtatcacgtgcaggttgtagcacctgatcgtaaccgtagtggtgcatcgaatgctttaactctggatcgtcctttgcgtatcagcaggctgaataatggtgatgttgcagttcaggaaggtactccgaccgattgtgtttatctgggcgtcaataaattagtccgtccacggcctgatatcgtcgtttcaggcatcaattgtggccctaatctgggggatgatgtgatttactccggaactgtggctgctgcgatggaagggcgtcatctggggttacccgctctggctgtgtcactggatggtgacaaacattacgacacagcggcggaagtcactgttcgtttattgaatatgttacagaaatcgccattgagagccggtaatattctgaatattaatgtccctgatgtgcctattgaacaaatcaaagggttcagggtgacacggtgtggctgtcgaagtgcagcggaagaagtttattctctggaagaccctaaaggcaatatgctctactggatagggccaccgggagcaaaacacgatgctggcccggaaaccgattttgctgcggtagaagaagggtttgtttccattactcctttgcaggtagatttgacagcctataaagcacaggaactggtaactgattggctgttgaaagccggggatgtcggagaatgttaagtcggttaatgaaaaatttgctgacgcagctacaccagcagggtattcataatgaactcctgctggaagtgatatccaaagtacccagagaatgttttgtcgatgaagctctggcacataaggcatatgagaatacagcattgcccatcggacacgggcagactatatctcagccatatatcgttgcccgcatgactgaattactggatttaacgcctgaatctaaagtactggagattgggacggggtctggttatcagactgcgatacttgctcatttagccgggcatgtcttttctgtagaacggattaagggattgcagtggcaggctaaacgcaggttaaagcaactcgatttacataatatctcaacccgccatggagatggctggaatgggtggccgtcaaaggggccatttcatgccatcatcgtcacagcagcacctccagaaataccacaggcattattacatcagctggcagatggcggcgtgatggtattgcctgttggtgaaagctctcagtcgctgaaagtggtacatcgctatgggaacgattttcatagtgaagtgatcgaatctgttcgtttcgtacctcttatccaaggcgaactggcataatctgctgatttatttttttaccgctatttttaaattagcagctatttttttgagataaaaaaaagtattttgccttaaatatttttatgaatcttaatttctttataaatcataatgcttgtcgcttatatttgcctttatgggggaataaggtatgaaagtaggaaacttaatgaaaaaaatacagtggataataatctatactattgcagg

SEQ ID NO: 1216 - DNA, 4753 bp, Xenorhabdus sp.; identical to SEQ ID NO: 1215
  CDS (2476)..(2880)

SEQ ID NO: 1217 - DNA, 4753 bp, Xenorhabdus sp.; identical to SEQ ID NO: 1215
  CDS (3153)..(3920)

SEQ ID NO: 1218 - DNA, 4753 bp, Xenorhabdus sp.; identical to SEQ ID NO: 1215
  CDS (4112)..(4540)

SEQ ID NO: 1219 - DNA, 4753 bp, Xenorhabdus sp.
  CDS (2809)..(3552)
cctgcaatagtatagattattatccactgtatttttttcattaagtttcctactttcataccttattcccccataaaggcaaatataagcgacaagcattatgatttataaagaaattaagattcataaaaatatttaaggcaaaatacttttttttatctcaaaaaaatagctgctaatttaaaaatagcggtaaaaaaataaatcagcagattatgccagttcgccttggataagaggtacgaaacgaacagattcgatcacttcactatgaaaatcgttcccatagcgatgtaccactttcagcgactgagagctttcaccaacaggcaataccatcacgccgccatctgccagctgatgtaataatgcctgtggtatttctggaggtgctgctgtgacgatgatggcatgaaatggcccctttgacggccacccattccagccatctccatggcgggttgagatattatgtaaatcgagttgctttaacctgcgtttagcctgccactgcaatcccttaatccgttctacagaaaagacatgcccggctaaatgagcaagtatcgcagtctgataaccagaccccgtcccaatctccagtactttagattcaggcgttaaatccagtaattcagtcatgcgggcaacgatatatggctgagatatagtctgcccgtgtccgatgggcaatgctgtattctcatatgccttatgtgccagagcttcatcgacaaaacattctctgggtactttggatatcacttccagcaggagttcattatgaataccctgctggtgtagctgcgtcagcaaatttttcattaaccgacttaacattctccgacatccccggctttcaacagccaatcagttaccagttcctgtgctttataggctgtcaaatctacctgcaaaggagtaatggaaacaaacccttcttctaccgcagcaaaatcggtttccgggccagcatcgtgttttgctcccggtggccctatccagtagagcatattgcctttagggtcttccagagaataaacttcttccgctgcacttcgacagccacaccgtgtcaccctgaaccctttgatttgttcaataggcacatcagggacattaatattcagaatattaccggctctcaatggcgatttctgtaacatattcaataaacgaacagtgacttccgccgctgtgtcgtaatgtttgtcaccatccagtgacacagccagagcgggtaaccccagatgacgcccttccatcgcagcagccacagttccggagtaaatcacatcatcccccagattagggccacaattgatgcctgaaacgacgatatcaggccgtggacggactaatttattgacgcccagataaacacaatcggtcggagtaccttcctgaactgcaacatcaccattattcagcctgctgatacgcaaaggacgatccagagttaaagcattcgatgcaccactacggttacgatcaggtgctacaacctgcacgtgatactgttcccgcaatttggccgctaacgtttgaatacccggggcggtaacaccatcatcattactcagcaatatccgaagcattaaaatatctcttaaatttacttaaaaaatggcaaatgttgaaacatggtatttgttaaaacatagattaatacagtaactttccctatgtgctattctgcccgcgtcttaaagatctctgcttacacaacatcagggtttgtcagaaaatcgtttgatcttagcatgacgcaagcagttttgtagagcgctttgcatcccgtttacttaaataagagcatacttatactctgcatcttttaagttgtacctttgttggttgcactcacttttgttcagagatttatctctttattaccatgtagcacaatattaaacccttcctcttcctgaggagcgacaaaagcgcgggtgatggccgcaaattgctcgtctgtcaccgaaaattggtgctcaccagactgattgcgcagatgtaggcgagccagacaaacactatcaggaacatcaagaaaatgaaggtagttctcgacctctgttgcctcaatgatttttttcatccatttccgattttcaatcgtattagcaggaaaatcaagaatgacagaaatcccggcattcaataaagagattaaatggggctccatcgcatttctgagtttttccgaatagcacacataatcggccacggtttttatttcactaccataaagtgttgatagccaataatcttcattcataacaattgacattggttgctgagataacttttcagatagggtcgattttcccgaagcaatttttccacataatatgtgaaaaaccgctttttgctgctgagtcgttttttcctgagaaatagatttatcttggcaaagagtattttccgatgaggatatttttgatgaatacattaaattatcttccattaatcagtgcaatataaagtttattaactcacaaaagcattttcatttgagaccaacactaactagattagacaaaatccactttattccgttgagtgtgaaataataatacagcccacaaatttcaattaattatgtgaaatacactccaaaaattaatatagaaaacttcaattgcaataaccagatcaactttcagataatttaaacaatcctctcgtaaaaataatatctatattatctctgaaaataattttcactaacgtaattatattgtcctagaatagttaataccactttagagttattatctacattaaatagaaataacagaggcttatatgagattccaaaatagcgtggtaattattacaggcggggcaagtggaattggtgaagctacagcaaaagcatttgctgccgaaggtgctcatgttgtgattgccgatttctcagatcatgggaaaaaagttgctgaggaacttcatccaaaaggcaatgaaagtatttttattaaaactgacgtcacaagcgaagagagcattaagtatatggtctcgaaaacgattgaaaaatttaaacgtatagatgtcttatttgccaatgcagggatagccgccgataacagtgcagataaactgacggttgccagctggcagaaaactatcgatgtaaatctgaccggggtttttctgtgcgataagtttgttatccatgaaatgcttaaacaagaatcaggcggggtgatcgtcaactgtggttcgatccatagctttgtcagccgggaagccattacagcttatacagcctctaaaggcggtgtaaagttattaagccagactttagcgattgactacgccaaaaataatatcagggtgaatacagtctgccccggctatatcaacactccgctattaagcaagatccccgaagaactaaaagagcagcttatttctcttcatccactgggacgtttaggaaaaccagaagaggtggcgaaagccgtattattcttagcaagtgatgatgcatcatttattaccggcacgacattacttgtcgatggtggatataccgcacagtagtactcttccattgactttcaagttgcagcttactgacaaagctgcaacttgaaatatctagagtagtgctcaggcaaaaatcattactcagaaatatcagccatattgttttgcttctgattaatcagctctctgataacactggtagcaaagctgcccgatggcaaagaaaaatgaagagtaaccgtttggtcatccagccattcccagtgcagattaagtggttttactaacatcgctctgcgagcactgtcgacacgttcacgtttcaccaatccccaaagagattcgtaatcctgtaaacattgctgttcaaaatccagagcctgatgtagcgttcccaatgctttatcacccggtaatggcgccgtaatctgcaattcaccgtccataacccgctgctgtaacacagccagttcagattcatccgccacaaaccagctgccacgccccgttaactgcaatgcgtcgccattttgtacttgctgatgttcgcctcgtccgatacgtatactggtaattgcgttaaacatagcgctacggctggcagaaaggtaaaaactacggcgattacgctctttaacctgtatttcatttgttgcccagcgctgcgcctgaaccagattctgcccatcacgcccaaaacgctgttcaccaaaataattaggaacgcctgtctgagctatctgccctaaacgtttttctactacctgacgatcagaaacgtctctcaataccagtgtaaaatcattgccttttagcgtaccaatgcgcagtttgcgtttctggcgagcggtagccaatatttcacatccttcaagctgaaatgcagccagatcaggatcctgttttcccggcagatgcaaacagaaccactgttctgtcaccgcattacgatcttttaagcccgcataactgacggaacgtgccggtattttggcaaaacgggcaaggttatcagcaacaaactgcgtgttacatcctgtcttgcggatatgcaccattaagtgctcaccttctccatcaggagaaaaacctaagtcttcccgcacaataaaatcttccgggatcgatttaacaacgccagtggcttccggacgcccataaagccagtgtaattcactcaatatcatgcttattccttcaccagtaaagctaccgcttcacaggcaataccttctttacggcctacaaatcccat

SEQ ID NO: 1220 - DNA, 468 bp, Xenorhabdus sp.
  CDS (1)..(468)
gggccatccaatatttatccggtcgtcttattgcatggtggtatgtgtaatttaacatcatttaacccattagctgaatatttggatgattattatttagtggcgatagattccagaggccatggtaaatcaacactcggtgatgtgccgcttagctatgcaagattacaatctgatgttaaagcaataattaaaggattagatattaaacattgtgccattattggccacagtgatggtggtattgttgcactgcgtttagccgtagagcaatttgctcctcttgataaagccgttgtaattggtgcaagttgggtattaacggataaagagcctgtcagagaggtttatcgaggtatcacagctgaatactggaaacaaaaatttcctcatgattatgtttattatcaacaaaataacccagttccgaactttgaacacttaattaacaccattaaaaccatgtgg

SEQ ID NO: 1221 - DNA, 3717 bp, Xenorhabdus sp.
  CDS (3029)..(3715)
cgggacgtttaccgtgatgaactgaaaatgcagataaaggttgtactgatgagaatagtctcattcagcgtaagacagggttcgttttaccctgctgtgtgaatagccggtgaataacaccgggaaactttcatcctcagacggagggttaggtgtccggggatatctgcttccaaaagtgcgcagatgtaccgcattgtaatgctctcccttgcaggctacgggagttttgacttcgccgcttcacgctgatccttgcaggcgatagatcatgagtaaccgttaaataccttataggttaggctgagtgaggtcaagtttttgtccgatattaaaatgggaaagaccgtaccattctttttcttgataaacataatgactcgtttgttcatcaccccttgatgcagctttatgagatactctacagcttggctcatccaaacttcggaccagtgtatacagccagatcatcaacaacacaataaacaacgcctcccccgtcattaaatcgtctgcggtattctgacagcctgctggattcaacagactgtggttttctgaaccggacagagcggacagtagaaagctgttttgccggtgaaccactttccaacagaagatgagaaaattcagcgcaaacatcctaacatcagggtgaatacagtcttaaattcagagtccgtcacctatcaggaacacggcttccttagactttaatctctaacggggatttatatttaatgccggttaattctggcaattcaacatattttcctgtcgtgagaaagaggcttctgcgtctcaggttgtacagatgaagacaatgctcacacatatcaaccacattcaccggatttttgattgccttgagtgtcctgactgcgtatttaccacaccggcaccgtacaacatagatagcactgtttttatggttcccccgttgtgataaagggcgaacacctaatacagtaaaaaaaccatattcataaccctgaacctgcatcagtatgttgattaaattgagttctcttttatgtaaactcaaatcatacgtcgttttgtaaggaagaaaatgactgggacgtttttgaattttctttttcttatcatttttattgctatcactcatcacttttcctgaatccatttgagaatatattaagttttttttcaatttaatccttttcattattaattcaatagcgaaaaaactaagatcaatagatagttcaaatccgaagctgtatatttccatcatcataaacggcgaagcctcgatggtttcaaccattgaggcttctataaatcgtctactaccataaacaagagagtttatatcatagaacatgtcaagtataacgcaattagtctaaatcacgttgcgtaaagtgacattaagttattccattttttgtgatatatctcatgaatattaagccaatcaaattctaacgtgaaatataaaaaggcggaaagaaaatataaccggccctgaattaataaaagtcacaaataaattcaataatacatttttgttaaaaaattcactaccccgtaccgtcaaacatctttctctaacctttaactactgaaagagtaaaaaaacaggataaaaggtaaatttatcataaaattggatttatccatttctattttcattatcataaatagcaaagcctcaagggctacaacccttaaggcttctatattaaatatcgtctgctcccctaaagaggataccgatataaacaatgatattatagcgcattaaatataagccacatggaatcaaatggcgctcaatcattgacggttttgtgatgtggttcataagcattggcgtgtttatgtgagcataaaatcccactcaacaaccaccgactaaagtcggtgggttagtgattaacggactgaaagtccggatacgcatcggctaaacgatgcgtcaattatccagcctgaagtgatcattcgggttcggttcaaaatgatgcgccagataggcctttatcatctcttccgttaactgacctaccgtcgcacaaaaatagcctctgccccaaaaatgctgaccccagtaacgctttttcaagtgagcaaactcttcaaacaacttacttgctgtccttccctttattcgcctcatgatttctgagggcgctaagctcggaggacaactcaccagtatatgtacatggtctttgctcacgaccccttctactatcctgatttcgaacgcttcacaggtctgacgaactaactctctcacccgtaaaccaacttcacctgttagcactttgcgcctgtattttgttacccacacaaaatgatactcaatctgaaataccgtgtggctgccatatctgtaatccatattgcacctctcgtgcaacacagtatcgcagctaaagctgaccgactaaagtcggtggttttaaccttttatatggaaaaataaagatgtgaatctgagaattggttgcgggggccggatttgaaccgacgaccttcgggttatgagcccgacgagctaccaggctgctccaccccgcgtccgtctaattgcttgcaaatgctgaattgtctcgataaacatgatatcgaattggttgcgggggccggatttgaaccgacgaccttcgggttatgagcccgacgagctaccaggctgctccaccccgcgtccgtctaactactgcaaatgctaaattgtctcgataaatatgatatcgaattggttgcgggggccggatttgaaccgacgaccttcgggttatgagcccgacgagctaccaggctgctccaccccgcgtccgatgtgggcacactatactctggatcctttccgttgcaagcttttttgttgatatttaccaattttgtttgcttatgggttaaaaacgaagcgctctgttttgtttttgttcactcgtgatttaagtagcattatctatttttttctaactacattttattatttatacaggtttgatattgttcgctatcagattagggatggcaggatatgaagcataatatgaaactttggagtaaatattttttatgtggcatcgccatatctttattatctgcctgtcatcagcgcccgactgaacaagggcagcaaactgggcaagggcagcagtataaggatggccattttgttcaggatctccggctggttgatacaccaaatacgcaaggctctcccgtcaatatcagtgattttgccactcaggtgagattaatcagtgaaacctctcccaaactatatgccagccaccgcgcaacttttgatgcgattgaaaactggacgcagtatggtggtgatgtccgtaatttaaatcagtttggtctgcttgcttatcagatggaaggcgaagacaactacggtaatgtcaaatttaccggttactatacgcctattttgcaggctcgccacagcaggcaaggggaatttaaatatcctctgtaccgaatgccggataaatcgatttcccgcttaccggatcgctcagctatctataatggggccctcgataaaaaatggatcatcggctacagcaattccctgattgataattttttcatggaagtgcaaggaagtggttatgtggattttggtgataacagcccgctaacgtttttcggttatggcgggaaaaatggtcaggcttatcgcagtataggcaaggcattgatcgataagggagatat

SEQ ID NO: 1222 - DNA, 8645 bp, Xenorhabdus sp.
  CDS (2)..(442)
ccttttaaagggacaaaatgatgaaactaagacaccttttattgttactcccccactttttaaattaaccgccggaaatgagacagtattacgtattgtaaaaaccggtgataatttaccagctgacagagaatctctattctggctaaatgttaaatctattccggcaacagtaaaatctgaagaaaatcagttacaaatcactgtaagatcacgctttaagttattttaccgccccactcaactggcagaagacgcttccattgcctataaggcactgaaattcaaggttgaaggcaacaaactgacagccgagaaccctacaccgtactatatttcttttgcttatcttggcattgggaatgcttcaaaaaaccatgagatccagacaggccggtatgcttcctcctttcagtcagcagagctgggatattcctattaaaaatatcaatcatgtatcctggaaaaccattaatgattttggcggaataacaccagaagaaaagcatattttttgagtataactttcatacaatctatcaggactagaaaatgattatggataacagccgccattgtcttcaatacaatatttctgataatttggtgttatttttcaaaccaataaaagcactcttatgtatattggcaacaatatggcttttattttccgataaggtttatggagaagtctatttcaatatcaatgctctggaaacactttccggctttcccgaagatattgatttgtcaatttttatgcaggacgaccaacagccgccgggacgctattgggtcgatacttatctcaacagggaaaaagtagataccggtaatgttgagtttgttctggtgaataataagttatctcccagaattaccctaaagcagctaaaagagatgggagtcaatgtcgatttattcccggctttagcggctttatcaccagagaccgaaatcacagaccttagtcaatatattgattctgcatcatcttctttcgattttaataaacagcgtctggatatcagtattcctcaagctgctctgcataacaaagtaagagattatgtgcctcctcatttatggcagcaggggttaacttccttacaagttaattatagttatagtggttctacaaattggctggatggtcaatcaggttcaaacagtcataattttcttaatctcagaagtggtgcaaactgggatgcctggcgtttacgaaattacgcgacttacagtagccagaacaataaatggcgaagcctgaatacttatttacaacgtgatattcattctctgaaaagccaattgactttgggtgatagttataccccctcacctatttttgacggttttcagtttcgcggtatgcagctggtctcagatgataatatgctgcctgatagcctgagaggttttgcaccaacgatacgggggattgcgcaaagtaatgctcaggtaacgattaagcaaaatggttacattatctacgaaacctatgttcctcccggccctttcattatcaatgatctgtacccaacaactgccagcggaaatttagaagttatcattaaagaagctgacggaaaagaacatcgttctgtacaacctttttcggctgtacctgtgatgctgcgggaaaagagtctgcgccattctctggcattcggaaaatatcgttcgtctgctcaacacagtaaaacaccttattttgtacaaggtacagccagttacgggctttccaataatgtcacgctatacggtggaacaattttctcaaaaaattaccagtccgttgctttgggaaccggttacagtctctacgattggggttccttttcttttgatataacacatgccaaatcagaattaacttcagatatacgtgcttccgggcaatcatatcggtttcaatatgcaaaagatcttactctgactggcaccagtttaacgatagccggttatcgttattcgactcacgatttctatgatttcaaagaagttaatgaatttgatattaccagcaataatcgttacaacaccaacaaacgcagtaaactgcaaatgcatgtcaaccagtctttaggtgatttaggcggtgtttatttatctgcttttcagcaggattactggtcgcagaaaggctatgaaaggaatatcagtgccggttacagtagcagctacaattctgtcaattacacactgaattactcctataatagtttgccgggaacgaatcataaagatcagattatctcgctcagcgtacaaattcctcttgatcgctggctaaaaaatagctgggccagctataacctgactaataataaaaaaggagaaacatctcatcaggtcagcttaagtggaacagcgctggaagataacaatctggcttacagtattcagcaaaattacgataaccgtaacaccggtattggtggaaacctcactacagaatataaaggtgcttatggtcaggttggcgttggttataactataacagacaatccaagcagttaaattacagcctcaatggtggagtcgtcgcacatccctacggtatcactttctctcaatcattgggggatacattggtgttagtccgagccaatggcgctaaaggcattaaagtccataatcagactgggattgcaactgaccggagaggttatgcgattgttccttatgccagtagctatcgcaaaaatcggatctctttggatacctattcaatgggagacaatgttgatatcgatatcagcacacaaactattgttcctactcaaggtgctctgacactggccgatttccagactcgtattggttatcgcgttttgctgaagctttctcacaaaggaaaagaagttccatttggtgcaacagctacattagttcaacaaaatgagtcagatgaacccagcagcaccattgtcagtaatgatgggcaggcctatatgagtggtattcctgagtccggtcagatatggataaaatggggtcataaagatactcaggaatgccgggttaattatcagcttccggaaaaaacaccagaatccggcctgtacatgttggatgccacctgtgaataacaactattgatcatatgtttgatatttttacatattatggaaatgaattatggttaacggcttaaaattattattggcgagtatatttatcgtcggcacgatgagcagttttgccagtcaggccaatcatcggggttatgattgcgggtattataattttactcccggtaaaacgcaggtttcttttggttccagcatagttgtaccaaaggattatcctatgggaagagttattaaagaaattaccctcgagcaaatatataacacaggctatgtcgcttattgtaacgggctagtttcaacatcatggggtacaccgagttttcgccggatacactataattatgatgcaatttatgactctggtgtgtctggtattggcatccgtattaataattggccaaatgaaccatatggtcatgattggctccctagaacatcaaataacccaacaacctgttatccacccgatggggaatcttggagttatacctattattgtgggcgcacatggggttatctgacagtacagcttgttaaaattgcaccaaatacaggcacgggaaggattggaggtggcgttctgaccagtgcaatattagggaataattggcttattcatactttttatttagataacactgagattattactccaaccccaagttgttcccttacacataaaacaaccctcgttaatatgggaaaagtcaggacaagtgaatttcgcggtatgcatagcgccactcagacaaaagacttcaacttagagctggactgcgatgcaaatgcaaaaactactatgagactggatggacgtccggcaaaaaatggttattctaatatctgggcattggatcaagatagtgacaacgtcacagcaaaaggcgtgggtttacaaattatttttctcaatcgattcttatcgcaaggtgaatccattgtccttcagcccagcgatcaagtaagacatttctctcttccaatgcaagcccgttatattcagactgaagcacgggtaacaccgggtagagctaatgcaacagcgactgttacgctaacttatcagtaaataatatttctgctttattacttttcagatggttgcatgctaattcatgcaaccattttcatactcacctaatcagttactatatattttgcttagtaagccaacttgctgaaaatataaaaattcacaatctctcaattccatttgtatctgttgcgcacaaacgaattcgtgcccatcaggatcgagcacaacaaaaatatagccaaaatccagcctggtaggtgttaatgctattgaaacattacgagatctgaaagtgtgataaaaagtgttcacttcatctattgttatatcactgagacacagctcaaacccaccaaatgtcgactaaggctgaggttcaatctcgtgctttgtttgtaatcccagaataaaactatcttttaatgaaaccagccaatctctttttttattttactggtttacatgttcaccatagtattcatattcctcaataaatatattaaagaatgcaaaaaaacgccactgaatattaattgtccataagtagtttatcaatggcgattaaataaatatcaacttaattgctttattcaataaaatggtcacttcattattttacttcgttccatatacagtgttcaaaggtaacgctagtatttgggagtttcctttatcagtcactgtatattgaacctgaaatgtacctctattaccattactgctcatagcaaatcctcgtaaatcagattgttgaaataatactataaaaccattatctaaatcactttcacagactgtatgcatatcaattaaatgtgctgttttcggtgaattggtatccaaaaaatatgcatttaaataaacatcaatggttacttcatcacctaccgtaattccatcataattaggaactcttatttttagtcctccaacaatatgcgagtaatttattgaaaatccagaaataactaattcaggtgccaatagcgatcctgtataatctggttcataacgatttattgtccccgttactttaaacttcaatatctctgaatcattaccatttccatagtcatcacaaatcatatagccaattgaattaaattcataatttattttaaataacctcttatctagagtataagaatacctaccgtttgttctcttaaggttagttacgtaggcaatatctccatttatccatattgcaatttccgacccagatatcaacatgtcaggaattattatctcaactaaatctccttctaaatcatcaagatccaatactccatcgttatcaacactggataaaataggtggttccaatagattttctaattcactaacatttccaatgttagtgaatactacatgatattcctcaataatagaacgattaacaggccctatattgagggtaataataccaagggtggtatttgctatttttagcacaaattgaccattatcatccgtattaaaaaaataagcttcaactctatgattatatatcatggaattaggatatataaaattagggagagttgtctggctactgaattttaacggatagtttcgtaacggtttataattctcatcaatagcataaattgtaataacaattgtgctttcttcactttctgcatcgtaatattcagtcggagcacaaaatatagcatctaggttacatataatctgggagtttgttatagtgtatatggcgctatagtgatcagggtctgtagtgccatcttgtgtataaaccgatatcaataaattagaatctacctgcccttctacctttaattcattggttgatatcccttggctatttataggagtggaatctctaacaaatctgacatttttagagtttgaatcaaaaggaaataacaaccaattcaccgaattattgttttttatatcattaactttaactgtaatagtccgtgtagattgtatatctagagcatcactggataatggagaaataaaatttatatttttttctttcatgaagtaaatcctgatagagtgataattgatagaataaatatccttcaattaacttatcaaatatgaattggaatagatttcgaagtggagccagtaatcaatccattattatcataagcaaaaattgtaatagtacacttatcatttgtcggtataaaatatggaaattgacaagaaaccgattttgaatcagaaacaataatattagttaaggtatcatatggaattacggaacttatttgtagaataaagctagaaagattataagaatggaatctatcccaggaaaccaaaataaaacccttaggattataattaacctcattaatattaatagccatttgagaatcctttaagttattaaactaaggaaagaaggattaaaccttctttccttataattagctaacacttaattatcacacatttatttttccatatgacaggttaaaaccaccgtctttagacggtgactttgactttaatgttttgacctacgcgcgtttacgaggtgcgtggttcgacgactttcagtcgtcagcaccgaagtgcgctaacccacctacttcagtaggtggtagttaagtttttgtcggatacgggtgtgcaagagtacccgtccaacctgcatagacaggcagatgttggcttatgaatgagaaagaaccttttttaacaactccatatttacaatttgatcgtgaacattgggcaaccttgcgtgactcggtgcctctaacattaacagcagaagagttttctgccttaaaaggaattaatgaagatatctcaatagacgaagtggttgagatctacctaccattatcacgtctacttaatttttatattagctccaaccttaggcgacaggctgttcttgagcaatttttaggaaccggtgggcaaaagataccttatgtcattggtattgcaggcagcgttgccgttggcaaaagtacaacagcacgtttattgcaggcattactcagccgctggccagaacatcgtcgtgtaaagctggtaacaactgatggcttcttatattctaataatatcctgaatgaacgcggcctaatgaaaaagaaagggttccctgaatcctacgatatgcgtagtctggtgaaattcgtctccgatataaaatcaggagccgaaaaggttgccgctccagtatattctcatctcagctatgatattgtgcctgatgaacagctgatcatcgaacggccagatatcctgatactggaaggtttaaatgtgctgcaaagtggtatggattatccccatgaaccacatcatgtttttgtttctgactttgttgatttttctatttatgttgatgcatcagaacaattacttgaacaatggtacgtcagccgttttcttaaattccggcaaggcgctttttctgaccctgagtcctatttccacaattattctaagttaacaacggaagaagcagtaaaggtagcatctgatatttggcgagaaattaatggactaaatctacaacaaaatatcctgcctaccagagagcgtgccagcttaattctgaccaaaggcaagaaccatgcgattgaaaacgttaggttaagaaaataatgccaaaaagccggaaaatacttccggccttctcattaacagcctcgaagggagatttcaccaccaatataaggtgtgactatcccgtcgatatcaagcaacaaagctccttgttgatcaatgccacgagctatgccataaatttcttgttcaccaattattaatttcacaggacgattcataaaattatctaatttaaaccatctgggaacaaaagattgcaatccttcattttcaaactgaactaacgccttcttcagttcagtaacaatctcagtaacgagtttatttctttcaacagtcactccagcctgctgcaaattagtccactgttgatttattatcttttgctgctcactactcatcgagatgttcatgccaataccaatgacaatctgagccgcatctccagtccttcccattagctcaactaatatacctgctagctttttgtcatccaaatatagatcattaggccatttaacttttaccttttcagctccctgacgattcagaacttctgcgattacgatacccacaaccagactcaatccaatcgctgcagcaggtccttgctccaatcgccagaacatagataaatataaattacgaccgaaagcagaaacccattgcctgccccggcgacctcttcctgcatattgatattctgcaacgcaggtatcacctgaagtaagttctgttaatttatctaacaagtattgattagtagaatcaataactggaataacttcaattcgactttcaagcagataattttcaattatatctttgctaaggagattcattggtgcaggaaaacggtaacccttacccgggatcgtcagtatttccacaccccattcacgaataacctggatatgtttattta

SEQ ID NO: 1223 - DNA, 8645 bp, Xenorhabdus sp.; identical to SEQ ID NO: 1222
  CDS (553)..(3099)

SEQ ID NO: 1224 - DNA, 8645 bp, Xenorhabdus sp.; identical to SEQ ID NO: 1222
  CDS (3170)..(4171)

SEQ ID NO: 1225 - DNA, 8645 bp, Xenorhabdus sp.; identical to SEQ ID NO: 1222
  CDS (6788)..(7756)

SEQ ID NO: 1226 - DNA, 8645 bp, Xenorhabdus sp.
  CDS (3)..(854)
taaataaacatatccaggttattcgtgaatggggtgtggaaatactgacgatcccgggtaagggttaccgttttcctgcaccaatgaatctccttagcaaagatataattgaaaattatctgcttgaaagtcgaattgaagttattccagttattgattctactaatcaatacttgttagataaattaacagaacttacttcaggtgatacctgcgttgcagaatatcaatatgcaggaagaggtcgccggggcaggcaatgggtttctgctttcggtcgtaatttatatttatctatgttctggcgattggagcaaggacctgctgcagcgattggattgagtctggttgtgggtatcgtaatcgcagaagttctgaatcgtcagggagctgaaaaggtaaaagttaaatggcctaatgatctatatttggatgacaaaaagctagcaggtatattagttgagctaatgggaaggactggagatgcggctcagattgtcattggtattggcatgaacatctcgatgagtagtgagcagcaaaagataataaatcaacagtggactaatttgcagcaggctggagtgactgttgaaagaaataaactcgttactgagattgttactgaactgaagaaggcgttagttcagtttgaaaatgaaggattgcaatcttttgttcccagatggtttaaattagataattttatgaatcgtcctgtgaaattaataattggtgaacaagaaatttatggcatagctcgtggcattgatcaacaaggagctttgttgcttgatatcgacgggatagtcacaccttatattggtggtgaaatctcccttcgaggctgttaatgagaaggccggaagtattttccggctttttggcattattttcttaacctaacgttttcaatcgcatggttcttgcctttggtcagaattaagctggcacgctctctggtaggcaggatattttgttgtagatttagtccattaatttctcgccaaatatcagatgctacctttactgcttcttccgttgttaacttagaataattgtggaaataggactcagggtcagaaaaagcgccttgccggaatttaagaaaacggctgacgtaccattgttcaagtaattgttctgatgcatcaacataaatagaaaaatcaacaaagtcagaaacaaaaacatgatgtggttcatggggataatccataccactttgcagcacatttaaaccttccagtatcaggatatctggccgttcgatgatcagctgttcatcaggcacaatatcatagctgagatgagaatatactggagcggcaaccttttcggctcctgattttatatcggagacgaatttcaccagactacgcatatcgtaggattcagggaaccctttctttttcattaggccgcgttcattcaggatattattagaatataagaagccatcagttgttaccagctttacacgacgatgttctggccagcggctgagtaatgcctgcaataaacgtgctgttgtacttttgccaacggcaacgctgcctgcaataccaatgacataaggtatcttttgcccaccggttcctaaaaattgctcaagaacagcctgtcgcctaaggttggagctaatataaaaattaagtagacgtgataatggtaggtagatctcaaccacttcgtctattgagatatcttcattaattccttttaaggcagaaaactcttctgctgttaatgttagaggcaccgagtcacgcaaggttgcccaatgttcacgatcaaattgtaaatatggagttgttaaaaaaggttctttctcattcataagccaacatctgcctgtctatgcaggttggacgggtactcttgcacacccgtatccgacaaaaacttaactaccacctactgaagtaggtgggttagcgcacttcggtgctgacgactgaaagtcgtcgaaccacgcacctcgtaaacgcgcgtaggtcaaaacattaaagtcaaagtcaccgtctaaagacggtggttttaacctgtcatatggaaaaataaatgtgtgataattaagtgttagctaattataaggaaagaaggtttaatccttctttccttagtttaataacttaaaggattctcaaatggctattaatattaatgaggttaattataatcctaagggttttattttggtttcctgggatagattccattcttataatctttctagctttattctacaaataagttccgtaattccatatgataccttaactaatattattgtttctgattcaaaatcggtttcttgtcaatttccatattttataccgacaaatgataagtgtactattacaatttttgcttatgataataatggattgattactggctccacttcgaaatctattccaattcatatttgataagttaattgaaggatatttattctatcaattatcactctatcaggatttacttcatgaaagaaaaaaatataaattttatttctccattatccagtgatgctctagatatacaatctacacggactattacagttaaagttaatgatataaaaaacaataattcggtgaattggttgttatttccttttgattcaaactctaaaaatgtcagatttgttagagattccactcctataaatagccaagggatatcaaccaatgaattaaaggtagaagggcaggtagattctaatttattgatatcggtttatacacaagatggcactacagaccctgatcactatagcgccatatacactataacaaactcccagattatatgtaacctagatgctatattttgtgctccgactgaatattacgatgcagaaagtgaagaaagcacaattgttattacaatttatgctattgatgagaattataaaccgttacgaaactatccgttaaaattcagtagccagacaactctccctaattttatatatcctaattccatgatatataatcatagagttgaagcttatttttttaatacggatgataatggtcaatttgtgctaaaaatagcaaataccacccttggtattattaccctcaatatagggcctgttaatcgttctattattgaggaatatcatgtagtattcactaacattggaaatgttagtgaattagaaaatctattggaaccacctattttatccagtgttgataacgatggagtattggatcttgatgatttagaaggagatttagttgagataataattcctgacatgttgatatctgggtcggaaattgcaatatggataaatggagatattgcctacgtaactaaccttaagagaacaaacggtaggtattcttatactctagataagaggttatttaaaataaattatgaatttaattcaattggctatatgatttgtgatgactatggaaatggtaatgattcagagatattgaagtttaaagtaacggggacaataaatcgttatgaaccagattatacaggatcgctattggcacctgaattagttatttctggattttcaataaattactcgcatattgttggaggactaaaaataagagttcctaattatgatggaattacggtaggtgatgaagtaaccattgatgtttatttaaatgcatattttttggataccaattcaccgaaaacagcacatttaattgatatgcatacagtctgtgaaagtgatttagataatggttttatagtattatttcaacaatctgatttacgaggatttgctatgagcagtaatggtaatagaggtacatttcaggttcaatatacagtgactgataaaggaaactcccaaatactagcgttacctttgaacactgtatatggaacgaagtaaaataatgaagtgaccattttattgaataaagcaattaagttgatatttatttaatcgccattgataaactacttatggacaattaatattcagtggcgtttttttgcattctttaatatatttattgaggaatatgaatactatggtgaacatgtaaaccagtaaaataaaaaaagagattggctggtttcattaaaagatagttttattctgggattacaaacaaagcacgagattgaacctcagccttagtcgacatttggtgggtttgagctgtgtctcagtgatataacaatagatgaagtgaacactttttatcacactttcagatctcgtaatgtttcaatagcattaacacctaccaggctggattttggctatatttttgttgtgctcgatcctgatgggcacgaattcgtttgtgcgcaacagatacaaatggaattgagagattgtgaatttttatattttcagcaagttggcttactaagcaaaatatatagtaactgattaggtgagtatgaaaatggttgcatgaattagcatgcaaccatctgaaaagtaataaagcagaaatattatttactgataagttagcgtaacagtcgctgttgcattagctctacccggtgttacccgtgcttcagtctgaatataacgggcttgcattggaagagagaaatgtcttacttgatcgctgggctgaaggacaatggattcaccttgcgataagaatcgattgagaaaaataatttgtaaacccacgccttttgctgtgacgttgtcactatcttgatccaatgcccagatattagaataaccattttttgccggacgtccatccagtctcatagtagtttttgcatttgcatcgcagtccagctctaagttgaagtcttttgtctgagtggcgctatgcataccgcgaaattcacttgtcctgacttttcccatattaacgagggttgttttatgtgtaagggaacaacttggggttggagtaataatctcagtgttatctaaataaaaagtatgaataagccaattattccctaatattgcactggtcagaacgccacctccaatccttcccgtgcctgtatttggtgcaattttaacaagctgtactgtcagataaccccatgtgcgcccacaataataggtataactccaagattccccatcgggtggataacaggttgttgggttatttgatgttctagggagccaatcatgaccatatggttcatttggccaattattaatacggatgccaataccagacacaccagagtcataaattgcatcataattatagtgtatccggcgaaaactcggtgtaccccatgatgttgaaactagcccgttacaataagcgacatagcctgtgttatatatttgctcgagggtaatttctttaataactcttcccataggataatcctttggtacaactatgctggaaccaaaagaaacctgcgttttaccgggagtaaaattataatacccgcaatcataaccccgatgattggcctgactggcaaaactgctcatcgtgccgacgataaatatactcgccaataataattttaagccgttaaccataattcatttccataatatgtaaaaatatcaaacatatgatcaatagttgttattcacaggtggcatccaacatgtacaggccggattctggtgttttttccggaagctgataattaacccggcattcctgagtatctttatgaccccattttatccatatctgaccggactcaggaataccactcatataggcctgcccatcattactgacaatggtgctgctgggttcatctgactcattttgttgaactaatgtagctgttgcaccaaatggaacttcttttcctttgtgagaaagcttcagcaaaacgcgataaccaatacgagtctggaaatcggccagtgtcagagcaccttgagtaggaacaatagtttgtgtgctgatatcgatatcaacattgtctcccattgaataggtatccaaagagatccgatttttgcgatagctactggcataaggaacaatcgcataacctctccggtcagttgcaatcccagtctgattatggactttaatgcctttagcgccattggctcggactaacaccaatgtatcccccaatgattgagagaaagtgataccgtagggatgtgcgacgactccaccattgaggctgtaatttaactgcttggattgtctgttatagttataaccaacgccaacctgaccataagcacctttatattctgtagtgaggtttccaccaataccggtgttacggttatcgtaattttgctgaatactgtaagccagattgttatcttccagcgctgttccacttaagctgacctgatgagatgtttctccttttttattattagtcaggttatagctggcccagctattttttagccagcgatcaagaggaatttgtacgctgagcgagataatctgatctttatgattcgttcccggcaaactattataggagtaattcagtgtgtaattgacagaattgtagctgctactgtaaccggcactgatattcctttcatagcctttctgcgaccagtaatcctgctgaaaagcagataaataaacaccgcctaaatcacctaaagactggttgacatgcatttgcagtttactgcgtttgttggtgttgtaacgattattgctggtaatatcaaattcattaacttctttgaaatcatagaaatcgtgagtcgaataacgataaccggctatcgttaaactggtgccagtcagagtaagatcttttgcatattgaaaccgatatgattgcccggaagcacgtatatctgaagttaattctgatttggcatgtgttatatcaaaagaaaaggaaccccaatcgtagagactgtaaccggttcccaaagcaacggactggtaattttttgagaaaattgttccaccgtatagcgtgacattattggaaagcccgtaactggctgtaccttgtacaaaataaggtgttttactgtgttgagcagacgaacgatattttccgaatgccagagaatggcgcagactcttttcccgcagcatcacaggtacagccgaaaaaggttgtacagaacgatgttcttttccgtcagcttctttaatgataacttctaaatttccgctggcagttgttgggtacagatcattgataatgaaagggccgggaggaacataggtttcgtagataatgtaaccattttgcttaatcgttacctgagcattactttgcgcaatcccccgtatcgttggtgcaaaacctctcaggctatcaggcagcatattatcatctgagaccagctgcataccgcgaaactgaaaaccgtcaaaaataggtgagggggtataactatcacccaaagtcaattggcttttcagagaatgaatatcacgttgtaaataagtattcaggcttcgccatttattgttctggctactgtaagtcgcgtaatttcgtaaacgccaggcatcccagtttgcaccacttctgagattaagaaaattatgactgtttgaacctgattgaccatccagccaatttgtagaaccactataactataattaacttgtaaggaagttaacccctgctgccataaatgaggaggcacataatctcttactttgttatgcagagcagcttgaggaatactgatatccagacgctgtttattaaaatcgaaagaagatgatgcagaatcaatatattgactaaggtctgtgatttcggtctctggtgataaagccgctaaagccgggaataaatcgacattgactcccatctcttttagctgctttagggtaattctgggagataacttattattcaccagaacaaactcaacattaccggtatctactttttccctgttgagataagtatcgacccaatagcgtcccggcggctgttggtcgtcctgcataaaaattgacaaatcaatatcttcgggaaagccggaaagtgtttccagagcattgatattgaaatagacttctccataaaccttatcggaaaataaaagccatattgttgccaatatacataagagtgcttttattggtttgaaaaataacaccaaattatcagaaatattgtattgaagacaatggcggctgttatccataatcattttctagtcctgatagattgtatgaaagttatactcaaaaaatatgcttttcttctggtgttattccgccaaaatcattaatggttttccaggatacatgattgatatttttaataggaatatcccagctctgctgactgaaaggaggaagcataccggcctgtctggatctcatggttttttgaagcattcccaatgccaagataagcaaaagaaatatagtacggtgtagggttctcggctgtcagtttgttgccttcaaccttgaatttcagtgccttataggcaatggaagcgtcttctgccagttgagtggggcggtaaaataacttaaagcgtgatcttacagtgatttgtaactgattttcttcagattttactgttgccggaatagatttaacatttagccagaatagagattctctgtcagctggtaaattatcaccggtttttacaatacgtaatactgtctcatttccggcggttaatttaaaaagtgggggagtaacaataaaaggtgtcttagtttcatcattttgtccctttaaaagg

SEQ ID NO: 1227 - DNA, 5944 bp, Xenorhabdus sp.; identical to SEQ ID NO: 380
  CDS (2938)..(4620)

SEQ ID NO: 1228 - DNA, 5944 bp, Xenorhabdus sp.; identical to SEQ ID NO: 380
  CDS (279)..(1034)

SEQ ID NO: 1229 - DNA, 5944 bp, Xenorhabdus sp.; identical to SEQ ID NO: 380
  CDS (4923)..(5540)

SEQ ID NO: 1230 - DNA, 4517 bp, Xenorhabdus sp.
  CDS (3)..(2135)
  unsure (1)..(4517): unsure at all n locations
tttatctggaagttgataatggtgctttatcagaggcgactgattttatggccgatgcactggccgagcctgtgctgtatccggtcaacgcagatcgtgaacgccatgccgttgataatgagatgaccattgcccgtgcaggtgaagggcaccgaatctggcagatccgttcagaaacgcttaatccgtctcaccctaacgcccgttttgctggtggtaatctggaaacactgaaagataaacccgacaggaagttacagacggcacttgaggatttttatcagcgctactattcagccaacctaatgaaaggggtgctgtatggaaaacagcctatagacaaactggctcaaattgccgcggagacttttggtcgtattcctaatcggaatgcttcagtgcctgctattacagccccggcgataacggagaaggaagaaggcatcattatccattatgtgccatccaaaccgtacaaatcattgcaactggaattcagtattcctaatgaaattgctaattttcgcagtaaaacagagggttacattggctatctgattgaaaaccgcagtgaaaatactttatctgattggttactgaaacaaggactatccgaagggatcagcgccagtgctaacccaaatgttgatggtaattcgggttcattcagtatttatgtcgaattgactgacaaaggccttcaacagcgtgatcaggttattgcggccatcttttcttacattaacctgttgaagcagaaaggcatccaacagagctattttgatgaaatggttaaggtattcaatttgtcattcaagtacgcatcaatcgtacgggatatgaactatattgagtcgttagccgatacgatgctgatagtaccggtttctcatgttctggatgccccctatcttgctgataaatataatcctcaggccattctcagacgattggatcaactgacacctgaaaatgcccgcatctggtttaccagcccggaagagccacacaataaagaagcttattttgttcaggcaccgtatcaggttaataaaatcagtccaaaacagtttgaggaatggcaagaacttgaaaaaggaatgtcattttccttaccggaactgaacccttatattcctgataacttaactctgattaaaacatcgggtagccagaaacatccccgaatgattctggaacagcctaatgtgcgtttgctttatatgccgagccaatattttgctgatgaaccgaaagcaaacatcgtgctggagctacgcaatgctgatggtatgaagagtgctaaagaacaggtgacttactcactgttatcttacctgtctgatcttgcactgcatcagcttggctatcaggcatcagtcgccggtatgggggcatcagtcgggtatgcggatggtctgcaaataggagtatatggttacactcagcatctacctgaattattaacttctaccattagccagtatatggcatttacgccaactcagactgaattgcaacaagcgaagtcctggtatcgtaaccaactggaaatcgcgaatgaaggtaaagcttatgaaatggcaatgcagcctgtttcccgcttatccggtgtgccttatatcgaacaggctgaactcctgaaatcactggatggcgtcagcattgatgatgttattaaataccgtcagaagatgatccaaagtgctgctttacaagcgatgatctttggtaatttaactgaaaagcaaggcattgatattattaactctgcacataaacagctcgggaatcggggaacagagtggtggagtggtgagcatatcgaattggatcgcaattatgcggtgaatttcgaaggtactgccagcagcaccgataatgcgctggctgaaatttatattccaacgggatatgatcgcagtactggtgctgtctattccaatctgttgagtagcattttatctccctggttctatgatcaattaagaacaacagaacagctgggctatgcagttttcgctttcaatacaagggtcggagagcagtgggggctgggattcctgctgcagagtaacagcaagcagccggattacctgcaccagcgatatctgagcttctattcagcaggctgaaaagaaattacaggcgatgtctgatgctgaatttgagcagtataaaacgtcattactcacggaaatgcgtcagccgccacaaacgttttctggagaggcatcccgttacagtcatgactttggtcgtaataacttcagttttgataccagagaaaaattactgacttctcttgaaaaagtgactaaagcacaattgatggagttttacgataaagcagtcatgaaacgtcagggattggcacttatttcacagattaccgggaagaaaggctcgcttcatcaatatgcgcagttgaaaggttggaaaacttatccgaatgtatccaccttccagaaaaaactaccggttaaggtgaatgctcagtgagcacagaaatactcagtaacataacgtctcataaacttaatccattaacattgccgctgcatggtcagcggctaattgaggcttcagcaggaacaggaaaaacctatacgataggtttactctacctgcgtctgttactcggactgggcggcgatgccgccttttcccgcccgcttaatgttgaagagatcctggttgtaactttcaccgaagctgcaacagatgaattacgtggtcgcatccgtgaaaatattcaccagctacggctggcatgtattcggcaggataacgacgtgagtgatccggtttatcagcaattgctggccgagatccctgacaggcaaagtgctgccgcttggttactggctgctgaacgtcagatggacgaagcggcaatctacacgatccacggtttttgccagcgaatgttggtgcataatgcgtttgaatccggtgtattgttcgagcagacactgattcaggatgaacatcctctgcgtaagcaggggtgtgcagatttctggcgtcgtcactgttaccccttatcactttcaatggcgacggtgattagtcaggaatggagcgggccagaggctctgctgatggatgttttagcccatttgcagggggatatgccttatctcgttaatgcgccggatgagaatgaaaccttagtcagccgacatgaaaagataattgctctgatcgacggagtaaaacaacagtggaatgaagcaataccggatttacaggcgctgattgataattcaggagtggataaacgaagttacagtaagaagcatttgcctaactggctaaatagcgtttctgaatgggctaaatcaccaaccagagattatcagcttcctaaggaactggataaattctgccagtcaagactggaagaaaagaccaaaaagggcgaaattccccaccatcctgtgtttgctgctattgatgatttatatcagcaaccgctgactctgcgcgacattatcctctctaaagcgattgttgaaatacgccagtctgttaatcaggaaaagctgatgcgtggatatatggggtttgatgacctgctgacgcgattagatattgccctaaaacgggaaggaggagagcagctggcggagacgatcagacagcgctatcccgttgccatgattgatgagtttcaggataccgacccgcaacaataccggatctttcaggctatttatcgtaatcagccggaaaatggcctgctgttcattggtgaccctaaacaagctatttatgcgtttcgtggcgcggatattttcacttatatccgggcgcgttctcaggtcagtgcccattacacgctggaaactaactggcgttcttccgcatcgatggttcaggcagtcaatacactgttttctcatactgagaagccgtttctgtttgaccagatcccgtttattcatgtcaattccgcagaaaaaaaccataacctgaaattcctgcttaatggtcaggaacagacggccttacagttttggcttcagtctgtagaaggcgtttcaaagggtgaatatgaaaagggaatggcaaaactgtgttccgcccagatcagagactggttgcaggcagggcaaaacggcgatgcctgcttgcaacaaaatgaaaagagccgcccggttactgcggcggatattacggtactggtgcgcaatcgccgtgaagcagccctgatccgtgatgaattgaatgaattacaaatccagtcggtctttctttccaatcgtgaaagcgtgtttgatacgccggaagcgaaagatttgctctggcttttacaggcggtgttagcaccggaaaaagaacgtgtactgagaagtgcattagccagtagtttattcggtctgagtgcccgccaaatcgatgcgctgaacaatgatgaaaatacatgggataagctggtggatgagtttgatggttacgcgcggctgtggcgttcacgtggtgtcctgccgatgctgcnggctgtcatgggg

SEQ ID NO: 1231 - DNA, 4517 bp, Xenorhabdus sp.; identical to SEQ ID NO: 1230
  CDS (2152)..(2502)
  unsure (1)..(4517): unsure at all n locations

SEQ ID NO: 1232 - DNA, 4517 bp, Xenorhabdus sp.; identical to SEQ ID NO: 1230
  CDS (2538)..(4517)
  unsure (1)..(4517): unsure at all n locations

SEQ ID NO: 1233 - DNA, 4740 bp, Xenorhabdus sp.
  CDS (1699)..(2082)
agctcgtccatgtgctctaaagtactgatcaatcatgattgctgcggggacacccagaacatttgccagcatcatgcctgtgaatataatcgatgaggctcttcctcttatttctgttttaacaacttcaccacagattgccaaagcgatgccgatgcaggcagatcctgcaaaaccggtaataacacgggcgatagccataacataataacttccggcaattgcagctatgatccctccgatactatagagcgttaatatccaaagcagcgcttgcttgttgggaattcgaagtacaccaaatactgttgtcaatatcggtccgccgatgagcattcctactccgtagagtgaaagcaggtaaccgatatctgtgactgtaacggcaaacgcatccattaatgatggcatcatgcccacaaccataaatgcggaagtattcaggatgaatatcgtcaatccgagcaaatagatggagagaggtatatcacgatgttttttatctgatatttctggtgaggcttttatatttattttctctgatgccatgttattcacggtggatttcctcaatgtagctgtactgtgttttttcggtatgaaagcttgtgtttgataaagagcagtgtgggatataaatatcaatcattcaatttaataattgagtattagattaatgtgatgtcaaattttagtcaagaggctatacaagtcatgtctttttgctttttattaaagagaaaatatgcaaatgttgcgtgctgatgaaggcattagtgggatttactgcgtctactagcatgtattttgagcacttgatgttttatggcttgtaaaatacttgccatctttactaaagaagttcataatggcgcccatcttgatgccgttaaagataaaacattagcctaatcaatgggttgagtgttttggtttttaaaatagcggatcagctatgcgggaatagctcagttggtagagcacaaccttgccaaggttggggtcgcgagttcgagtctcgtttcccgctccaaattcaggacggtagattttaataatctgcaagtcatagaaaaaagcgccgaaaggcgctttttttgtttttattacgcaaatccactcttgtgaactgtagagtatttgttttactccacaacatcctgattacctaccgattttagctcttgtgattacccaatctattactgaatatttgacaaacagcttttgattgatttatttggtaacgggtggtcaaatagcgcaacggatataaatatttttcagatatatgctgcccctttcgatactattagatacattacaaccagttatatctaaaagtatcattcatatagttaaactttctaatttaaagcaaagtgaatacctatctaatttatatcgatttttagaaaatagatttgattggtatcaggaaataaatgaggagtaattatgaatgaaattaataaaagtgacagttatgaattcgataattatatttttaaattaaagactaatctcactgaagataatttaatcatagaagaaaataaaagtaataaaattatcttctcaggttatttcaatgaaatagatgatgttttgttacttggaaaaaaaatacacattaatttaattgataaaaatagacccgttgtcattaaattttctgctttttctaataaacttggagtgtttaaagcatatcaaaagctagaacgtagttttcatgagattaaattaagaaaaaaatttaatgattcatatgggaaatacaaggaagaagcagaggaagtttataaaaaatacattaaagtatgtggtcggtttaagaaaagcatgcgagaagccgggagtatatatgtcaagctgaaaaaggaaaatgaggaattaactaacaaactgaattctttgttagaccagcaaaaagatgaaaatattagtcataaaccagctaaacaaagtattaaaacatcatcaggtaagagttttaatggcgtacattatagcaataatttgttagaagatgtttcagggcaagattgtgagaattatattaacaaattcgggacttgatataatccattccctgaaaataaaataaatcataaccacccgtataacgggtggtttgctcttgccctataagggcttgttaccgactgcgcctaaatgacgctgctttctcttcgttcaaactaagtgtctttgctgctttggcccaccccttgaaggggtctacatgctctttactactcaatttatccgagattaaatccgacttttcttgctctctgatatacttttgaattgtcgcttcatttagccctaccgtactgacatagaacccttccgcccaaaactttctgttgccaaatttatattttaaattggcgtgtctatcaaagatcatcaacgaacttttacccttcaaatatcccataaagcttgaaacgcttagctttggtggaatactcaccaacatatgaacatgatctggcatgagatgaccttcgattatttccacacctttatacttacaaaggtctctgaggatctctcccacacttgaacgaatattattaaaaatcactttccgtctatatttcgacgaaaagacgatatggtatttacacagccactttgtatgcgctgagctttgtgctttaatgcccataaacacctttccttatttgagttacgaatattagcttgaacatctatatcgtaacggaaaggtgtttttcttggtataacctttgaactccacccgcaaagcgggtggttttatgtttaagacgctaacgcgacttaaactggctaaagccataaacaaaaggtgattggcgatatgtataatcgctaatcacccggaatctatatttcacacctatatttcaattactacacctgtttctttaccataaatactgcgtatatagcctttggctatctgctcacctgtgcaggtttcctgcccgggaaaaaatttggcgtaactggtaaatgattcatccaataatttggggctgactacgttaattcgggcatctgtgatttccgtcgctgctgagcggacaaaagcttcaatagccccattggttacggcagtttgagaaccattaggtgacattattttgccgacaatacccgatgttaaagtaattgaaccaccgggtttaatgtattttaaggcttggagcgcaacattgatctgaccaaatgctttatttttgatactttcttcataatcgtgcaggttttctggcttcgtccagttagttttaccaaatgcacatataatagcttcaaacattttatttttagataaaaaattatctaattgttgattgtcaaaaacatcaagcgaattttcaggtgagttacggctggcttgaacaatctcaagctctgtagggttatcagctaacaaaggatgatattttttaatgttgctgataatgtgttttcctatatttcctgttgctcctatcactaatattttcatatttatgactccgtaattgaatgacaagatgctagataaataatgtttatttaaattttgagtttagctcagctctatattctttcagcacttcatcaataacccaactggtacgtgaggcagatattccagtagaagggctgatatcttttcctcgtaattgctgaataattgtctgtataaatggcatttgaatatgttttgggttttcaaaattaaactgatgtaatgtatttttgtcatcgtaatatgaaattggagaatccccgaatgtggcaaaaattattttgccttttgtccccattatttccaccttatcttcacgagagctggcaacaaaattccagatgccgacaccctgtacctgattttcgaacatgaatgacattgaaacacaatcttctgccggatacgcttttgcctgagagctcgcatgccctttgacggaaacaattttgcccaacagaaaatctagtatatccagtgtatggcaggctaaatcaacaaataaccccccaccggatatttctggttgtacaaaccagggaagattttcgggatcaagataacgtgattccatttcccgggataattggcaactgacaataagtggagtgccaatcgcacctgaatcaatgagttcttttatttttataaatcttggtaacgctctacggtaataagcaacaaataatggcacattatggcgttggcaggcagtaatcatttcattacattctgaaaatgtcagagccatcggtttttctacataaacagctttaccggctgcggcagctaataaagtatatttcttatgactagagggaggcgttgcaatataaacggcatcaatttccggatcgttaatcagagattcagcatcagaataccatttgggtacattgtgcctgttagcaaaatcttttgctaagtctgaatttcggcgcataacagcaattaattctgaattttccagtttataaaaagcggggccacttttcacttctgttacattaccacaaccaataataccccatctgattttctgcattttatttttccggtatatttatctatgaatcgcaaatatccgctcgattttataatagcctttttgcttaatctatgtctttatggacgataatttatattgttacattaggaaaatttattgcctgatatcatatgctggatatagaagtgctcagattaaggattttgacgcg

SEQ ID NO: 1234 - DNA, 4740 bp, Xenorhabdus sp.; identical to SEQ ID NO: 322
  CDS (1227)..(1844)

SEQ ID NO: 1235 - DNA, 4740 bp, Xenorhabdus sp.; identical to SEQ ID NO: 322
  CDS (179)..(1180)

SEQ ID NO: 1236 - DNA, 6040 bp, Xenorhabdus sp.; identical to SEQ ID NO: 55
  CDS (1)..(930)

SEQ ID NO: 1237 - DNA, 6040 bp, Xenorhabdus sp.; identical to SEQ ID NO: 55
  CDS (1107)..(2234)

SEQ ID NO: 1238 - DNA, 6040 bp, Xenorhabdus sp.
  CDS (2940)..(3707)
ttacagtagccgggacattttttgccaacagcgaagttgatgacactgaaatgctggttaatcagcaggatgccgcccgacttttacgctatcccattaataatattaccggctggcgtttatttctcactgaaccattaaaggtagatgagttaagtcagcagccgctgccgaaaggcttggtctggaaagactggcgtgaacgtaagggggagttttttcaggcagtacgtatggaaaaaaatatgatggggttattgcttagcctaatcattgcagttgctgctttcaatattatcacttctctttctttattagtgatggaaaaacagggtgagattgctattttgcagacacaagggttaacccgtcggcaagtgatgaccattttcatgattcagggagccggagcaggcattattggtgctttattgggaacggggttaggaatactgctttctagtcaactgaataacttaatgcctgttatcggcctgctgacagaaggtattcaattacctgttgccattgaacccactcaggtggcgattattgccgtcagtgccatgttaatctctctattatctactttatatccttcctggcgcgccgctgccacccaacctgctgaggctttacgttatgagtaatcaacctttattgctatgccatcatttgtataaaaaatatcaggaagggcaggtttccaccgaggtattaaaaaacgtcacattttccatgcagcaaggagaaatgatggcgattgtcggcagttccggttcaggtaaaagtactctgttgcacttattaggagggctggattcaccaacctccggtgaagtgattttcaagggagaatcacttaacaatatgtcggcttccggtcgggcagaattacggaacagagaaattggttttatttaccagtttcaccatctgctgcctgattttaatgcattagaaaatgttgctatgccgctattgatcggcagtaaaaggctgcttggggggaagaagcaggctgaacaaaaagcacgggatatgttggcggcagtcgggctggaaaagcgggcacaccatcggccttctgaattatcaggaggtgaacgccaacgggtggctattgcccgtgcactggtgaacgaaccttcactggtattggcagatgagccgacaggtaatcttgaccaacgtaacgcggacagcatttttgagctgttaaagaacttgaatcaacagcagggcacggcatttttagttgtgactcatgatctgaaattggctgacaggctggcgcgtcaggtagaaatgcgtgatgggtatttacaggatgaattaaccctgacggggggagtgtaatggcaaatctgcctcttgcattacttactgcaattcgcttcagtcaggggcggcgtcgcgcgggaatggtatctttggtatcagtcatttcaacactggggatcatgctgggtgttgctgtgctgatcatcggtttgagtgcaatgaatggttttgagcgcgaacttaaaaaccggatactttctgttgttcctcatggtcagatttatacggtagaacagcctttccagcactggaaatcagcgcttaaacaaatcagacaaactccgggcattgcaggagcttctccttatattgaattcaccgggctgatggaacgaggagataaacttcatgctgttcaggttcgtggtgttgatcctgagactgaagctgaagtcagtaccttatataaatttgtccgtgatggtgcatggcggacatttcaggcgggcaaacatcaggtcattctggggcagggagtcgcaaattcactgaatgtgaaacagggtgattggctgacagtaatgatcccaaacagcgatccaagcctgaaattattacagcctaaacgaatacgtttacaagttaccggtatttttcagttaagtggcatgttggatcaccgtctggctttggttccgttatctgatgcacaacagtatctggattatggcgatgctattaccggcgttgctattaaagcagacgatgtttttgcagcagagaagcgggttatagcggccggtaatgcaacaggcaggtatgtctatatcagtacatggctgaaagattacggttatatgtacaacgatatccagatgatacggggtatcatgtacttagccatgattttagtcattggggtagcctgttttaatatcgtttcaacgctgattatggcggttaaagataagagcagtgatattgctattttgcgtacactgggggctaaggatggccatatcaggtcaattttcttgtggtatggattattgaccggaatggttggcagtattattggcgctattgtcggaatttttatggcgcttaatttgacagctattattaaatggatagagaagctgtccgggcatcaatttctttccggtgatatctatttcattgattttctgccgtcagaattacataccatggatattttctatgttttgttaacggcactgatcctgagcttgttagccagttggtatccggctcgtcgggccagtaaacttgatccagcgcggattttgagtggtcaatgatattccggagtattcactatatcacttaagcgcgctatcttacggagtgaactgagcagaagtgatgagctgaacacaccatgaataaagtcgtggtaagtgaacagaaactgaggaaatagttctataccctatgaatttcaggttacctcgtggtgacgagtgagtaatccccccgagaacatagataacagtatggccgggggaaagaacccagtcaacacagcggcaacttgaaagactaagtgtataaaagggttattcggcggagacgtttaaatgcgtgttattcatcggctcagtaaattccgtaagagtaggcgactacggaatcagaggtttcatcggcaaattttttacagggatatccgtgtggcaaataaaataaagaaaccccatgtggtagtactgaccggagcgggtatttccgctgaatcgggaattagaacgtttcgttcttctgatggactatgggaagaacatcgtgttgaagatattgcgacaccggaaggattcaaacgtgaccctgaattagttcaggcattctataatgcgcgaagagagcatctacagcaggcggaaattaagcccaacgccgcacactatgctttagccgaacttgaacaacaaataggcgataatttcctgctggtcacacagaatattgataatctgcatgagcgtgcggggagcaagcgtgttctccatatgcatggcgaactactgaaggtgcgctgctgtcagtccgggcaggttattgaatggacatctcacctgacagtggatgatcgatgtcactgttgtcagtttccttcgttactgcgccctcacgttgtgtggtttggcgaaatgcctttggggatggaacaaatttattccgctttatctgaggcggatatttttattgccattggcacttccggtcatgtgtatcctgctgcggggtttgtacatgaagcgaaattatcgggtgcccatactgttgagcttaatctggaacccagtcaggttgagagcatgtttgatgaaaaacattatggcaatgctagtcaaatagttaatcagtatgttcagtcactgcttcatcagatgtctgaatgagagatttgccccagctacgttgtcagttatgtgactggggcaaacattcaggttgtccggaatagggtttaaaacctgccgcattcagctgtgcggtggttaatcattaaaataccaataaccactgttcaccagagcagtaagcagactgataaactgaacatcatcaatagcatcacccagaatatctgcagtgacagtatcatactggcaaagtgcatcagctgcctgcaaatgagatgtatccatcaattcgccattaacgaagcaattatcacccacacgcaatacacgtagtccattcaaacgattcaggctttcaccctgtttgagcagatcataaatctcatcactttcatatggaggttctggtggcgcgatatccagctcatggcgtgactgagagataaattccccaaaccagttttggaacgtttccggctgttccagtaaatcctgcatcatggtacgcagagttgccagttcgtttggctggatcagtgcaggattatcacggaatgccaaatcagggtcactgtaacgatggctacccaattcatttgccagaacataatcggcaaaaccactgaacagctcacgggcatttggcgcacggaaaccgactgaataattcagtgatggttcaatggcatatccttcatgtggaaaaccgggtggaatatagagaatgtctccgggtagcatctcttcatcaataatggcttcaaaaggctcaacctgtaacaaatcaggatgagggcaatgctgtttcattgggatcttgtccccgacacgccagcgcctgcgtccttcaccttgaatgataaatacatcatattgatcaagatgcggaccgacaccgccacccggaacggagaaagaaaccatcaaatcatccattctccagtctgaaagcacacggaatggcttcataagggcagaagaggggtgatgccagtggttaacagcttgtacgagtaacgaccagttttggtcgcctaaatgatcgtaactttcaaatggcccatgagaaacttcccagcgatcttttttatggctgactaaacgactgtcaatttcattttccatcgccagtcccgccagctcatcgggagaaagtgggtcggtaaattgctggaaaccctgtttgattagcaatggacgtttttgccagtgattctgcaagaacgcctgccaatccagattcagctgataattcatggtgatatcctgagtgacaagaaaatttcaggtcattataacggatagtcaatagagttatcagattcggatgaaatatttcgaggccgctcccattctgtatttattgtgagtatccctgctgctgattaagtgatagccattttgtatccagaagagaggataagctgttgatacagattttaggtgatttgctggttgcggaaagtcacactgacttttgcgcctcccagatggctattatcgatgctgatattaccgtcatattgttctacaatttcagaggcgatcgacaatcccaatccttgccccggacgcagtgtatcggctcttaacccacgttcgaaaacgatatgacgtttattagggggaacaccgggtccgtcatcatcaacaatgatggtgaggtaattctcgcccatcatggcagtaacatgaacaaactccagacaatatttacaggcattctccagaatattccccattacttccagaaaatcattcttttcacccagccaggttaattcaggcgaaatatctaaggtaacattgatccctttgtgttgataaacttttatcagtgcattggtcaggctatcaagcagagttgggacggaaaatatttttttcagaatgaggttatgatcgttgtatatattggcccgatgtaaataataaccgatttgttgagaaatcctgtcaatctgttcaagcatgacgggttcagcctgcttaatggtcatttgcttatttgagcgtagagagcgcagcgtagattgaagcacggccagaggagttttcaggctatgcgtcaggtctgataatgttgttcgatattttttatagcgttggcgctcattatccagtaaggcgttcaggttcttaatcaggccttttaattcagctggtggattttcatctaactcttgccgttcacctttttccagggagcgtatctgagtgatgagtaatttaatcgggcgtaaactccagtccgcagcaagccagattaatggaataattaaaatcagattggcaatcaatacatacccgaaccattcccaaattttttctgacggctgaatattttggggtatggtattgataactac

SEQ ID NO: 1239 - DNA, 6040 bp, Xenorhabdus sp.; identical to SEQ ID NO: 1238
  CDS (1368)..(2606)

SEQ ID NO: 1240 - DNA, 5579 bp, Xenorhabdus sp.; identical to SEQ ID NO: 323
  CDS (5392)..(5565)

SEQ ID NO: 1241 - DNA, 5579 bp, Xenorhabdus sp.; identical to SEQ ID NO: 323
  CDS (2)..(913)

SEQ ID NO: 1242 - DNA, 8390 bp, Xenorhabdus sp.; identical to SEQ ID NO: 56
  CDS (74)..(2425)
  unsure (1)..(8390): unsure at all n locations

SEQ ID NO: 1243 - DNA, 8390 bp, Xenorhabdus sp.; identical to SEQ ID NO: 56
  CDS (2429)..(3757)
  unsure (1)..(8390): unsure at all n locations

SEQ ID NO: 1244 - DNA, 8390 bp, Xenorhabdus sp.; identical to SEQ ID NO: 56
  CDS (4030)..(4458)
  unsure (1)..(8390): unsure at all n locations

SEQ ID NO: 1245 - DNA, 8390 bp, Xenorhabdus sp.; identical to SEQ ID NO: 56
  CDS (4631)..(5068)
  unsure (1)..(8390): unsure at all n locations

SEQ ID NO: 1246 - DNA, 8390 bp, Xenorhabdus sp.; identical to SEQ ID NO: 56
  CDS (5221)..(5571)
  unsure (1)..(8390): unsure at all n locations

SEQ ID NO: 1247 - DNA, 8390 bp, Xenorhabdus sp.; identical to SEQ ID NO: 56
  CDS (6322)..(7176)
  unsure (1)..(8390): unsure at all n locations

SEQ ID NO: 1248 - DNA, 8390 bp, Xenorhabdus sp.
  CDS (2541)..(2678)
  unsure (1)..(8390): unsure at all n locations
tgagccatctttattttcaattagtttgaagaactataagcttgcaatgttttttgacataataagagcgcacacaatcttcctgagaaaaataattacccccaattgcttcatcataaaaaaaacgttccaggggcatcagccagccatgatttgctgcaatcgggtaattcgcactggttaatttttccattcacaataacagttacgttttctcccaaccgggttaaaaacattttcatttgattaatcgtcacattttgtgcttcatcaaggatcacaaacgcattttcaaatgtcctgccacgcatataagcaaaaggagctatctcgacttttccaatttcaggacgaagacagtattgcaaaaacgatgcgcccatacgttttaataacacctcataaactgggcggaaatatggcgcaaacttttctgccacatcgcccggcagataacccagatcttcttccgcctgcaataccggacgtgtcacgatgattttatcaacctctttattaatcagtgcatctgctgccattgctgtactgataaacgttttgccacaacccgcttcaccatcagcaataaccaattgtttattcttgatagcgcgcatgtaacggtactgcacttcattgtgtgggcgaatttcagaggtatccctgttttcacgtgccattccaatcgcttctactccgccaatctgtactaatgaggtaacgttattatcattgcgataacgagactggcgcatatctttttttagcattctcctgacttcgcggcgagatttcatcactgctttttgtctactcatagtcgcacaccttatcgttggcttcacacttgcggtgttctatcaccgatatagaataactgcgttatattgaatagaagtgagctcccttttcagctcattaagacccataaaaaaaccggtgatgagacaaccgcctttctgttggcagttcggtcttcatcaccggttcacttcctgactgaattgtaattgtttcagtatctgtcatcggcattcctcgcatatccgctttatcgtaaccagactaaatttagcggactatgatgtcagtataatgacaatcttttatttatgacaaggtaacaatttaaattttactgaaacattttttaacttttgattgataaatcacaaagcaacaaaaacataaaataacaactcagccagtgttaattattttttacaattagcggctaaatgatacccggctttctgggcttcagattctgaacgaaaataaaccgcatttttctctgaagtggttttataccctgaacaatgagaaagatgatatatcatgctatttttattccctttaatcgcttcatttgcagcagatttagctgttgatttagtcactgaaactggttcggatattgaccgtacagcatttacatttcggctatcagcttgcccggtaaccccctgacctgaatttttatgccctaactgccactttttgcttccagtaacgaatggattgtggtgccccataatccgggcgatacgattatctctttcccgctcccaggcttccacaggatattgccgatcccaggccatcattaactgctgttgctgacgcgacattgttaggttataacggtcgtgcatatagaaataaactctggcaaccatgcctttcactttgtcacgcggttcaaacaaacgtgatttaaaatcaactttactactacaggcgccatacatattgggcagatttttggcagccattccataccctaaattgctgcgatccccatttacttcgccaatagaaggggccagattatgcagatccgattctattacgcgaaatgccgggtcactatcaacgcagttttttctcccgccattctgccagcattgtctctgatgaccgaatacccatgctggtacaatatgctcccactcgatgcgttcagctcggttctgctgcgaccttacatgatagttacatgaaggcaaatcaacgcgtccgccacttttaccaacccattgccagtcacagccacaatacaaagtaccaacacctgacttttccagccccgcataaacatanttttcgtgattcgactttagcctgttcaaagttggccggagcactccatgcgttaaaagatacaataaacccaaaaaataaaagataatttgcccaaaggcgaatattattgctcaaaataatacctatttacttgttgtataataccaatctgttatcctgcctgaatagaaaaataaatgacacattttttatgtttcgaatcttgcttaatttttattacgggatcggtttgttattttagtttgtcaaaactaatatcacttaattcatcgaataagttaatttattacaactttaaaggctcaaataccttgtttattaagctattgcactcaatttatttgggtaaaattaaatcaactttagaatatttaataccataaatgacaattaacgctaaaattgaacagcttgaacacgagctactggatgttgtgaaaaaatattcaggaaatgaagaagttacaattaacacaattaatacttcagaaaacaacttacaaattcaggttatcatcgctggtaaaaatcagttagatattactttaaattcattttctgatgaacaatgactacattacatgtctgaaaaataagcaaagggaaccatcgttgaattaatggctccctttattgctaatctgttaagattaattaatacttaaaattgacataataaaagttaagcaatattaaagtgataataactgatattatttcctataccccaaatcatcatcctgttcatcaccgatgatctttctggtcagttcgtagcagtgggtaattttgccttcgctaagcaggaacctggcaaatacttcaaattccgcatgagttccatcttttttaactaccttgactaagtgatgggtatgaacattatttccattttccgctatggataagatattaatattcgtacttattaaagcttcttttaatacgttaatatgtgaaacgaaatcattgaagagaagctcattgccattggctacctgaatataatcatgagaaaaatagctttcaatatctgaagtagtaacattatctgtttcaagcatatattttaaagcacttactacaacagtagaataagacatagtatacccttccataaacataagaaaaaataatatttattgccattaactattaaccccgccggataaaaatatctgacggggttaataaataaacattggtacaacttaacttaacgaacaactaatacggaaatattcgcgtaccccacgatccccgatgcattagaacccaatagatgagttgaaatatcaggcctgcgtgaaccgacaatgatcaaatcagccccgatttcacgggcagtagagagcactttatctcttggtgaaccaaaggcgacggaaaacgatactttatccttcggcaagttgattttttctacaactttcttgagttcctcttcggaatttgcaatggcttttttcgcaaaggcgctcagtaaatcataatgatagctatagcttacagaaaatctcgaaatatcaggcaccgagtgaaacagatgaacctttgcatcagaaatttttgccaaaaactccgcatgcttgagtgcattgtcagtcaggtgatcttcagcaatatctattggaaccaaaatcgttttatacatatttactcccctgtaatcgaatatttcccatcgttttccaagccgtagcttttttctggctgcatcttgaaatgcgtggggtatagccgctataccattacgtttttacaattagtgaaaccacaacaaaaaccactaatagccgctaagctgcaacagttaattcagataactacctcacaaccaatacggacgtcttcgcatatctgacgactgccgcagagttggaccccagtaaatgagtggtaatattcggccgccttgaaccaatcacaataagatcagcgcccagctcatcagccatggcagtgatttcatctcttggtgaaccaaaagcaatagagtaactaatacgctcagcaggtagatcaatggaagcaaccagcttacccagatccttctcagcagtaatagtcgctttatctttaatttccatatagcctaatgcgtaagcattaataatcgcggatgaaatgggcaatacatgtaaaatatgtaatttagcacctgtttctctggctatgttaagcgcgcagtgaacagctttgcttgtcagttcatcctcagagatatctaccggtaataaaatagttctgtacataatgcacgctcctattaactcaactacctaaattagctgattctacgagtatattaagatccggtactacttactgtgagttgtctaacaactcaacatcttagggttaaaccagactaataaacaaatagttatattcagtggatttcaatatgtattggggttctatatccccccagcctgcaatatattgtattagcgaaatcagtttagcctaaaaaataaaacaaaaaaggtgctgatatgcagcacctttttaaatataaattaggttaatcttttttctctaacggaaaaggagccgggtgtttcgtattgtagttaaaggtgtacatggctgtgatgaccatcatagccaccagcgtccagacgacttcttttgcacctgtacccactacagcccagatacagtaaacaaaggcgataaatgtaatcgcaatataacgccctttttcctgaccaaaatggccgtgaccaagtaacaataacgcagcacaagtatacagataaggtatcagggtaaaaatcactgaaacagatgaaaccagactgaactcttttgccgcattaggagaaatgctgctgaattggacaacagtcattaaaacacccagtatcaacagacctactaccggagttccggctttgttcactttggcaaagactttaggaaataaaccatcatcagctgcggcttttgccgtctgaccggcaagcaatgtccatccccccagagaccccagacagcctgctgctgcacagaatgccacgattgcgccagctgtatcccccagcgccagacgggcagcatcaccaaatggcgaagatgaaataaccagattcgcattcgggatcattcccataatcacactactggataagacataacacacagcagcaattaatacgccaccaatcgtggcaatcggtacatttcgtttgggatttttaacgactccagcagcaactgaggcactttcaacaccgataaaagaccataacgttacgtttaaagtactttgaatggcgctaaacgtatccatgccgctgacgttccaggcatccatataggttgagccgttgaaccaaaaccagccaaatacagcaacggcgacaatcgggatcagggccagcgttgtcgcgaccgcctgaactcgggtaataacatgagggccaataatattcaggaaaacaaatatccacagtattgctatacaggtaaatgttgaaataaccggatctttcagaatggggaaaaagtagctgatataacctactccaatcacaaccatcgcgatattaccaatccagcaggctagccagtaaagaacgttagtctgataacctaaaaatggtccgaatgctctcctcgcataagcataagaaccgcccgggctatcatccagtgaagagatcttggcatagacaatagataatccgacggcaccaatgatggtaaccagccatccaagaatcgctattcctcctgttgccgctagactcgccggcagtagaaaaacacccgaccccatgatatttcccgctaccattaatgtaacggggatcaaacccacttttgttgattccgcaactgtagccataatttattttcccttacgctttacgcacataacgtggtagataccattaatgatttccgtcccttccgtttcatgctcaaagccgggaaattcatgatcccatttttgcaatgcatgcagatagctaatctgcggactgtttttatcaccgaagttttcccctgacatcaacataggaataccgggtggataaggaataattgagttcgcagcaatacgatgaggaagtttatcgagcgcgactaattccacatcattggtcacaatcgcctgataggctgccctgggtatcatgtcaacttcaggcagtatcgcgtatgcctgattcagtttctcacccgggttatttttgtgtaaataagcgaacattttgtcgcctagatctcttactcctgacgtgctatagacatccggataatcgtgcactaaatcaggaaataccttactcaaaggcgtattagcatcataatgatgtttaaatgaaagcagggtattaagtaatgtgccccatttccctttggtaattcccattgaaaacaggaacatgatctggaaatctgtggtacgcgtcggcactataccatgctggcttaaccatgctgtcaccagtgctgccggcactccctgtttcaataacttaccgttgtctcccatacccggagtgaggatactgactttaatgggatcaagcatactccagtcatttggcaaatcttcaaacccatgccaactgtcaccagggttcatcgtccagcagctctgttttgtggtcagcaaatcccgcggagcatccgcaaaaagcattttcttgcctgtggcaggatctgtcacttgctcctgattccacggtttaaagaaccagtcaccttttttactgaaatcccgatacaaacgtgctaatgcctgacgaaaatcgactgcttcttcaataacttcctgagtaagcgaataaccactgttaccgtccatcattgaagtagcaatatcatttgaagcacagatcgcatacagaggtgacgttgtcgcatgcatcatataggcttggttaaatcttgaaaaatctatcggattacggccatctcgcacatggataaaagaggcctgtgatagtgcattcaagagtttatgggatgaatgtgtagcaaaaacggttggccctttatgtgttttggggtcaccccgcatggcataatgatcatgatagataggattaaaacgggcataaccataccatgcttcatcaaaatgaattctatcaacgcttttatccagcaggttttgtacatgtttggcgttatagcaaacaccatcataagtacagtttgtcaccacagtatagacaggctttttcttcaccatatctttggtcagcgggttctgtttcagctttttctggagtgtttttgtctccatttcctgcggataaatcgggccgataataccgtatcgattacggctcggtagcatataaaccggctttgcgcctgtcagaataagcccctgttcaatggatttatgacagttacggtcaataagaacgatatcatcttctgtcatacaggcctgcataatagttcggttagaacctgatgttccgactacaacagaatacgaatgatcggcaccaaacactctggctgtatttctttcactctcgccgaacgctccggtgtgatccagcaatgatcccaaagaagatcgttcaattcccatatcagagcgaaaaagattttctccataataatcatggtaaatacgaccaacaggcgttttattaaaccctactcctgcctgatgcccgggtgccgcccatgaatattcatagatttttctgtaattcatcaaagctgacattaatggcggcaataattgctgacgataacggtgcatcgcggcaatagccctgcccgtaataaaatctgaggaatcttcaagtatccatgcgaattcagttaattgttccaacatcgcatgatccagtaaaaagactgccttttcccgatcacttaataaaaataccggtacatcttcctgacgctcaaatagcttattcagtaatttttggatctgctgatataaatcttcatccatcaatgcacaactgaccattaaacaatcaatgggctcattagcagcaattatcgtatagctatcatcaaaagagtccgcaataacaacttcaacatcccgttcaattaatttatctgccaagcgatgtattgcgttttcaatataatgactatgatgctttgtacccacctcattttttgctatcaataccttcatgacgtttttccttattctatctttacacaaaataaaaaatagacttagtattctctggcggttacccatagaatggttgacacaatcaggaaaattaaacggctgttatcacttatggttttgcgtcaattttcttgagagc

SEQ ID NO: 1249 - DNA, 5264 bp, Xenorhabdus sp.
  CDS (4410)..(5222)
aatatgtctcagttgcctccgtttttagtcaaaaatagcggtgtgaattctggctttatgattgctcaggtaactgcggctgcactggcaagtgaaaataaggcattagcacatccttccagtgttgacagcctgccgacgtcagcgaatcaggaagatcatgtttctatggcaccggcagcaggtcgccgcttgtgggaaatggcggataacgtcaggggtattctggcaattgaatggctgaccgcatgtcagggcatcgattttcgtgaagggttaaagagtagcccgacgcttgagaaagcccgtcatattctgcgtaataaagtgaagtattacgataaagaccgttttttcgcaccggatattgaggcagctatccagttattggcagaacagcaactttctgcattattgccagcagataagatcctgccaattggtaatatcctgagaaaccacataaactaaatcgtctgaaggccggtcttcccggccttatcgttgtatttatctttcacatctaataataaaagaaatagggataaatcatgcaaaacacctcacaactcaagcgtgggctaagcgttcgtcatattcggtttatggcactggggtcggcaattggtaccggacttttttatggttctgcgggagccattcaggccgcagggccggcggtattgctggcgtatattatcggaggagccgctgtttttatggttatgcgggcattgggggaaatggcggttcataaccctgtgcccggttcattctctcattatgccagccattatctggggccgctggcgggttttctgaccggatggacttatgtctttgagatgctggtggtctgtctggcggatgtcaccgcatttggcctctatatgaaattctggtttccccatgttgatcaatggatttgggttctcggtatcgtcttttttatcggggcaataaacctgtgtaacgttaaagtttttggtgagatggagttctggctttccatcataaaagtggttgcgattatagcgatgattattggtggctttgcaatcatgatgtacgggttcgagcagggaaccggtttatcaaatctgtgggaacatggcggctttatgccgaatggcgttactgggattattgcgtcatttaccattgtgatgtttgcattcggtggtattgaagttatcggtattaccgccagtgaagcgaaaaatccggtatattctattccacgagctatcaatgctgtccccgtgcgcattctgctgttttatgttcttaccctgtttgttctgatgtgtatttatccgtggaatcaggttggtcagaacggcagcccattcgtgcaaattttctccagcctgcaattcaactatgccgcccatattttgaaccttgtcgttatcacggcagcaatctcagccattaacagcgatatctttggtgccgggcgaatgatgtacggcatggcgcagaaaaagcaggcacctgcttttttcaacaaactgacaaaacatggcgtgccatgggtgacagtattggtgatgtcagccattttgctggtcggtgtatggctgaattatatcttaccggaagaaatcttcttgattatcgcttctatcgcaacctttgccacggtatgggtatggctgatgattctgttatcgcaatacatgatgcgtcggaaaatgcctgcggaagaagctaagcaactgcaattccctgtaccgttctggccgatagcaccaatgctgacaatcgcatttatggcattcatcatattggtgctgggttatttcccgcatacacgtgttgcgttatatgtggggctcggttgggtagcattactgactgcctgctatttcctgtgggtcaaaacatcgggtgagaaaaaagcctgattaataaaaaagataaagtaaataaaagccatcttgtcagcgcaggatggcttttatgtttttgtcgaacttacatatgcttttcacctgagataattcacatgctcagatagctgatttgtggcggggatcgtggcaaactagcagacttaatattcttgaggtttagaggtgcttgtggataagatttttgtagatgaagccgtcgcggagctgcataccattcaggatatgctgcgctgggcaaccagccgtttcagtgcagccggcatctattatggtcatgggacagataacccatgggatgaggctttgcaattggttcttccaacattgcacctgcctatcgatataccagaaaatatgatgacatcccgcctgacaacaacggagcgtcatcgtattgctgaatgtgttcagcgtcgtatcaacgatcgcattccgatcgcttacctgactaaccgtgcatggttctgtgggcatgagttttatgttgatgatcgggttctggtgccgcgttcacccattggtgagttgattaacaatcaatttgcagggttgctcccacaggagccatcaaccattcttgatttgtgcaccggaagcggttgtattgcgattgcgtgtgcttatgctttccctgaggcagaagttgatgcagttgatatttctgctgatgctttagcggtgacagaacagaatattgaaaatcatgctctgttacatcgcgtcataccaatccgctctgatatgttccgcgatatgcctccgatgaaatacgatcttatcgtgactaatccaccttatgtggatgaagaagatatgagtgatttgccggatgaatttcatcgtgaaccggagctgggtctggctgcgggagtggatgggctggatctggtccgtcgtattcttgcgaccgccccggatttcctgacagaagagggtgtgctgatatgtgaagtcggtaatagcatggttcacctgattggacaatatcctgacgtaccattcacatggctggaatttgaacatggcggcggtggcgtatttatgctgacccgtagccagttagtcgagtatcacgaacattttcacctgttcaaagattaaagttcgttacacacaatattaagcccaatggttaaagtattttttagcacattttatgcccgataaacttcaggttacaacgggtaatatgagataagtccttatatcgccccgcctcttggagttgaattggtatagttcaataaatcgggtgaaataaattatgctttaaccatttgttagtttattgttatttaacatctaatcttaatacataagaaataatggcaggataggtatggcaggcaacagtattggacagtttttccgtgtcaccacatttggtgaatctcacggtcttgcattgggtggaattgttgatggtgttccacctggtattgttatttcggaagccgatttgcaaatcgatctggacaggcgtcgtcccgggacttcccgctataccacccagcgccgtgaacccgatgaggttcgcatactttccggtgtttttgagggagtgacgaccggaaccagtattggcttattaattgaaaacaccgatcaacgttcgcaagactacagtgcgatcaaagatgttttccgtcccggccatgcagattatacctatgaacaaaagtatggattgcgcgattatcgcggaggtggccgttcatctgcccgcgaaactgcaatacgtgttgctgcgggagcgattgccaaaaaatatttattcgaaaaacatggtattcgtatccgtgcctgcctgactcagatgggagatattcactgcgaaatgaaagactgggatctggttgagcagaacccatttttctgtcctgatgaaagtaaattaactcagcttgataaattattacgtgccctgaagaaagaaggggattccattggtgccagagtgaccgttgtggctgaaaatgttccggccggattaggagaaccggtttttgaccgtctggatgccgacattgcccatgccctaatgagcattaatgctgtgaaaggtgtagaaattggtgatggttttggcgtaattggcctgcgtggcagcgaaaacagggatgaaatcacctctcagggttttaccagtaaccatgcgggcggcattctgggggggatcagtagcagccagcctattgttgcccacattgcgctgaaaccgacatccagcattatggtttcaggtaaaacaattaatcggcagggcgaagaagtggatatggttacccggggtcggcatgatccttgtgttggtatccgcgcagtgcctattgcagaggcgatgatggcgattgtcctgatggatcatctgttgcgccagagagcacaatgtgcggatgtgtcaccttcgcttccaagctggtgaaccagagttcaacaaatatgaacaggtgccgaaagacaccgtgatatcggataagcaattttctggtgaaatacgtcatggaatggtcattactgggtccggaagtttatggttttctctttttagttgctctggttgcaggttttatcgattcaattgcaggtggtggcgggctgttaacgatccctgctttattatccacaggtattacgccggttcaggcactggcaacagggaaacttcaggctgtaggtagttcactctctgccagcctgtattttatccgccggggaatagtaagtttacgttctcaacgatttgctatcactatgacggttctggggggcatgtcaggcgcattactggttcagtttgtatcaccggatttactgcgctatgccctaccggttctggttatgattatcggcctttacttcctgctggtaccaaatataggtgcagaagatcgaccgcgccgtctggggccgattgcatttggttgccttgccgggggagggatcgggttttacgatggtgtattcgggccgggaaccggctcttttctggcactttcttacgtaatgctctgtggttacaatctggctaaggcaactgcacatgcaaaagtgctgaattgcgcagctaatctcggtgcattggttttctttattcttggcggacaggttttatggctgctgggttttgttatgctggccggtcagatgattggagcacgcttaggagctggtttggtattaagcagagggcaaaaattgattcgtccgatgctggtaaccatctcttttttaatgagcatcaaattgctccatgaacagcatggtgaaaccatccgttcctggctggcattttatttttaatttttaggattgtattaataaatggctgaacatcattatcaa

SEQ ID NO: 1250 - DNA, 5264 bp, Xenorhabdus sp.; identical to SEQ ID NO: 1249
  CDS (3259)..(4344)

SEQ ID NO: 1251 - DNA, 5264 bp, Xenorhabdus sp.; identical to SEQ ID NO: 1249
  CDS (2076)..(3020)

SEQ ID NO: 1252 - DNA, 5264 bp, Xenorhabdus sp.; identical to SEQ ID NO: 1249
  CDS (552)..(1910)

SEQ ID NO: 1253 - DNA, 5264 bp, Xenorhabdus sp.; identical to SEQ ID NO: 1249
  CDS (1)..(471)

SEQ ID NO: 1254 - DNA, 7064 bp, Xenorhabdus sp.; identical to SEQ ID NO: 129
  CDS (510)..(1739)
  unsure (1)..(7064): unsure at all n locations

SEQ ID NO: 1255 - DNA, 7064 bp, Xenorhabdus sp.; identical to SEQ ID NO: 129
  CDS (1844)..(2995)
  unsure (1)..(7064): unsure at all n locations

SEQ ID NO: 1256 - DNA, 7064 bp, Xenorhabdus sp.; identical to SEQ ID NO: 129
  CDS (3134)..(4096)
  unsure (1)..(7064): unsure at all n locations

SEQ ID NO: 1257 - DNA, 828 bp, Xenorhabdus sp.
  CDS (380)..(826)
tataggaaagcagcacaatttttcatccaaatttgaatattaaaatcttcggaaaaattttaaggaataaaatttgtttatttttttaaaaatttcgccacaatttttttggtataaatatgaccagacttccctatttccagaaaattatcatgtaggatactattcaaccatttaatatcatatcttttttctccaggcaggctaatttcaaggttttttattattgaaaatatggctgaattttcctgattcattgatacccttagattataataattaagaaaaaccaatattatttatttttcagacattatattgacatttaatgttttatcgggtaattatagtaaagtcaaattcaggagaggtatatatgaaaattaaaatcagatctgctgaaactgaagatgctgagcattttcagcgaatttttggccatcccgatgtttatttctatacattacaacgcccatgcccatctcttgaaatgtggcgtgagcgtcttaagaataatagagagcagggggtattcgacttcgtggcagaaatagacagtaatgttgttggtactctggggttatatagttatcccaacccaagacgcaaacatgttatcagcctcggtattggtattgatcccgattattcaggccgaggtattggctcagaaatgatggcatttgccattgactatgttttcaactggcttggttgcattagaattgatctggaagtcttcatagataatgaaaaggcaattgctctttacactaagtttggatttgaaatggaaggcattcaacgtaaagcagcccttaaacaggg

SEQ ID NO: 1258 - DNA, 4342 bp, Xenorhabdus sp.
  CDS (4143)..(4340)
acgcggctattccgctgaggtgacaggggttgcgagaactaatgccaaagtcactatcagccagatgggtagagtgctgtatgaaactcaggtttccgcaggcccattccgtattcaggatctcagtgatgccgtagcagggacactggatgtcagaattgaagagcaggatggtggagtccagcaatttcaggtcaatacggcaaccgttcctttcctgacacgccccggacgagtgcagtacaaatttattggcggacaatccacgaatgaaaagcatcgtcgtgaaggaccggcttttggtttgggagaattttcctgggggatcaataacggctggtcattgtatggcgggcttttggcggcgggtgactatgacgccttatcgctggggataggacgtgatttgctgatgtttggggcattggcgtttgatgtcacaggttcaagagcaaaattgccgggtgagaacaaaacgttgacggggggatcttatcgcctcagttactcgaaacgttttgaagagtacaacagtcagctgacatttgccggatatcgcttctctgaacgtgatttcatgagtatggggcaatatattgaccgtcgttaccgttcccgaaatatatcctctgatagtggaaaagaactttataccgttaatttaaataaacaatttaatgaattagggttcagcaccactttcagctatagccaccaaacttactggaataggcctgcgaataaccgctatgacctctctttatctaagcatctggatatagcgcgttacaaaggtatctacgtcaatttatccgcttatcgtaacaattttgacaataaaaaagatgatggtttgtatctgagtctttccattccctggggagaaacaggaactgtcagctataacggattagtcaatcgtcagggtaatggtcataccgtcggttatttcaatcgaattgatgatcgtaataactatcgcatttcaacaggtgtgaatactcgtggaagggcaacagtagacggttattacacccattatggtgatgaggcattggtgaccgccagcgccagccatcaatccgatagtaatactagcgcgaccctgggtttacagggcgggatcaccgcaacgggcaaaggaatcgctttacaccgtacaaatatagctggtgcaacccgcctgatggtagataccgaaggtgtacggaatgtgcctgtccagacgtatggctcttcagttcactccaattactttggcaaagctgtactggctgatgtgaacagctatcaccgcaataccgcaaatattgacttggataaattaccggatgacgtggaagcaatgcgttcggttcagctggcgacattaaccgaaggtgccattggatatcgtaaattccaggtgatatccgggattaaagccatgacagtgattcgtttgcctgatggttcgttcccgccttttggcgcatctgttatgaatgccagccaacgggaaattggcatggtgagtgatgatggatatgcctacctgagtggaatgaaaaagggtgagaaattgcagattcattgggatggacatgctcagtgtgaggtgactgtaccagatgatatttcatcagagtattcaaccgcatttttgctgccttgccagtttttaaatgtaaatgataagtaaaaagcaataaataaaaccacagaataggttttttatgaagtattgcattaatttttaatgcggtaatgccgatattaattgatcgcagtaatacaaatatacgtttttaaagcatgagctaatgacactatgaaactgaaaaaaattctaatgatagctgccgtgacggtaacaagtttaatgtcagtgcatcaggcaacggcggcgatagcattagatcgtacccgggctatttttaacgggaatgaaaaatctgtcagcttgaatattgagaatcaacaccctgatttgccttatttagcacaggcatggattgaagatgagcagggaaataaaatcaacagcccacttgttgttgttccgcctgttcagcgtattgaagccgggatgaagagtcagattaagattcagactctacccgcgatagcgcaattacctctggatagagaaagcctgttctatttcaacgtccgtgaaattccaccacgcagtgaaaaatcaaatgttctgcaactcgcgatacagacgaaaattaaattgttctaccgcccggaggcagttatcgcacgtcgtgtggatctggaaaacccgtggcaggaaaaactgacgttaacccgtcagggaaaccagtatgtgctgaataacccaacgccatattacgtcacgattgcagaaggtcagagtcaagttaaaggcaagccggtcgagggctttaagccattcatgctggcacctaaaagcagcgaaacactgggcggaacagccagcgctttcggtagtaaccccatcttgacttatgtcaatgactatggcgggcacccgcagttagtttttagttgtagtggcaataactgcacggtgacaaagattctcgatgaagagggctgattagatttggtgaatcacaaaacagacttcatccaatcttaatgaattttaggataaagaataatgaattcgttaaatataaagttctctgactgtgcacggaaattattagtactgccggccttattcctgttgggagtgagcaacctgcaaaatgcttatgcgcaagataaccttcgtcagaatgtcagaattacgatgactgtactggcgccttcctgtgtgattaaaccggaagataaagcgatggaagtggattttggcagcattaccagccgggatctttatttatatcagcgcacgccaagccagccattccgtctgcatttggaagagtgtgaccctaaagttgcgcagaaagtgaatatcaagtttgtcgggcaagagagcaaagaacagccgggattattggcattcagtcacggcagcaatgcttccggtgcggctattggtatggaaaaactggatggtacaccacttccttttaataaaacggctcagttctcacttgctggcacgaacagtagtcatgtcattccgtttcaggcctatgtcaaagccgatcctaaagcacttttgcaaaacaaaattggtgtaggagagttcaatgcgatggcaacttttgagcttagttatgaatagctacgccagtcttttaagtgatttccatgatattcgggccagacttggggctatttagggaaataaattatgcgtcatattacaaaatcattaatgaagttttctgcatcattatttttcttaactgcttcatattcttatggtggagcttatgttatgcccgtgaataccacgacatcgggtaaacaaaccattacgacaatggaactgattgaatggacggaagaagagggaattgagaacccttgttataacaagccgcaatgctatgttggcccggatgttcagtataacaatggtaaacagccgggcatgtatggttcctgtattgatgcaaaggtgtgtttgactgatgcccataaataccggacaaccgcagatgtcatgcgggcttataaaagccagcttggaattcctaaacgggtcacattcccgattattactgcgaatgcacagtgtgtcggcttgttttataccaaccagatatcatcaggttatggtacagcccaaaaatttcctaattcaacctgcaataaattaccgcctgcaaaccagagttgtgaacttattgttcccgttgaaattgcttatggtgaattaaaagcctcagaagttaataacgcaacccgttctattaatggccaatttagctgtgcactttatagcaacaaaataatgttgcaggttaagtctattaataacgaacccaaagtttatctcgatgctaataaacaaatttattcagcattacagattgacggaaagaatgcagcagatggagtgaatgtcaccgctgagggaaaatatataccttccactttcactctgacttcaacgctgcacacattaatacaaccgaaagccggtaaatatgaaggtacagcagttgtcttactaacctatttataatgagggtaaagatactatgcgagtcagtatgctggtaggtaaacggatccaaatgaagcgaaaagagcttgggataacagcagcagagctggcggacagaatcggcgtcagtcaccagcagttatcacgttatgaacggggaacgaatcgaattagtctggaacatttggttgttgtctctattactctgaaaacacctgcaagctttagagcacatggctc

SEQ ID NO: 1259 - DNA, 4342 bp, Xenorhabdus sp.; identical to SEQ ID NO: 1258
  CDS (3374)..(4120)

SEQ ID NO: 1260 - DNA, 4342 bp, Xenorhabdus sp.; identical to SEQ ID NO: 1258
  CDS (2708)..(3211)

SEQ ID NO: 1261 - DNA, 4342 bp, Xenorhabdus sp.; identical to SEQ ID NO: 1258
  CDS (1811)..(2569)

SEQ ID NO: 1262 - DNA, 4342 bp, Xenorhabdus sp.; identical to SEQ ID NO: 1258
  CDS (2)..(1681)

SEQ ID NO: 1263 - DNA, 4354 bp, Xenorhabdus sp.
  CDS (4219)..(4344)
tgaccaaacaagaatattctgccccgtcgtcaggtataattgtcgaaaatggcacttttctttgcggccattatttttgcagccccgcatgcgacacgcaattcagatagtgaatatccttatcgtcaacatagtgattttctttatttaactggatttaatgaaccagagtctgttcttatcctgatcaaaagtgatgaaactcataatcacagtgtgttgtttaaccgggtgcgtgatttgacggcggaaatctggtttggtcgccggctcgggcaagaagctgcgccggaaaaactgggcgtggatcgtgctttaccttttgatgctcttgacgagcaactctacctgctgctgaacgggctggacgtggtttatcatgcccagggcgaatttgaatatgcggacgagatagtcttcagtgccctggataaattgcggaaaaacagccgtcgtaatctcactgtgccatcaatcatagctgactggcgcccgtggttgcatgaaatgcgtctgtttaaatcagaagctgaattggaaatcatgcgtaaagcggggaaaatcagtgcacaggctcataccagagcgatgcagcattgtcgcccggatatgtttgaatatcagcttgaagcggaaattcatcatgaatttacctatcatggtgcacgttatcctgcttataacaccattgttggttccggcgaaaatgcctgcattctgcattacacagaaaatgatcgctgtatgaaagctggcgatttggtgcttatcgatgccggttgtgaatataaaggttatgcgggtgacattacgcgaacatttccggtcaatggtaaatttacccgccctcagcgagaaatttatgacattgtgctgaaatccatcaatgtctctctggagctttataaaccggggaccagcatgcgagaagtgacggggcaggttgtgcgtatcatggttgaagaattggttaagctgggcattttgcatggcgaagtcgaatatttgatcgagaccaatgcttatcgccaatttttcatgcatggtttaagtcactggctgggtctggatgttcacgatgtcgggcactatggtgtggatcgtgatcgtattctggaaccgggcatggtactgacggttgaaccggggctgtatatcgcgccggatgctgatgtaccgccggaatatcggggaattgggatccgtattgaagacgatattttgattacagaatcaggtaatgaaaatttaactgaatatgtcgttaaagatcctgatgagattgaagcgctgatggcacaggcaaaatagagttagagtcatatacccgatgggtttcagactgtatagcagtcagcagacagtttgaaaaacgaaggggaaagtaatcaggaagtgataatgagcgtgattatcgtaggaggaggaatggccggtgcaacactggcacttgccatttctgctttaagtcgggggcagttgcaggtttctttaattgaagcggcagagccggcacaggaacatccgggttttgatgcaagggcaattgccttagcttatggcacatgtcagcgtttaaaccagataggcatctggtctgccctgaaagattgtgtgacgccaattactcacgttcatgtcagtgatcgcggtcatagcggttttgtgaatatccgagcggatgactataacattccggcattgggcaacgtgattgaattgcacaatgccggaagtcgtttatttggtttattaaaacaggcaccgaatatccggctttactgtccggcgaaagtgaattctgttgagcgtttcgactcttctgtctccattactttggataacggtgaaaaactgacaggaaaacttctggtagcagcagacggaagccagtccactgtggccagtgcctgtcatattccgtggcaacgacaaaattatggtcaggcagccattattgccaatgttctgacatctgaaaaacctcagggacgggcgtttgagcggtttaccaagcatggtccgttagcattgctgccaatgtcagaagggcgcagttcactggtctggtgccatccatcagaaaaactgccggaaatcagtcagtgggaagatagtgaatttcttcaccagttacagaaagcctttggctggagactgggtaaaatgttggaaacaggtcagcgacactgttatccgttggctttatccactgccgggcagcagattagccatcgtctggcactggtaggtaactcatcgcaaacgctgcatccgattgctgggcaaggttttaatctgggtatgcgtgatgttatggcgctggctcaggtgatttctgaagctgcgattgaagggctagatattggttcttataacgttctggcgcgttatcggcagcaacgggatattgatcgagaagtaacaattggtattactgatgggttggtcaggctgtttgccaatgattattttccgttgaaggccgggagaaatcttgggctgatggcgatggaaatgttgccattgacgaaaggaacactggctcgccagacactcgggtgggtcaaccatcattcaacggcagagtaagtcagattaagaggaaataaaaacatgcagtcatttgatgtggtgatcgcaggaggcgggatggttggccttgcgctggcctgtggtttacagggtagcggcttgcgtatcgcgattgttgaagaacacccgccaaccggtaaatttcataccaatgatgagcatgcgctgcgtgtttctgccatcaatgctgccagtgaaagattattaactcatcttggcgtctggcagaagatactggcaatgcgtgccagtccttatcagggaatggaagtctgggatctggatagttttgggcgtattcaattcagtgcagcagaaaatggtctgagtcaccttgggcatatcatcgaaaaccgggtgatcaggcaggcgttgtgggaacaggttgaaagtttatctgacatcaccgtttattctcctgcttcgctgagaaatgttgcatggggagaaaacgaagcctttattactctgtctgatgaaagcatgctgacttcacggctggtggttggtgcggatggtgctcactcatggttgcgtcagcatgcggatattccactgacattctgggattatgaacatcatgcactggtcgctaccattcatacagcggaaccccatcagggcgttgcccgtcaggtcttccatggggatggcattcttgcttttttgccactgtctgatccacatttatgctctattgtctggtcattacccgctgaagcagcaaaacagcgcaaagcaatggatactgagttattcaaccgacagttgagcgctacctttgatatgcgtctggggcaatgcgaactggttagtgagcggcaaactattcctctgatggggcgttatgcgcgtaattttgccgctcatcggttagctttactaggggatgcagcacatacgattcatccgttagccggtcagggagtcaatctgggctttatggatgtagcagagctgattggcgaacttaaccggctgaatcaggagggcaaagatatcgggcaatatctctatcttggccgttatgagcgtcgccgtaaacacagtgcggctgtcatgctggctggtatgcagggttttcgccagctatttgatggaaataaccctgtcaaaaagctggttcgtgatgtagggctggctatggctgaccgtttacccggagtgaaaccacaattgcttcgtcatgcaatgggccttcatgatctaccggattggttgatgactcagtccgattcagttgaaaaattctaatgccgccttcaatttaggattagttttttttatatcaggctaaagtgtattcagtcaatttgcttcgcgctttagtctgtttctaataaaaaaagtatatattttgtattttactgccagtttttagcgtccttccacaataaattagaaaaaaatcctgcatgatagtgaagcatttttgaagctatcactacagtgttaataatttatcctatggttcatttcccttttcagtgataacttctaatccaaggtatcgtttgcgctgttaaccgtttttctgcttcatgatccaatatttgtcggttaatacgccgtatttactcagatcaagaacatcttcatgtcaagaatggaaagagggaaataatgtcaaaacacaccccattgtatgagcaacatctggcatgcggagcgagcatggtagattttcatggctggatgatgccccttcactacggctcacaaatcgacgagcatcactcggtgcgtactgtttagaagc

SEQ ID NO: 1264 - DNA, 4354 bp, Xenorhabdus sp.; identical to SEQ ID NO: 1263
  CDS (2617)..(3849)

SEQ ID NO: 1265 - DNA, 4354 bp, Xenorhabdus sp.; identical to SEQ ID NO: 1263
  CDS (1396)..(2592)

SEQ ID NO: 1266 - DNA, 4492 bp, Xenorhabdus sp.
  CDS (4201)..(4491)
gtgctctaaagcaatcaccgcccgcggattttgtcgttgctgacaagggatacgatagtcaggcattgagaacttatattgaagaacaaggtgcaacagcggttattccctaccgaaaaaatagccgaaattcggataaaaagtgggataaggatttatatcgttatcgtcatttagtcgaaaatgcatttgccagaatcaaacattttcgtgcaatcgccacaagatacgataaattagcgagaaattacgccagcacattagcactggcatttatcattatctggttacccatgtgggtcgagtaagtgatgaaaacaaaacgtcaacacgccctagcaccagaaccaatttttttccacttaaatcatttaattcaacctcagacaacggtgtgaaatttgtcattccgcgccgaactgcccatctgtgcgcagtcttggtgtatgttaatatgcgatcgccaattgatggcacttgtttagctatgctttcaattaaagaaagccatacatgaagcgtcacttcgtcatgaggtagcatgccaattttagggaatacatgaatttcaaaagagcgcaaaatatcgtccgcccttacctttgaaccttgcatggttgccgtccaccactccctgataatggtttccaccgtaacagcattcaaaaccgcttctttgcgaacacgcttgactatttttggattgcgattctgttccaactccccgcgatagaaaatcacagagtcacgagcatcttttaagctggttgctgggtaggttccaatgtcaattcgatccccttttccattccaacgatacctgagttgaaaaatgatttttcctttgggtgtcacacgaacagacagtccatccctatctgatttggtaaccattttttcttggggcttaccattggtagaacggagccatgaatcagtaattgccatattaatttcctcaaaaaccaacataactcttactgtagattatgtacacttacatgtacatttttttcatgatacctaatgaacattctcgactgctgttgattaataagaatgcaaggttaatttaattaaattaaaaatcagttaattaaaataaattcatgactaaagacaccttatattgactatttgtgatacattaaatatccttatacaaaaaagataattttctatagttaataacttcgtcaaaatgtggctcttaaacatcagatagagacgtctggtatggatcatatattaaatacccaatcacagaataatttctgcatcagcagtggtgcctgctgtgcatttttcagggtctcattttattgggcggaagctgaggacggaggaggtacagtcccggttgctgccactgagaaactgaacgattttatgtgctgcatgaaaggtacaaacgagtcccatccccgttgtataaacttacagggcaaagttggtcattcggtttcctgtactatttatgacaaacgcccttccccttgccgagaattttcacaggcatgggaaactgacaattacaatgaagcctgtgatcgtgccagagccgctcatggccttcctccattaccaaaaccgaaaacctgaactagcacattcgtcgtacttttatcattgcgatacaatttggaatttcttgggtatatcttattgttatcagaccatattcgttattttcatcacagacactttacttttgtatacttatagttaacaacagtaaaaatccattaccgcaaaatgtgttatccctgttcattttatgaactttctttcatgatattatcaggatgaaaaataatgtctgtttatgttcctactgagtatatcccccagacctgtgagtcgttaccacattatcttgcgaaaaatttacccgccactatctcactcggaggattgcctgaaacctggcagatacaggaagtaggtgatggaaacctgaatttagtttttattgttgccggaacagaaaaaactattgtggtcaaacaatccttaccttacgttcgggctgctggtgaatcatggcagctttcccttgtccgaacctatttcgaataccatgccctattagaagaaaaaaaatttgctcatcagtatgtacccgatgtctatttctatgatgaagaaatgtctttgtttgcgatggaatatttagataaacacattatcttacgcaatagactgatttctggtgaaaaattccctcatttagctaaagacattggcatttttcttgctgatacactattccatacctctgatatagggatggacagcacagagaaaaaagaactggtaagccgttttgccaataaccatgagctttgtaagatcactgaagatctgatttttacagagccatattttaatgctgaaagaaacaactggacttcccctcaacttgataatgatattcatgccatctggcaggatcaggccatgatccaaactgcaatgcggtataaatacaaattcatgactgaaacgcaggcacttttgcatggtgatcttcactcaggttccattatggtcacacctgattccacaaaagtaattgatccagaatttagctttatgggcccaatggcatttgatataggcaattatatcggcaatctgtttatggcttattttgctcagcccgctttgcgggagaatatagagcaatgtgctgattatcaatcatggctcttcatgcagcttgaaacaacgtgggaaatatttgaacgccgttttcgtcaattatggaatgaaaaaacaaccggagaagcctatcctgtcaccatctaccaacagggaactttcaattcatcgttccttaaaactgcccaggatgattttttctccaatttattcgaagaaactctggtatatgccgggcttgaaattaaccgccgcattattggattcgccggtgttgctgatttcaaacagattgatgacccgacattacgagccagttgtgaaaaacaagcactaaaactggcacgtgagttaattgtcaacaagcataagtaccaaaatttttcacagattaaacatcatatgacataaggttaagaaaccgagatgaagattaatggaacccattatcgctctgtttggcttgctgacgatgggtatactgtcgaaatttttgaccagaccaaactcccttttgaattaaaaactattcagttgaatacctttcaagatgctgcaacagctatcaaagatatgtgggtaagaggtgcacctttaattggtgcagttgctgcatatggtatggcactggcgatgcgtcaaagtagcagcaatgaaaatctacaaatagcttacgatactttagttaaaacccggccaaccgccattaatttaaaatcgtgcatatcaggcactagaaaacacgcctcccgttcagcgtgtagaaactgcttatcgtattgccaatgaaattgcagatgaagatgtcgagctgtgccataagattggtgaaaatggtttgaaaatcatacaggaaattgcaacccgaaaatcagccggtgaagtagtgaatatattaactcactgcaacgctggatggctggcaactgtggattggggaccgcattatcacctatttacatggcatatgatgcgggtatcagggttcatgtctgggttgatgaaactcgccctcgtaatcagggtggattgacggtttttgagttaggttcgcatggtgtaccacacactttaattgccgataatgcgggcgggcatttaatgcagcatggcaaagtggatctgtgtatcgtaggtacagaccggacaaccgcaagaggtgatgtgtgtaataaaattggcacttaccttaaggcactggctgcaaaagcaaatcaggtaccattttatgttgcgttaccatcaccgacactagattttaccgtctgggatggcgtaaaagaaatccccattgaacaacgttcaggcgatgaacagtcacatgtctacgggattacggctgaaggaaaatacagttgggtcaatacagcacctcagggaacgctttgcgggaattatgcgtttgatgttaccccggcagaattaattaccggcttgattacagaacgtggaatttgtgatgccagcgcagaagacttacgcatgctctttcctgatttatatccatataatttataatgattattttttatgaccatcagtagaaaacatattgctcaggcaattatcgacacttgccttaagataaatgctctgggtttaaatcaaggcacatctggtaacatcagtgcccgttatcaagatggatttcttatcacccccagcggggtcccatatgaaaagttaactccggaacaaattgtctacattaattattcgggagaagcagaaccagataaaatcccctcaagcgaatggcacttccatctttcttgctatgaagcccgccctgaattaaatgctgttgtacataatcatgcagtcaatg

SEQ ID NO: 1267 - DNA, 4492 bp, Xenorhabdus sp.; identical to SEQ ID NO: 1266
  CDS (1261)..(1572)

SEQ ID NO: 1268 - DNA, 4492 bp, Xenorhabdus sp.; identical to SEQ ID NO: 1266
  CDS (1858)..(3075)

SEQ ID NO: 1269 - DNA, 4492 bp, Xenorhabdus sp.; identical to SEQ ID NO: 1266
  CDS (3)..(308)

SEQ ID NO: 1270 - DNA, 7213 bp, Xenorhabdus sp.; identical to SEQ ID NO: 59
  CDS (438)..(1058)

SEQ ID NO: 1271 - DNA, 7213 bp, Xenorhabdus sp.; identical to SEQ ID NO: 59
  CDS (3715)..(4920)

SEQ ID NO: 1272 - DNA, 7213 bp, Xenorhabdus sp.; identical to SEQ ID NO: 59
  CDS (5046)..(5597)

SEQ ID NO: 1273 - DNA, 7213 bp, Xenorhabdus sp.
  CDS (1268)..(1552)
gcacgaaaatttattgaacacggttccatcgttatagctacagggcgtcgtaaagaacgtctggataaattaagggaagaattaggtgagaatttttatcctatacaactggatgtgagggaccgtgctgcaatagagaaagttatgcaggatttgcctgataacttacgtaatatcgatattctcgtgaataatgccggtcttgcattagggctggagcccgctcatcaggctaaccctgatgattgggaaactatgattgataccaatacaaaaggcttagtgaatatgacccgcgccttattacctaacatggtaaaaatgaatcacggtcatattattaatattggttctgtcgcagcaagctggccatatgcgggcggtaacgtttacggtgctaccaaagcatttgtaaaacagttcagtctgggtcttcgtgctgatttacaagggaagaaagttcgggttacagatattgaaccgggtttggtcggaggaacggagttttctcaggttcgctttaaaggtgatggtgaaaaagtgaataaaacctatgaaggcgcagatgcactgactgcggatgatgttgcagaagctgtattctgggttgctaacctgccgggtcgcgtcaatatcaatacattagaaatgatgcctgtttgccagacatttgcaggcctgagtatacacagagcttaaaaatttaatctgttaatcaatcggtaatggtataggtgttattttatactcggaataataaggcggctctttaaaagaggtttcaattatttcgggtatcattcaatgaatactttgtgagagaggttaatgcatgaatgttcataatcccttgatagccaaatacttccctgccattgcccttcttttactgctattttggcagactcctgcgctatccagatctaatccttgcacatcagataactgcgtcattattaatggcggtagtgagaattctatgaccagagagaccgccagacaggatagagaagagtggaacgcacaacgtgatttgcgtaataaaattaataaacgcaaagaaaagagatttgaagaatatgagaatgacgttgacaatgaggatgcttgtttgaaaaacttcaacctgaatgcttattgggaaccaaaaacaaagcgctgtctggatgtgaatacaggtcgccctattaatcctaaataggctatacccataccaataaaacaaggagataaggtgagaaaattcttactagccggggctattttaatgactgcagctacatcttttgtaactcaggcatcacaagatcaaaatctgcaatccaatgtagtgacaaataaagttgtgacatgtgatgttcttacagagcaaatagcgcagaaaattattaacaacggcgttaaacaagcagactttaagcttgaagttattgataatgatcaagcggttaacagtgatgagaaagtcgttgggagctgtaatcgtggcaaacagaaaattatttatacccgacttcctcacgctaatgacgaaagccagtccactcactaatctatcgctacaagtaattacatcacaagaagggagtgccgctgtgttcactcccttcttgtattcacagatgatcaaatgtcgatataacagtgctatccagataatgagataattcccgctcttctggccttaatagataaggaatttcacccagttgaggcgctggtatgtgacaacgtaacctttccagcacttcagcgtaatgtgctaaaccgggattaatgcgattggctatccaaccaagcaatggcacgccatcactgataatggattgtgcagtcaaaatagcatgattaacacacccggtttgaattcctacaactaaaattacgggcagtttttctttcacaacccagtcagaatagaaagagttatcttgtaataacgcccgccagccaccatttccgtcaacaatcacacgatctgccttatgactcagcttattaagacaatcagtcatttgagcaaaatcaaccgaagttccttctcctgttatgggttcataccctacagcaatttccttttcatgattaaagaattgcagtaatgcgcgggtaacaaccgttttaccgatattggtatccgtgcctgtaacaaataagcgcgttaacataaatttatttccgtaataaccgattagactggttactctttgctgtaactagagaactgagttgaagtttaggtgatgtgtttgagatagggattgcgttagctcaatgttttgcctgatgtacgctatccttgcataatttcgagcagtaaatgaccactgtacaaggattgcttgatcaatgatgcagccggtaaggttcctgaattggcaaatgcggtcgctgctatattgactctttggctgtatccggggagtgaaagctgcgttattttctgttgaatgacaggataaagaatatgtttcgcctcgttcagtggtgaaccaatcaatattttatcgggattgaagatattgaccataatcgccatgatgtgccctattctttcccctacaccccggataatctctgttgccagaggatcaccctgattagcagccagacaaagaaattccactgtcagaggtgttgccggagatattaatgaaccagggtattggctggctagttctcgtgctttcagcaaaatatttttaatgccgacaacggtttccaaacaacctgtgttgccacaatagcaacgctcgccatcaggttcgacctgagtatgcccaatttcaacaacactctgatttcctgcatgaagcattttcccggcgatcataatgccaacaccaacgttatcatcaataacaacctgaataatgttctggcaacccttccctgcaccatataaagattcagctattgtccatgcggtaataccatgctgcaaaaaaactggtacgccgatacgtcggtataaaaatgtgctgagaggaagactctggatactgtaatgcggtgagttatgaataactccattaatcgggtcaataatcccgtttgtggtcacactgatagcagttaaacgctcgaggtgggattgatgccggaaaaaaaaattatcgatcagctcagcaaggcaattcagaaaagagtggttttcagaagcagctaaggataattcttcttcaacaatgaggttattgcccaaatccctaagcccaaatacagtgctatctttatcaatccgtatacataagaattgccatcctttgctgtcggtttttaacccgattgccggacgcccacgaaaccctaaatcaggaaattcaacttctttcactaagtgagcatcgaacagttctcgggtaatttttgtaatactggcaggtgctaactgagattttttagaaagtgcaatacgtgaaataggcccatattgatctatcagaccgtaaaccagaccaagattaatctgtttgatttggtcaacatggcttggttgtacgtctatactcactgagcctcccgctatttaatttacacctctaaataattagtaatgattatgtcgttgtttaaatttgaagatatccgtttagaacaaaaatgtgatctttcacacgaatttctcgtgattgttacgtttgtttaaccactctctgtcagctgtagatatttgagagcaatagttcagttaaccgctctactgccggattgttctgccgttttttatggttaaccagccaaacttcagagtgaaccgacatatgagctaacggaatatattgcaccccatcgattttcatccgtataaatgattccgtaacaatactaattcccaaaccagcggcaacaaggcaaagtatagtcatcgcttcgcctgcttcctgtgaaatcatcggagatactccggcactgataaacaaagtaataatttcatcatatagagctgttcccacatctcgctcaaaaaaaaccaaagggtattcagataacatttttattgtgatcccttcgtttacacactccagtaacggatggccatcgtacacagcaagcataaaacgttcacgaaacaatagccggtgctgcaaattatcaggtaataacgtattgcgcatgatcccgatatcaatccgacctgtctgcaatggagcaatctgagttttggtgttcatctgatgcatgtgaaccaatacatcagggtaacgttcccgaaactggcgcaagctaagtgccactttatgcataaaaggtgtggtggatgtaaaaccgattgatatttcgcctaattcaccctgctgcattctggctgctttagttgccgcagcatcaacctgagataatatctgataggcctctttgaggaacatatgaccagctggtgtaagggtaactgtacgattattacgtgccagcaatttagctttaatatttgcttcaagggactggatctgctggcttagtggaggctgtgaaatgttcagtcgctctgctgcgcgcccaaaatgcagttcttctgcaaccgcaataaaataacgtaagtgccttaattctatattaatattcatcatctaccgtcaattgatatgtttaaaatatcatttgttattattaatatattagacaaaatattaacaacttcctactcttgttccggaacctttttataaaacaaaacattaacgttttttagcctcttagtataaatcctgaatgaagggattttaaggaagtagaatgggtacaatctctgatatcagtagaaattcagtaagtactgatgttacacgagatactgaaaaagaagttcgttatagggaacatagtggctacatacagagcagcgaccctgcctacctacgtgttactttgtcattttttgcggtcgggttagcaacttttgccctgctttacttcatccagcctatattacctatcttatcgaaagagttttcagtttcaccggctaacagcagcttagctctctcattatctactggcatgttatcactgggattattgatcactggccctctgtctgatgcaattggtcgtagaaatgtgatagctatctctctgatttttgcttccttacttacacttttaagcagcatgactaccagctggtatggttttttaattatccgggctttagtaggtttgtctttaagcggcgtagcagcggttgagatgtcgtatgtcagtgaaggtattcatccgaggtgcgcagcctaatagattgggctgtatatcagtggaaattcatttggtggaatgagtgggcgattagcattcggtgtaatgacagattattattcctggcatctggctgtcattttattaggttcattttcacttattgccgctatcgtattttgggtgatgcttccttcctcccaacattttaaatccagttctcttaaacctaagacattatttattaatctaaaattacatttccgcgatcaaggtttaccccttttattcgccgaagctttcttattgatgggaagctttatcacaatgtttaactatattggctatcggttattagatgcaccctatcatttgagccagacagtagtgggattattatctgttgtttatctgaccggtgtttacagtgcaacaaaagccggctcattactgagtaagcatggacgaggaaaggtgttactcattgcaatcagtatgatgctgattggtaatttaatcatggttttttcctctctctgggctttgttcctcggtatgacaattttgacaatgggcttctttgccgctcatactgtagccagtggatggataggcgcgagaactaaacgagccaaagcacaggcctcatcactttatctgttctgttattatgcgggttcgagtatatcagggacgttaggtggagtattttggttttactatcaatggaacggtgttgctatttttatttcactattaacaattagtgctttttatataggtatgaagctcaataaactagcagcataacaaaatatatccagtggattttgagaggcagaaccctctcaaaatccagataaatatagataatcatatgttataaaaacgattattgttaagttcagccgatagaaaagtgacttgaaaaaagatagatatgattattaataatatgattctgttggcaaaaaaacaacctttactaaataaccatcaataatctcaatatttttactttttttcaaagaagctaatatgcgctgaatacaactacgcgaaagtgtacatcgctgttctatatatttaatagctgagatattttctctaaattcatcaggtaacgtgataagacgggataatagactgcatactatgtctttagcgccgtgacggaatatactcatatctctggcatagaggaatgccattttatatgaaatcactctcatccactctcggtaaagatcatgtttttttatagcattcaatgcactaacacgaggcaattggtatatcttacaatcagggccaagctcgatagaataataggtttctgagccagaataaaaagataaccctaagatataaggagaaaaaacagtcgaaataattaaattatcttctattctgcgtatattcacatatcccttcactaataaaaagaacttggcaaattcattctcaattttaattaatgaaccttgcgttggtaaatcggataaaacttcttcagaagaaggtaataatacatcaataattttattaaaagaattcactggcttaattaatttattcatatcaaaccaccccggaataacatccataaaaaataaaaatttttctcatacgctttgaaaaatgaagagcgctttatcccaaccgatttcaaaaactctcccaatagtatagcgaagtaatcacacatttagcttttatcataatgtagaaataattggcaataaccaatttaaaagataatttgccatgaacttccctatttggctttattttcttctgttctggatagttgcactggattttttatgttttaattagtatgttgtaactaaaatgaggaaatccactagaatatgagtgtgagcgttcgaatatgaataaatacctttcaatagagtcacttacttcttgctttaaaaaacaggaaaaaaaattaactgaattggctgaactgttgatgaaatatccgcttattgatgcccgggtattccaattg

SEQ ID NO: 1274 - DNA, 7213 bp, Xenorhabdus sp.; identical to SEQ ID NO: 1273
  CDS (875)..(1201)

SEQ ID NO: 1275 - DNA, 7213 bp, Xenorhabdus sp.; identical to SEQ ID NO: 1273
  CDS (1)..(699)

SEQ ID NO: 1276 - DNA, 7266 bp, Xenorhabdus sp.; identical to SEQ ID NO: 60
  CDS (2)..(481)

SEQ ID NO: 1277 - DNA, 7266 bp, Xenorhabdus sp.; identical to SEQ ID NO: 60
  CDS (2257)..(5325)

SEQ ID NO: 1278 - DNA, 7266 bp, Xenorhabdus sp.; identical to SEQ ID NO: 60
  CDS (5325)..(5753)

SEQ ID NO: 1279 - DNA, 7266 bp, Xenorhabdus sp.; identical to SEQ ID NO: 60
  CDS (5877)..(6935)

SEQ ID NO: 1280 - DNA, 7266 bp, Xenorhabdus sp.
  CDS (3)..(251)
agggtattgtgatgaatcgtactaaaattgtacttggcgcagtaattctcgcttctacgatgttagcaggttgtacaagcacggctaaaaaagttgaccagctttcttctcaggttctaactttgggttccaaagttgaccaactgagcaacgaagttggctcaatgcgttctgatgtacaaacagctaaagacgaagcagctcgtgctaaccaacgtcttgacaaccaagttcgttcctacaaaaaataaatttgtagcattttcaagaatggcgtacttactaagtacgccattctttatgtatatcttgaattatcctacaacttaagtcaggactttgtctgatagactggtgtgggctgattcaacgggggtagtttaacaggctgaacgttcagagtttcgtcttcccgctcctccactaagtgtgatatctctttttccctgtggctggatgaagcccccttctcatttaccgctactggtattccagaacgacgaataatttcctgatcgaccaaaacaacattggttcccttatttccaataaattttaataacccttccgtgcgcttaattggcatggtctgaggatcatccgattctgtttttgacaaaggctgatgaacttcaacatagcgttttccatccggctctactgcatatttgatcggttcattaataatctgaacacgggttcctcttggaacattgtggaaaagcgctttaatgtcatcaggacgtaaacgtatacaaccggagctaacacgcatgccaataccaaaattggcattagtgccatgtatcagatattccccacgcccggctgacagacgcaaagcaaaattacccattggattatctggcccggcaggtattacagcaggcaggataatccctcgactcgcataatccttacgaatatttgtagtaggcgtccatgtcggatttttaataagctggctgactgaggttgtcattgttggtgtattgcgcccaagctgcccaatgccgattggatacacaatgacactatctttccctttcggataataatagagcctcatttcagccagattaataacaataccctgacggggggtattgggaagcaacatctgtgatgggatgaccagcttggttccgggtttaggtaaatacggatcaacaccaggattggcttctaacatcgccaacagacctatttggtatttagcggctatggcttccagtggaagtccatcattaggtacgacatagatggaattctcaccaatcaggctactgttagcaggtggtagcggatattccaccgcataagccatattagctatcccgcagaacgacaacatgccgatcaagaaagtactgataaaagtcaaaaatcgcttcatacacacttcctcaatgataatttgaatgccagtggttaattaatagcctcacataaggctattttacccccctttgccacaataaaaactaagcaaactgcttttatataccaaatattaggacaatatcgctgtagtcaaacgagatgtgcaacataattgttgctgtccgttataaatatcaatctgccagacctgatgagaacgtccaagatggattgctttgcagactcctctaactatgccatcacgcacggctttaatatgatttgcattaatttctacaccgacaactttctgttcaccttcagagcaaagatagccagcaagtgaacccagtgattcagccaacaccacagatgccccaccatgcaaaatcccgaatggctgtttagttcgttgatcaaccggcattgtgccttcaaggaaatcatcaccaaggcgggttatttctattccaacatattctagcatgcagtcatttctcaattgatttagcatgctgacatctgcgctacgtttccaaatgtgttgtttctgaatcactacactatctccaataaagcttgtaatgggtgtttaagtacttttccttctatgcgcttcacctgactacggcatgaataaccggtgctgaggcaatgctccaaagcaaagtggctcaatgctggcgcccatgaaagccggtaaataccaagcgagttttcgagattctttttttcgtgaccatacgttccagccataccacagcaccccacgttgacgctatttaaattaccgccaaaatggtggaagatgtcactccactgtttaccgctgttaggtaatgctgtcacttctgtacagtgcccaaacagataccagtcatgattaggtgttacattgtcacgtttttctgttggaataatttctggcaatatattaaccagccattcatgaactaattggacattaaaattgccccgatgttcaccgagaatatccctgtattcatcccgataacacagaactaaggctggatcgacacccaccatcggaatatccaattgtgccgcacgattcagaaaatcagccgttttccgggctgtcttggcaaacttatttaagaaacctttgacgtgttgcgcttttccgtttggagaaaacggtaacaacactggctgatatcccagtttctcaaccagtcgcacaaaatcagttaccacttttgcatcgtgataactggtgaaaggatcctgaacaataagtacatgctgtttacgctgagatgaagataaggtttcgagctgttccagtgtcgtacccaccgcatagtgcccagccagctgttgctgcaatgtcggataggaaagccgaggtagatcagccataccaataatttgctggctgagtttttgcacccatggctgccgcaggaagaaattaaatacgcggggtgcttttgccattaatggagtactgccttcaacgttagcgacgatgtgatcacgcaacggacgtaaataacggctatggtacaaagccagaaaacgggaacgaagtgatggcacatcaattttaatcgggcattgtgtcgaacaggccttgcaggccagacagcctgacatcgcttcttttacttcatgtgaaaaatcatactcgccccgccatgcctgccaactataacgtattttttcaattagaccacgcaggctgggacgcgactgatcaagcccatgctccagtaattcaggtttaacaccctgttccgtcaaaagccgcagccattccctgacaagagtagctctccctttgggcgaatggatccgatgctggctgattttcattgaaggacacatcgggcttttaacgtcaaaattgaagcataggccattgccattacactccattgctccacggaatgtacttctgacattaacggggatcgttctgtcaaaagtgcctcgcttggccgcatcaaccttcatcatgggagcatcaatgcccatcggtgggcagatttttcccggattcagcctgttaagcggatcaaatgcggctttaatccgacgcagttcatcatataaggtttcaccaaagaaagcggggctatattctgcccggaagccttttccgtgttctccccataacaatccaccatatttggccgtcagatgaactatttcatcagaaatctgcttcattagcatttcctgctgaggatcgcacatatccagtgcaggccgcacgtgtaaaacaccagcatccacatggccgaacataccataattaagctgatggttatctaagagctggcgaaattcagctatataatcagcaaggtgctgaggaggaacacacgtgtcttccacaaatggaatgggtttggctgcacctttactattaccgagtaaaccaacagattttttccgcatcgcataaatgcgttcaatatcatctaaatggtggcaggtctggtaaccgattatcccggcctgattgttcaccatcagttcatcaaggcgctggcagagcgtactaacctgttgatcaatttgctgttcatcattgccactgaattcaacaatattcagcccttgcatatctttatcaggcacatcagtaatcaactcttttactgagtgccagatgatatcttcccgtgcaaggttgagaactttagaatccacggtttcaacagaaagtgccttagcttcaaccatgaatggagcgttacgcagggctgaatcaaaagaatcatattttacatttacaagccgcctgacttttggcaacggcgtaatatccagcgttgcttcggttataaaagccagagtgccttcagagccggttaagatgcgtgtcaggtcaaaagattgcagatcatcgctatagacatggcgtaaatcataccccgtcaaaaaccgattaagttttgggaacttttcaataattaattcccgttgttcacgacagcgttcgagtacggttttatagatatgcccgacggttgaattttctttcgcaatcgattccgccaatgttgtattcattgggcgggtatcaaacatttccccacccagtaaaacagcccggacaccaagtacatgatctgacgtttttccatacaccagcgaaccctgaccggatgcatcggtattgatcatcccacccaatgtggcgcggttactggttgataattcaggagaaaagaaatagccgaaaggctttagatattgattgagctgatctttgataactccggcttcaactttaacccacccttgctccgggttaatttccagaattcttttcatataacgggacatatccacaacaatgccattgttgagtgcctgcccattcgtacccgttccgcctccccggggggtaaatgtcagcgaatggaagcgctcttctcccgcaactcttgccaacagagcaacatcagcagttgagcggggaaagataaccgcttgtggtagcaactgataaatactattatctgtcgccatagtgagtcgatcagcgtaattactggcagtatcgcctgtaaaaccggcttccttcagtacagtcaaatattcctttaccagttcactgactcggggggcttgtggtatacgtgggatcattggctcattgccccttttctaataattgtccacattgctatagttatatactaccttcattgtcgggttcagacagggatctgaacaggcaggcttttaacaatatcacaatatttgccagttttgagcaacatgtgaaataacgttatatttatttaccattgtggatcccgacagtatttttaatcgccgagagaaatcatttcatggaaaaatcgcaaccacatcaggatttacccaaactgctatttgtactgttcttcattttattgctcattacgaccagcttttgggttttaagtccatttgttttagggttcatctggtcaggaatggtggttatcgcaacttggccactaatggaaaaaatacaacgacgtttatggggaaaacgttggatagcagtttccattatgacgttactgctcattttattatttgttattcccattgcattattggtcagcaacctgctggaaaacagtgcgccactcattgaatgggcaaaatctccatccaatatgcacctacctcaattggaatggctaaataaaattccggtcgtcggtcaggatttatatattaaatggcagaacatcatctctgagggcagtaatatgctcatggctaaaattccgccttatatcggaaaaacagccacatggtttttgctcaggctgccaatgccggccggtttttattccatctgaccttaatggtgctgttcagtgttctactttactggaaaggtgaacacgtgatgcagggaattcgccatttcgctatccgactagcaggtaaacggggcgatgcggttgttatattggctgcccgttctatccgcgccgttgcccttggtgtagttgtaactgcccttgtgcaggccatcgcaggcggtattgggttagcaattgcaggtattccctatgctatggttctgactgttctgatgtttgtactctgcgttgcacagttagggcctctgttagttcttattccgtctattatctggctttactggacaggcgaaacaactctgggaacaattttagtggtctggagtttaattctggtcactatggatggtgttcttcggcctttccttattcgtctgggtgccgatttacctatggttttaattcttactggcgtcattggcggcatactttcgctgggcgtaattggtttatttatcggaccgattgtactggctgtttcttacagcctattactggcatggatggatgaagtgcccaaacccgaaattaaatagaagtcactaagctgtatttcaaaaaagctcatatgtaatgagaaaacacaaagcgcggaaaattatttttccgcgcaattatcattaaagtaaatgtattatctagtgcctataaaaaatacacattcattccaccagtaaataatttcaaaaaacttgttacgagaaagttgctttttaaatttgtttttccaattctgatttattaagagaattcttaatgaataaactgatttattaaattagtattcatttcatcgaaactatgtttcccatgaatagcagtcttagtttgtaaacgccacaaactgagatgtgtgaagtaatatatattgctgtgtgtagtctttgcctgtcagcccatgataggcttttttttggaaaaaattcccgttggaattatataaaataccactcgcattaaaaaagatcgtgttataaagaaaaaagcctgaaaatatttttaacaggctttttaattcatgtctgaattagatggttattaattatttcctgctaaagaaacccaggttttcaccactgtatcaggatttaatgataagctgtcaattccttctttcattaaccactcggcaaaatcctcgtgatctgaaggtccctgaccgcaaataccaacatatttcccctgacgcttggccgcctgaatagccatagaaagtaattgtttcaccgcatcattacgctcatcgaataattcggagacaacacctgaatcacgatccaagcctaatgccaattgagtcatatcatttgagccgatagagaaaccatcaaaatgctcgagaaattgttctgctaataacgcatttgatgggatttcacacatcataatgactttcagcccattttcaccacgcttcaagccttgtgatgccaactctgagacaacggcttttgcctgcgccactgtgcgtacaaacgggatcatgacttcaatatttgttaatcccataacattacgt

SEQ ID NO: 1281 - DNA, 6514 bp, Xenorhabdus sp.
  CDS (3)..(1130)
tgatgcggtttatgattaatcagctcgaaacatgggatgaaaataatcgtcctctatttggtaaattatatagcgctctggaaagccggttgatgcaatcggggggatggaatgccgttgttcctcagaatatcagtgtttctccttcacatgatatagggctatcaactggagctaaatccgggccgtctattgccattcagccgatccagtccggtcgtgaattgttggatcaggctaaatctctggctcattatctgcgtaaccagcctcaaggctggctttctgctcatcgattaatgaaaagtgtacgctgggataccattcaccaatgcccaccacaggatactcagggatgtactcggttagcaccacctagaactgatgcccgtgcccagcttaagcgtctttatatgcagcaaagctggggagaattgctggagcaggcagacaggctttttgctgaaggtgtaaaccatttttggctggacgtgcaatggtatctctatcaggcattaagtaagtcaggagcaccctgggatggttgggcggacatcatcaaacaggatctgaaattacttttacagcggttgcacggattagaaaaattagcatggaatgatggtacaccgtttgccgatgacgttactgccagttggatcatgcagaaagtgttggatgaaggaaaagggtggtcagacccatcaatcagccccggtgttgtagtggaagaggatgatattttgtctcttgaggcagaagcaatcgcacaggcggatagtgatggtctggaaaaagcgatggcatggttacaatctcgtccggctgtaacaacaccccgtcagcgctggatgatgcgtttactgatgtcacgtgtggcagagcagtttggtcggaacgatttggcgttacacctgctgagtgaactggatacaactgccggaacccttaccctggtacagtgggagcctgaactggcgtttgagatcaaggcgcgtcgcttgcaattgttgcgggctaaatcccaacgtaatagtacagataaaaccgtgatggctcagcaattggatgaattgctggctgaactggtcaggctagatccagttcgttctgtggtgctctatggataatcattttttacttatggtaaggattccgtttaatggatgatttaacactccgttattttgatgctgaaatgcgttacttgcgagaatccgctcgcgagtttgcgcaggctcatcctgatcgtgctgctttgctggatctggataaagccgatacaccagatccttttgtagaacgtttgcttgaaggctttgctttctctatggggcgattacgccagaaaatagatgatgatctgcctgaattgactgaaggtttgatgagtttattgtggccacactatttgcgtacgatcccatctctgtctgtcgtcgaaatttctcctgatatcagccagatgaaaatggaagaagtggtacccgagggatttgaagttttatcccagcccattgggccaaagcaggcagtctgtcgctatcgaacaacgcaagagcttcatttacacccttttactgtctccaacgtacatatctcgacagagcctgatggccgctctgttctccggatccgttttaattgtggggagcaggctgaatggtctcaggtagatctgtcccgattacgtttttatctgagtggtgatgctcaaatcagtgcggctttgcatttggcactgactaagcgccaatcagccatttatttacgtctgcctgaagttatggatcggattcgttttgatggttatttttctccgggaggttttactgataacgatcggttgtggccgaaaggagatacctcattcagtggttatcagcttttactggagtatttcactttccggcagaaattcatgttcgttgaattaaatggcttggagggtatccggtttcctgacaaaacccgatggtttgaattggatattgttttaagtgagctttgggattctgatttcttagtgaaaacagaacatattcggttgcactgtatttctgtgattaatttattcactttggaagctgaccctttgaccgttaatggactggaaaatgaatatttactgcgtccacgccgtttgcaggatggccatacggaaatttattccgttgatggtgttaatagctcccgacatgctgaagaaggtgcttatgtgccatttaccagtttccgccaccgaggcggaatgttgcgccgcacagcaccagagcgttattaccatactcgtgtcagacgaggagttactggtttacatgatacatggctgatactgggtggacaggtttgggaaaacaaccggaatatcacatcggaaacactctccttacaaattacgggtacaaacggtcagttaccgcgtaaagccctccaaagtactttactgaaccgctgtgagcaaacattgcagcttcctgtcagggtacagaatctatgcaagccaactttacctgcttaccctccggcagaggatcgttttcattggcgggttctgagtcatttgggttcgagttttctcaatatgatggcaagtgcagaagtcttacgtgggacgctggcgttatacaactggcaagaagatgaaatgaataatcgtaaattggatgcgattgtggccgtccgccatgagcatctgcaacgatttgaaaaaggttttttattacgtggcattgatattgaagtcacactggatagtaacggcttcacgggagaaggcgatattcatctgttcggtgaaatgctcaatcggtttttctctttatatgccgatattcatctgtttaaccaactgactttgattattcaaccaagtgggaaatgtatccgatggaccgagaatcacaaccagaacttaccgcgctgattactcagcttaaagataagctgccattggtcaatttttaccgtttttgtcagttgattgagagcctgaaacctgagaaatcgggtttaggtagtacaacaaacccggatgatgaccccgtgcgttttcgtcctcatccggggatgggatttcctgtcagcgaactgaaaacgatagaaacagggcatgaagctcatgacaataaacccagtgtaagaaccacttttttaggattatatggggttgaatcaccgctgccatctgcttatatcgacgatattgctcagcagcgagaaggaacggaagctgtcactgattttctcgatctattcaatcatcgcctgacaacacagttttatcgtatctggcgcaagtactcatatcctgcgacctttaaggctggtggaagtgatgaaacttcgcaatatctgcttggtttaattgggctaggtattcagggatgtgcaaatcatattggcacaccggtttctcgttttttggctttgttgggcacgatgcgtttacctacccggacatcagaaggcatctgctctttgattaatctgctggcacctaataccaaagtggagattatccgccatgatcggcgtcggatagcaatagataatccggtcagaatgagttgccattcacctgttagcctatctcataagcctgtgctgggtcggagtggtattgatgtaaacagtcagatactactgattttgaagactcaggatccagaggaggtcagacaatggttacctcctgatggtcagttacatgcagatttaatgactttgcttcatgcctatctgggatcaagagttcatgctcgtttacaactgcgtatacctcgtgagttgctgccagaagctcaactgagtgtcacaaccgggcagggagtgaagctggggcaaacggcagtgatgagaaggctgtcacctgttacagctaacgatacggttattaaccaaacaatcactcatagggtaattgtgggtaatgtgataatcgataaaacaaatacaggtaagacggcgggcaataacgcggcgattaatagaaccagcacaaataaaaaggtcaatgaaattactattggtttgggacgctatcaggctgcccccgaacagcttttccgaaaagagactcatgaatatggcaactatcgattttaaacatggctccactgaatgcatcattagaaacaataaaagcaccaatacaaaaaaaggggctttggcattcatattgtctgctgcaatgtgtgtgactggttgtggattaacccagactatcggtgatggttcagccgaagtaaccagatcaattttttataaaaaaatcaaagaagttcatctggattttcaggttcgggatggatctaatctgaatgataatggtatcgcattgtctacaatggttcgtatctatcagttaaaagatcgcagggcctttgatttaattgaatatcaaaacatatttacagatgacattaatactatccagtcagatgtattgagtgaaaaggatttacagcttcgtccgggagaaagttattcccttgatatgtctttagaaaaaggagcccaatatgtcgcggttgttgcgatgtttcactcgcctgatctgacaaagaataactggcagattgttatccctaaaacgtcattggatccggataaagcccgccaggttgagttgaaaaatcagacgattcacttattacccctgaaaaaggactgaggcaatgtcacaaccttcactttatgaaatgttgacaggaaatttctcaggaggattggatgtacatcaggtttctgaggaaaatcaggttatcctttccgtactggataatatccagagaattatcaatacgcgtgccggaactctcgctcatttgccggattatggattgccggatatgagcaaaatcatgcagggattgccgggaacagcccacagtttgaccaatattctttcctcgacgctcctgaaatatgaaccacgaattaagcgtctctcgctgaccttgttaccggaacatgaatttggaacgctccgctatgcgttagaagcggaactacatgaagttggtttagttcgctacggtactgaatttatccccggaggtagagtgttgattagacacttgaagaaacaaaattttctcgaatcgaaatatcaatcataaccgtttcaaagcgtgataaaggaataccatgaatacaacgtcagaaaaatatctgaaaacaggggaggatccccgtacttttccagattttaccgcattacgagatgaattgaataaattgcaccacccagcccgccctgatgtgaactgggaacaggctgagcgcctttgtttatcgttatttagtcaaaatggtgtcgaattgcagactgctgcatggtatacgctgatacgcacaactcgagcaggattagtgggattaaatgaagggctggcgattattcatggtttggttacgcatcaatggcaggctatctggccccagcaagtgcatgcccggatagagattctggcaggtttgagtcagcgttcgattaattcattacgtatccagacctttgtctatactgatttaccccgactctatcaggcagagcaatatatctctcaactttgtcagacattacagctgttggaattgaaacatgtcagtcagctggaaagattaggaacatttattcacaatgtggcggttcgtctggagactctggaaggtgcaaatatcgatacttccttagaacagccaccgataccttcacctaatacttctcagcaaacatgggtatatgtcgcaaaaccggaagaagaatctcaatctaatattgtgatgccaccgccagaaaagccggggtttcaatggaagggattcgcgttaggggtcctaatcgcgttggtgtttagcggaggcgggattggtatatggcagtatgcgacgcaggataaagttgatcctcggctacagtctacagtggcttcattaccagaaatattaacagaggatgttcttttttctttgggggctcagtcggataaagaacatggagaaaatagtgtgatattggataagacaaaacgacagttaaaaatgttggagtctttatcgcctgtctggcagcaggattatggtttttctttggttcatcagtctaaggtattgtggccacagtctccactgagtgcggagttatcagcgcaatggaataaacaggtcaccatgaatgccgcttcgattgatagtttagggcattggcactccggtatggatcaattagcagaactcactcgccggttaaattggttggatgaaaaacgcggacgttatataacaggctctgaattgaaatccgttgtgttttctttgactcaaacgttcaataaaaatcctccattggaagaaaaactgagacagcttgaagaaacagcaataaaagaagaattatcgccagcactgatccaacaaacggatatgcattttatccagttactcaatcggtatgcattaattaagcaaaggagaattcagaggcaatcagccttaaaaatcggccaca

SEQ ID NO: 1282 - DNA, 6514 bp, Xenorhabdus sp.; identical to SEQ ID NO: 1281
  CDS (1163)..(2926)

SEQ ID NO: 1283 - DNA, 6514 bp, Xenorhabdus sp.; identical to SEQ ID NO: 1281
  CDS (2890)..(4107)

SEQ ID NO: 1284 - DNA, 6514 bp, Xenorhabdus sp.; identical to SEQ ID NO: 1281
  CDS (4193)..(4675)

SEQ ID NO: 1285 - DNA, 6514 bp, Xenorhabdus sp.; identical to SEQ ID NO: 1281
  CDS (4704)..(5123)

SEQ ID NO: 1286 - DNA, 6514 bp, Xenorhabdus sp.; identical to SEQ ID NO: 1281
  CDS (5152)..(6513)

SEQ ID NO: 1287 - DNA, 2365 bp, Xenorhabdus sp.
  CDS (2272)..(2364)
attttttatatcggagaaaagcagtatgtcaaaaggaaaaaccgtgagtgtccgcctgaatcatccgcatggtattgaatttcccatgccggacggttccagtgtggtgttgaaagggaacgccttttatctctttgggcaggaaaaaggaaagctccccgtaggtctattcggtgaaacgcgagtagatgcggacaagtgggattacatcctgacgcattatggcgagatggaaatcttcaaaaaccagctgtgtgtctgggatgagaaaacgaccagtgctaacgataaagccagcgagaaaaaagaactgcgccacgggcgcgagcctgtagatactagcaaaacagccacggagccggtgaaggagagtacctgatggccatcgtcacctttgacagtggcgccttccttgaactgtatccccgctttgccggtgtcctgacgaaaggacagctacagcaggcgtttgatgtggcctgcttactgctcgataactcggataattcaaatatcccttatgagcctgacggcacgcaggaacgcaagaccttactgtatctgctgacctgtcatattgctacggtagcgctctgggggaataacggtcaggcaggcccagccgccagtgcgacagaaggctcggtcagtgtttcgtttgccgtgccggatgccgctaatgcatcgtggtttaagctcacgccgtgcggacagatgtactggcaagcgacccgtaagtatgtggttggtgggcgatactcagccgtaaaacattatcatccttgggggtgaatcatggtgatgaaaggtggggataaaatcagggccgcattagcactccttgcgggtacgcaatccattgaggttcgtgcgggagtattggcaggcgccactaacgaaaagaccggtgagccgatcgccccttatgcggcggctaacgaatacggcacccgcaatattccgccgcgtccttttatgcgcagtaccattgccaatcagtccgatgaatggggtcgggtgcttggtgctcaactccgaggacgcttacaggaatcgggcgggattgaagccgcatttgaaacggtaggtaagataatggtcgacgatattaaagacagtatcgagcagtcattaccgcctcctaatgccccggcaacggtcgccagaaaagctaaaaaagggatcgcctcgcccgataagacgctggtggatactggcagtatgcaacgggcgattgattatgaagtcattaaaaatggggaatgataatcctctgatattaaattcaaactaatgacctcctttgtggaggttttttatacccgaaaaggtgagaaatgattaatgtcagaactatcgccaataacctcattaccaccgttaacccgaatatcagtgcgattctgttcgcaaacgagggctacaccgtcactgattccggcaggcagatccccaaatataccgagcatgacatcactgtgcagctccaaagcctcagtacgcaggatttagagcatttgggcgtgattaaccagcagggtcagtacatttatgcttatgccaaagggcaaatctccgctatccggcgttcaaagcagaaaggttcagaccggatgaaattcgccgcttacggggaagatgaagtctcggagtggaatgtcaccaaggtgatagagtcttacccctcatgggtcaaggtgctgctatggcgacaataacagtcacgcatgaggatatttttaccgaggtgcgaaagtaccttattgcgttattttcatgtgatgtgatgcagggctatcagaatgacgtgccagtgcctgaaagcggtattgtgatgcacgttctgtttgagcgcgatattgactataccgctaattactaccatcacgaagcctcaaccatcacagcgcagcgttctgtcgagctgtccatgcagttagatttttacggcgaggaggctgactcacgggcaagggtatcctcaccaaaactcacatccaattgccagtgcagtttattttcaatatgccaatggctgcgtatggcacacgcaaggaattctgccgaggcaccacgatggctggtaatatagtagcgcctttcataactctctgttttaccttgctcttcccgccatgactccacaaccgcgataccccccaacgtgtgccactgaggatgacgtttctgcagccaattcacgtcgttaattaaccacaactggcgctgttctatacgaccatgatcgccatccgtacttcggtaagtgccatggataacgcccgtaaaatcctttgccaattggttgtccaaaaagagcttaatatcgtcgtaaaactcaccctgatttcctttcaaggccaaa

SEQ ID NO: 1288 - DNA, 2365 bp, Xenorhabdus sp.; identical to SEQ ID NO: 382
  CDS (897)..(1049)

SEQ ID NO: 1289 - DNA, 2365 bp, Xenorhabdus sp.; identical to SEQ ID NO: 1287
  CDS (1524)..(1718)

SEQ ID NO: 1290 - DNA, 2365 bp, Xenorhabdus sp.; identical to SEQ ID NO: 1287
  CDS (799)..(1266)

SEQ ID NO: 1291 - DNA, 2365 bp, Xenorhabdus sp.; identical to SEQ ID NO: 1287
  CDS (379)..(792)

SEQ ID NO: 1292 - DNA, 2365 bp, Xenorhabdus sp.; identical to SEQ ID NO: 1287
  CDS (2)..(379)

SEQ ID NO: 1293 - DNA, 9082 bp, Xenorhabdus sp.
  CDS (3968)..(5734)
gtctcttttacccgccagttatagatattgcggataactgtttcacctttagcaaacaatgccgttgtcgcgatagtcatggccgcatcaggaatggcattcatatccatatcaataccagtcagtgtgccacgttcacactccacaaaatcatcacccttacgtatggtcgcgcccatcttttccagaacatcggcaaattttgtatcaccctgcaaactgtttttaccaatacctgtaacacgcacggttccgcctttaattgctgcggcagcaagaaaatacgatgcggaagaagcatcaccctcaaccagataatgcccgggagactggtacttctgttgccctttgatccgaaaaacctgatagtgatcgttttctacagttaccccgaaactgttcattaatgccagcgtaatatcaatgtatggtttagaaaccaaatctcctttgatatcaatttcactatcatttaatgctaaaggagcggccatcagtaacgcagtcagaaattgactggaaacactgccatcgacagtcacttttccacctgagaaaccacctctgattcgcactggtgggtaattttcctgctcaagatagtcaatttttgccccagcctgacatagagcatccactaaatgaccaatcggacgctctttcatccgtggttcaccggttaacacaacgtcattatttccgagacacaatgccgcagccagtgggcgcatcgctgttcctgcatttcccaaaaacagttccagctcatttttatcggttattactccaccaataccatcaacctcacaggtagtacgatcttcagacaatcgataagcaacacccagtgctgttaacgcattgagcatatggcgaatatcatcactatccaataaattggtcaggcatgttgttccctgagcaagagcagcaagtaatagcgcacgattggaaacacttttagaaccgggtaagttaatagttccatgaatgtgagagatgggttgtaacgtcagggattgcataaacagcaggatctccggttggtaattcttttatttttaattagttatctatttaaaagattcatatcgggggattcatccccccgataaagaaaatcattatgcattacggcgttcaaaatcagccataaactcaaccaatgccattaccccttcatgaggcatcgcattataaattgaagctctggcacctccggcgactttgtgccctttcaatgcatgcaaaccatgcgcataagcttcttctaaaaacttaccgtcgagagcaggattagctaactgaaaaggtacattcataatagagcggttttgtggcgcaacacggttgatataaaaatcactgttatcaatcgcgtgatacagagatttcgctttggcatgattgcgttttttgatttcttgtaatccaccctgctctttcagccacttgaacaccataccggagagataccatgcaaatgttggtggtgtgttatacatagaatcgttgttcacctgcacggtgtaatccagaatggatggcgtgtgcttatgggccttacccaataaatcttcacgaataataacgacggtaatccctgccggcccgatgtttttctgggcgcctgcataaataacaccatagcggctcacatcaataggtgcagaaagaatggttgaagaataatcagcaacaacaattttatcatcaccaaaatcaggctcttcaaaaatagcaataccaccaatggtttcattagggcaataatgcacataggccgcatcattactcaaatcccattcattcattggttttacacttttaacgccatctgtttcagtaagaatattaatgacattgggtgtgcaatattttgcagcttctttagctgcactttcagcccaataaccgccaacgatatagtctgctgacgttttatcaccaagtagatttaatggtagagcggaaaactgaccacgggcaccaccatgacagaacagcactttgtaattttcaggtatcgataataaatcccggagatctttttctgcttcagacgcaaccgacataaactctttactgcgatgactgatttccataacggatgttcccagtccatgccagttacaaagttcctgctctgctcgacgtaatacttctgctggtaacatggctggaccagcactgaaattatatacctgactcattaactccaccctatcattacggatacaataaaatcggatgtattggttttatcactcccgctctacctctgcaatggttattactagattgttaccaactaaagcataatggctaccggataatattgtttatatatacgtcgtctttcaggttgcctctttgttggctacgctcattcaccccagccaccgttttatcaatatacggttatctgtgctctcgggaattctctcctttgccacagcaacacatcttgaatacattgtttataggcaaaaattaaggaattaaatagaatacattcaactattattctgattatataaatccagcctattttaataaaaacattactatcaaattatatgtcacatgggtttaaattaatcataataaaacatctattaagcatactcttttaatctggaggcactttaaaataaaccacatgttttattaagttaaaatagaaactttcttttttactctatattcaatgagaagaaaacgtattaaaaaaacagaaagacgcctaaaagcgcctttctgtatatttaattcaggaattaatatttagaaaacatttcctgaatttttgctgtgtcagcagtctgagtcagagccaattgcagaagaacacgagctttctgcgggttcaggcgttctgatgcaacaaaaccgtatttgctgtcattaacttcagcattttgagtagtgaaaccgaaaggaatacggttggaacgaacaacaacaacaccatctttagccgcttgtgacagagagtccagaatagacttatagatgttaccgttaccaacaccagcactgataatacctttataatcattctctacaaatgctttaaccggcagatcggaagcattagagtagttatacacaatacctacttttggcagttcagtcagtttgctgacatcaaaaacagctttatctgctttcactggtgctgcagagtagtagtttactttaccgttatgaatgaagccttgtgggcctgcgttcactgcctggaaagcctgaacttcagttgtgctcagtttaccgatgtcacgtccatgaattacagaatcattcatagcaagtaaaacaccacggtttgcagagtctttatctgacgctacaacaacagcattatagaggttcaatgggccatcagcacccagagccgttgatggacgcattgcgccaaccattacgataggtttatgacactgagtggtcagatcgaggaaataagcagtttcttccatggtatctgtaccgtgggtgatgacaaaaccgtcagttttatcacaatctgcattgatttttttcgccagagtcagccagacctgatcgttcatgtcctgagaaccgatgctaacaacctgctcacctttcagattagcaatgtttttgatagcaggaacagcattcagcaatgaatcaacaccgacttgacccgcagtgtagctggatttagttgcagattcaccaccaccagcgattgtgccacccgttgccagaacagtaatgtttggcagcgcaaatgcagaaccactgactaaagccaaaaagctggctattgctgtttttttaatacttttcatcattcaacctcttgtaaaaaaagctattctagtatgtattggacaaataaataaactctaattaacaataatttttgggaattaaatagaggagacaaaaaaaacgccgtatgatatgtaactctttacagaaatcaaagtgaataatgatgacgcagacctacattccaggcaaagatgccgcattagaagactctattcataatttccaacagaaactgagcacactgggtttcaatattgaagaagcctcatggctgaaccctgttcctaatgtctggtcagtacatatccgcgatcgtgactgcccactctgttttactaacggaaaagagcccagtaaaaaagcggcattggcttttgcgttaggtgaatactttgaacgtctatcaactaactattttttcgctgatttttatcttggtaaagccgtagttcagggcgtttttgttcattacccgaacgaaaagtggttccctttaccggaagatgattccctgccaaccgggattctggacgaacatctgcaccgtttttacaacccggataatgaactttatgccagccagttggttgatttacagtccggaaatgaagaacgtgggatctgtgccctgccatttacccgccagtctgataatgaaaccgtctatattccaatgaacattgttgggaacctgtatgtttcaaatggcatgtcagccggtaataccaagaatgaagcccgtgttcaggggctgtccgaggtattcgaacgttatgtgaaaaaccgcatcatcgcagaatgtattagtttgcctgaaatcccacaaactgttatggatcgctatcccggtgttgtagcatcagtcaataaattacaggaagaaggcttcccgctttattgctacgatgcttctctaggcggtcagttcccggttatctgtgttgttctgtttaacccgaataacggtacctgttttgcttcttttggtgctcaccctgaatttggcgttgcactggaacgtaccgtcactgagcttttacagggccgcagcctgaaagatctggatgtcttcacagcaccaacttttgatgatgaagaagtttctgagcacactaaccttgaaacccatttcattgactcaagcggagcaatcagctgggatctgttcaaacaagatgctgattacgaatttgccgactggaatttcagtggtacaaccgaagaagaattcgcaaccctaatgggcattttcaatacgctgagtgccgaagtctatattgctgactatgagcaccttggtgtttatgcctgccgtattctggtaccgggaatgtcagatatttatccggttgaagatttgcacattgccaataatacgatgggaactcacctgcgtgataccattctggccttaccggatagccagtggcagcctgaagagtatctggcgtttcttgagcagatagacgaagaagggctggatgattttacccgtgttcgcgaattgttgggcatcgcctcaggtaaagacaatggctggagtaatttaaggattggtgaactaaaatctatgctggcgctggctggtaatgatctggagcaagccctgatctgggttgagtggacacaagatttcaactcttctgtcttcaccgcagaaagagcaaattattatcgctgcctacatacattgctgctattaactcaggaagaagatcgtaatccaagccagtattatcaggcatttgtcaaaatgtatggtcaggatacagttgatgccgcctcttcatcacttaccggtaaaaattgtttccacgggctgtggtctgtcgattcagaattaaaagcattacccgctcatcaggcattattaaatgcttatgaaaaactacaaaaagctaaacgcactttttggtgtaaataatttgaaatatataaactgttaaattaatgcttattaattaacaaaagtaaaaatcaggttaaattgaattttatttaaaacaacaaataaatgacaatttaacctgttattttacctttcgtctatttcacaccaaattccttatataaaatttttttataaattttaaaaaatatttttaatttaaaaatcaatttgttagaatcgaaaaacgttatttggctggtcatatctcactgaactttcaaattaatatgatccatatcaaattcatgtcagtgtccgtttgttactatcattacgtgctataattaacctaagataaagagagtgttagtatgaaaactgacgacacttttaacctatttccacctgctgtaatggcacaaattgctgatgatagtggtgtctataaagtcaacaaaaatccagcagtgacttatttatcagcaattatggctggtgtatttatttccattgcatttgttttttatattacggctacgacaggaacttcttctattccctatggtttagcaaaactaaccggtggggtatgtttctccttagggctaatgctggtcgtcgtatttggtgtcgacctcttcacttccacagtgttatctattgtttcgaaagcaactggtcgtattacctggtcacaaatgttcagaaactggctacacgtttatatcggtaatctaatcggagccttgtttttcgtcaccttgatgtggctatcaggccaatatgccgttgccaatggcttctggggactgaatgtattacaggtcgctgaccataaaatgcaccatacctttgtcgaggctttatgtttaggtattctggctaacctgatggtatgccttgccgtctggatgagctactcaggccgcagccttattgataaattatctgcattaattctgccaattggtatgttcgttgccagcggctttgaacacagcattgctaacatgtttttaattcctttcgggattgttattaaagaattcgctccaactgagttttgggaaaaagtcggagcaacaccagagcaatttccccagctgacaatttcaaatttcattactgataatctgatccctgtaacgataggtaacatcatcggcggttcgatattggttgggttgacttactggttcatttatttacgtggcagccgctgatcttcatttgcttccacacccaattttttacaagttctactgttaaaaggtaaaaatatcatgtccgagttaaatgaaaaattctccgtagcatggcaaggctttaacgagggtaactggcagaatgaagtcaatgtccgtgactttattcagaaaaactatactccgtatgaaggtgatgaatcattccttgcgggtgccacaaaagcgacagatattttgtgggaaaaagtcatggaaggtatcaaaattgaaaaccgcactcatgcgccggttgattttgatactaacgttgcgtctacaataacctcccatgatgctggttatattgaaaaaactctggaacaaattgttggcctgcaaactgaagcacctctgaaacgtgccattatcccattcggcgggatcaaaatggttgaaggttcctgcaaggcatatgatcgggaacttgatcctaaactgaaacaaatttttactgaataccgtaaaactcataatcagggtgtatttgatgtttatacccctgatattctgaaatgtcgtaaatcaggggtattgacgggtctgccagatgcttacggtcgtggtcgtatcatcggtgattatcgtcgtgttgctctgtacggtattgattttctgcgtgatgaaaaatatgcacaattcacttcattgcaggaaaaactggaaaatggcgaagaccttgaagcaactatccgcctgcgtgaagaaatttcagaacagtatcgcgctctgggccagattaaagaaatggccgctaaatatggctacgatatctctgccccggcgacgaatgccaaagaagcagtacagtggacttatttcgcttatctggcggcagtaaaatcccaaaatggtgctgcgatgtctttcggtcgtgtatccagcttcctggatatctacatcgagcgcgatatacatgcaggaaaactgacagagcaagacgcgcaagaactgatcgaccatttggtcatgaagctacgcatggttcgcttcctgcgtactccagaatacgatgagctgttctccggcgacccgatttgggcaactgagtccatcgcagggatggggctggacggtcgtactcttgttaccaaaaacagtttccgtttcctgaataccctgtacacaatgggaccatctccggaacctaacatgaccatcctgtggtctgaaaaactgcctgctaatttcaaaaaatacgcagcaaaagtatccattgatacctcatctctgcaatatgaaaacgatgacttgatgcgtcctgatttcagcagcgatgattatgctattgcatgttgtgtcagcccgatgattgttggtaaacaaatgcagttcttcggtgctcgcgcaaacctggcaaaaaccatgctgtatgccatcaacggcggtatggatgaaaaactgaaaatgcaggttggtccaaaagaagagccaataaaagatgacgttttggattatgacaccgtcaccgaacgtatggatcactttatggactggctggcaaaacagtatgtcaccgcgctgaatatcattcactatatgcatgataaatacagctatgaagcttctttaatggcacttcatgatcgtgatgttcaccgtacaatggcatgtggtatcgcaggattatctgtagcagccgattctttatccgcgatcaaatatgcaaaagtaactccaatccgtgacgaaaacggtctggctgttgatttcaaaattgaaggtgaatatccacagtttggtaataatgacgcgcgtgttgatgatatcgcttgtgatttggttgaacgcttcatgaagaaaattcagaagttacaaacctatcgcaatgcaactccaactcagtctgtgttaactattacttctaacgttgtttatggtaaaaaaaccggtaacacgccagatggacgtcgtgcaggtgcaccattcggtccgggtgctaacccaatgcatgggcgtgaccagaaaggagcaattgcttcactgacttcagtggctaaactgccatttgcttacgcaaaagatggtatttcttataccttctccatcgtgcctaatgcgttaggtaaaaatgatgacgtacgcagagccaacctggcagccctgatggatggttatttccatcatgaagccagca

SEQ ID NO: 1294 - DNA, 9082 bp, Xenorhabdus sp.; identical to SEQ ID NO: 1293
  CDS (6073)..(6924)

SEQ ID NO: 1295 - DNA, 9082 bp, Xenorhabdus sp.; identical to SEQ ID NO: 1293
  CDS (6985)..(9081)

SEQ ID NO: 1296 - DNA, 9082 bp, Xenorhabdus sp.
  CDS (8058)..(9080)
tgctggcttcatgatggaaataaccatccatcagggctgccaggttggctctgcgtacgtcatcatttttacctaacgcattaggcacgatggagaaggtataagaaataccatcttttgcgtaagcaaatggcagtttagccactgaagtcagtgaagcaattgctcctttctggtcacgcccatgcattgggttagcacccggaccgaatggtgcacctgcacgacgtccatctggcgtgttaccggtttttttaccataaacaacgttagaagtaatagttaacacagactgagttggagttgcattgcgataggtttgtaacttctgaattttcttcatgaagcgttcaaccaaatcacaagcgatatcatcaacacgcgcgtcattattaccaaactgtggatattcaccttcaattttgaaatcaacagccagaccgttttcgtcacggattggagttacttttgcatatttgatcgcggataaagaatcggctgctacagataatcctgcgataccacatgccattgtacggtgaacatcacgatcatgaagtgccattaaagaagcttcatagctgtatttatcatgcatatagtgaatgatattcagcgcggtgacatactgttttgccagccagtccataaagtgatccatacgttcggtgacggtgtcataatccaaaacgtcatcttttattggctcttcttttggaccaacctgcattttcagtttttcatccataccgccgttgatggcatacagcatggtttttgccaggtttgcgcgagcaccgaagaactgcatttgtttaccaacaatcatcgggctgacacaacatgcaatagcataatcatcgctgctgaaatcaggacgcatcaagtcatcgttttcatattgcagagatgaggtatcaatggatacttttgctgcgtattttttgaaattagcaggcagtttttcagaccacaggatggtcatgttaggttccggagatggtcccattgtgtacagggtattcaggaaacggaaactgtttttggtaacaagagtacgaccgtccagccccatccctgcgatggactcagttgcccaaatcgggtcgccggagaacagctcatcgtattctggagtacgcaggaagcgaaccatgcgtagcttcatgaccaaatggtcgatcagttcttgcgcgtcttgctctgtcagttttcctgcatgtatatcgcgctcgatgtagatatccaggaagctggatacacgaccgaaagacatcgcagcaccattttgggattttactgccgccagataagcgaaataagtccactgtactgcttctttggcattcgtcgccggggcagagatatcgtagccatatttagcggccatttctttaatctggcccagagcgcgatactgttctgaaatttcttcacgcaggcggatagttgcttcaaggtcttcgccattttccagtttttcctgcaatgaagtgaattgtgcatatttttcatcacgcagaaaatcaataccgtacagagcaacacgacgataatcaccgatgatacgaccacgaccgtaagcatctggcagacccgtcaatacccctgatttacgacatttcagaatatcaggggtataaacatcaaatacaccctgattatgagttttacggtattcagtaaaaatttgtttcagtttaggatcaagttcccgatcatatgccttgcaggaaccttcaaccattttgatcccgccgaatgggataatggcacgtttcagaggtgcttcagtttgcaggccaacaatttgttccagagttttttcaatataaccagcatcatgggaggttattgtagacgcaacgttagtatcaaaatcaaccggcgcatgagtgcggttttcaattttgataccttccatgactttttcccacaaaatatctgtcgcttttgtggcacccgcaaggaatgattcatcaccttcatacggagtatagtttttctgaataaagtcacggacattgacttcattctgccagttaccctcgttaaagccttgccatgctacggagaatttttcatttaactcggacatgatatttttaccttttaacagtagaacttgtaaaaaattgggtgtggaagcaaatgaagatcagcggctgccacgtaaataaatgaaccagtaagtcaacccaaccaatatcgaaccgccgatgatgttacctatcgttacagggatcagattatcagtaatgaaatttgaaattgtcagctggggaaattgctctggtgttgctccgactttttcccaaaactcagttggagcgaattctttaataacaatcccgaaaggaattaaaaacatgttagcaatgctgtgttcaaagccgctggcaacgaacataccaattggcagaattaatgcagataatttatcaataaggctgcggcctgagtagctcatccagacggcaaggcataccatcaggttagccagaatacctaaacataaagcctcgacaaaggtatggtgcattttatggtcagcgacctgtaatacattcagtccccagaagccattggcaacggcatattggcctgatagccacatcaaggtgacgaaaaacaaggctccgattagattaccgatataaacgtgtagccagtttctgaacatttgtgaccaggtaatacgaccagttgctttcgaaacaatagataacactgtggaagtgaagaggtcgacaccaaatacgacgaccagcattagccctaaggagaaacataccccaccggttagttttgctaaaccatagggaatagaagaagttcctgtcgtagccgtaatataaaaaacaaatgcaatggaaataaatacaccagccataattgctgataaataagtcactgctggatttttgttgactttatagacaccactatcatcagcaatttgtgccattacagcaggtggaaataggttaaaagtgtcgtcagttttcatactaacactctctttatcttaggttaattatagcacgtaatgatagtaacaaacggacactgacatgaatttgatatggatcatattaatttgaaagttcagtgagatatgaccagccaaataacgtttttcgattctaacaaattgatttttaaattaaaaatattttttaaaatttataaaaaaattttatataaggaatttggtgtgaaatagacgaaaggtaaaataacaggttaaattgtcatttatttgttgttttaaataaaattcaatttaacctgatttttacttttgttaattaataagcattaatttaacagtttatatatttcaaattatttacaccaaaaagtgcgtttagctttttgtagtttttcataagcatttaataatgcctgatgagcgggtaatgcttttaattctgaatcgacagaccacagcccgtggaaacaatttttaccggtaagtgatgaagaggcggcatcaactgtatcctgaccatacattttgacaaatgcctgataatactggcttggattacgatcttcttcctgagttaatagcagcaatgtatgtaggcagcgataataatttgctctttctgcggtgaagacagaagagttgaaatcttgtgtccactcaacccagatcagggcttgctccagatcattaccagccagcgccagcatagattttagttcaccaatccttaaattactccagccattgtctttacctgaggcgatgcccaacaattcgcgaacacgggtaaaatcatccagcccttcttcgtctatctgctcaagaaacgccagatactcttcaggctgccactggctatccggtaaggccagaatggtatcacgcaggtgagttcccatcgtattattggcaatgtgcaaatcttcaaccggataaatatctgacattcccggtaccagaatacggcaggcataaacaccaaggtgctcatagtcagcaatatagacttcggcactcagcgtattgaaaatgcccattagggttgcgaattcttcttcggttgtaccactgaaattccagtcggcaaattcgtaatcagcatcttgtttgaacagatcccagctgattgctccgcttgagtcaatgaaatgggtttcaaggttagtgtgctcagaaacttcttcatcatcaaaagttggtgctgtgaagacatccagatctttcaggctgcggccctgtaaaagctcagtgacggtacgttccagtgcaacgccaaattcagggtgagcaccaaaagaagcaaaacaggtaccgttattcgggttaaacagaacaacacagataaccgggaactgaccgcctagagaagcatcgtagcaataaagcgggaagccttcttcctgtaatttattgactgatgctacaacaccgggatagcgatccataacagtttgtgggatttcaggcaaactaatacattctgcgatgatgcggtttttcacataacgttcgaatacctcggacagcccctgaacacgggcttcattcttggtattaccggctgacatgccatttgaaacatacaggttcccaacaatgttcattggaatatagacggtttcattatcagactggcgggtaaatggcagggcacagatcccacgttcttcatttccggactgtaaatcaaccaactggctggcataaagttcattatccgggttgtaaaaacggtgcagatgttcgtccagaatcccggttggcagggaatcatcttccggtaaagggaaccacttttcgttcgggtaatgaacaaaaacgccctgaactacggctttaccaagataaaaatcagcgaaaaaatagttagttgatagacgttcaaagtattcacctaacgcaaaagccaatgccgcttttttactgggctcttttccgttagtaaaacagagtgggcagtcacgatcgcggatatgtactgaccagacattaggaacagggttcagccatgaggcttcttcaatattgaaacccagtgtgctcagtttctgttggaaattatgaatagagtcttctaatgcggcatctttgcctggaatgtaggtctgcgtcatcattattcactttgatttctgtaaagagttacatatcatacggcgttttttttgtctcctctatttaattcccaaaaattattgttaattagagtttatttatttgtccaatacatactagaatagctttttttacaagaggttgaatgatgaaaagtattaaaaaaacagcaatagccagctttttggctttagtcagtggttctgcatttgcgctgccaaacattactgttctggcaacgggtggcacaatcgctggtggtggtgaatctgcaactaaatccagctacactgcgggtcaagtcggtgttgattcattgctgaatgctgttcctgctatcaaaaacattgctaatctgaaaggtgagcaggttgttagcatcggttctcaggacatgaacgatcaggtctggctgactctggcgaaaaaaatcaatgcagattgtgataaaactgacggttttgtcatcacccacggtacagataccatggaagaaactgcttatttcctcgatctgaccactcagtgtcataaacctatcgtaatggttggcgcaatgcgtccatcaacggctctgggtgctgatggcccattgaacctctataatgctgttgttgtagcgtcagataaagactctgcaaaccgtggtgttttacttgctatgaatgattctgtaattcatggacgtgacatcggtaaactgagcacaactgaagttcaggctttccaggcagtgaacgcaggcccacaaggcttcattcataacggtaaagtaaactactactctgcagcaccagtgaaagcagataaagctgtttttgatgtcagcaaactgactgaactgccaaaagtaggtattgtgtataactactctaatgcttccgatctgccggttaaagcatttgtagagaatgattataaaggtattatcagtgctggtgttggtaacggtaacatctataagtctattctggactctctgtcacaagcggctaaagatggtgttgttgttgttcgttccaaccgtattcctttcggtttcactactcaaaatgctgaagttaatgacagcaaatacggttttgttgcatcagaacgcctgaacccgcagaaagctcgtgttcttctgcaattggctctgactcagactgctgacacagcaaaaattcaggaaatgttttctaaatattaattcctgaattaaatatacagaaaggcgcttttaggcgtctttctgtttttttaatacgttttcttctcattgaatatagagtaaaaaagaaagtttctattttaacttaataaaacatgtggtttattttaaagtgcctccagattaaaagagtatgcttaatagatgttttattatgattaatttaaacccatgtgacatataatttgatagtaatgtttttattaaaataggctggatttatataatcagaataatagttgaatgtattctatttaattccttaatttttgcctataaacaatgtattcaagatgtgttgctgtggcaaaggagagaattcccgagagcacagataaccgtatattgataaaacggtggctggggtgaatgagcgtagccaacaaagaggcaacctgaaagacgacgtatatataaacaatattatccggtagccattatgctttagttggtaacaatctagtaataaccattgcagaggtagagcgggagtgataaaaccaatacatccgattttattgtatccgtaatgatagggtggagttaatgagtcaggtatataatttcagtgctggtccagccatgttaccagcagaagtattacgtcgagcagagcaggaactttgtaactggcatggactgggaacatccgttatggaaatcagtcatcgcagtaaagagtttatgtcggttgcgtctgaagcagaaaaagatctccgggatttattatcgatacctgaaaattacaaagtgctgttctgtcatggtggtgcccgtggtcagttttccgctctaccattaaatctacttggtgataaaacgtcagcagactatatcgttggcggttattgggctgaaagtgcagctaaagaagctgcaaaatattgcacacccaatgtcattaatattcttactgaaacagatggcgttaaaagtgtaaaaccaatgaatgaatgggatttgagtaatgatgcggcctatgtgcattattgccctaatgaaaccattggtggtattgctatttttgaagagcctgattttggtgatgataaaattgttgttgctgattattcttcaaccattctttctgcacctattgatgtgagccgctatggtgttatttatgcaggcgcccagaaaaacatcgggccggcagggattaccgtcgttattattcgtgaagatttattgggtaaggcccataagcacacgccatccattctggattacaccgtgcaggtgaacaacgattctatgtataacacaccaccaacatttgcatggtatctctccggtatggtgttcaagtggctgaaagagcagggtggattacaagaaatcaaaaaacgcaatcatgccaaagcgaaatctctgtatcacgcgattgataacagtgatttttatatcaaccgtgttgcgccacaaaaccgctctattatgaatgtaccttttcagttagctaatcctgctctcgacggtaagtttttagaagaagcttatgcgcatggtttgcatgcattgaaagggcacaaagtcgccggaggtgccagagcttcaatttataatgcgatgcctcatgaaggggtaatggcattggttgagtttatggctgattttgaacgccgtaatgcataatgattttctttatcggggggatgaatcccccgatatgaatcttttaaatagataactaattaaaaataaaagaattaccaaccggagatcctgctgtttatgcaatccctgacgttacaacccatctctcacattcatggaactattaacttacccggttctaaaagtgtttccaatcgtgcgctattacttgctgctcttgctcagggaacaacatgcctgaccaatttattggatagtgatgatattcgccatatgctcaatgcgttaacagcactgggtgttgcttatcgattgtctgaagatcgtactacctgtgaggttgatggtattggtggagtaataaccgataaaaatgagctggaactgtttttgggaaatgcaggaacagcgatgcgcccactggctgcggcattgtgtctcggaaataatgacgttgtgttaaccggtgaaccacggatgaaagagcgtccgattggtcatttagtggatgctctatgtcaggctggggcaaaaattgactatcttgagcaggaaaattacccaccagtgcgaatcagaggtggtttctcaggtggaaaagtgactgtcgatggcagtgtttccagtcaatttctgactgcgttactgatggccgctcctttagcattaaatgatagtgaaattgatatcaaaggagatttggtttctaaaccatacattgatattacgctggcattaatgaacagtttcggggtaactgtagaaaacgatcactatcaggtttttcggatcaaagggcaacagaagtaccagtctcccgggcattatctggttgagggtgatgcttcttccgcatcgtattttcttgctgccgcagcaattaaaggcggaaccgtgcgtgttacaggtattggtaaaaacagtttgcagggtgatacaaaatttgccgatgttctggaaaagatgggcgcgaccatacgtaagggtgatgattttgtggagtgtgaacgtggcacactgactggtattgatatggatatgaatgccattcctgatgcggccatgactatcgcgacaacggcattgtttgctaaaggtgaaacagttatccgcaatatctataactggcgggtaaaagagac

SEQ ID NO: 1297 - DNA, 9082 bp, Xenorhabdus sp.; identical to SEQ ID NO: 1296
  CDS (6861)..(7958)

SEQ ID NO: 1298 - DNA, 9082 bp, Xenorhabdus sp.; identical to SEQ ID NO: 1296
  CDS (5259)..(6302)

SEQ ID NO: 1299 - DNA, 6109 bp, Xenorhabdus sp.
  CDS (2148)..(3569)
gtgctctaaaggttgcacttaaatcgagttttgctaaggttgttttaagttttagtgtgttgttttcaggtggggtatcgccaagcggtaaggcaccaggttttgatcctggcataccctggttcgaatccaggtaccccagccatatttctgaaaacgataattgctaagaaatagatagccattaataaaacaaggtttaaaatgaaaatgttcaggtggggtatcgccaagcggtaaggcaccaggttttgatcctggcataccctggttcgaatccaggtaccccagccattcttctgaaggttttcataaaatttacggttaacgtaaatggctacgtagctcagctggttagagcacagcactcataatgctggggtcacaggttcgaatcccgtcgtagccaccattttaaattcagttggggtatcgccaagcggtaaggcaccggattctgattccggcattcccaggttcgaatcctggtaccccagccaaatttttcaaaacgttgactgaactgataaccgccttttggtggttttttttgtttttctgccaaaaaatatccccagcttatcgcctgataatctccatctttgtttgataacctacctgaaattgacacatctaatcctattttatgaagtgctcaatagaaaatatatctaagggtagaagtattcaaaatacggctcctaccctcaaaatattgactaaaacagtaatcacacccccagcgcatatttcagcgctagttttttcatcgcacctgagcgctgcgctgccatcaatgccaaattacgcattgttttcaatcctggcagatcatggctgaatgccgtatgaaagagatccattcccgcctgcataatcaaattatcaggcatcctgcgacgttgataacgcatcagtacagtcagggaatcccactcttccagtgattctttggcatcaatcaatacattgagtaaagcatctacatcccgatagcccagattgacaccctgccctgccagtgggttaattgtatgagctgcatctcccagcaaaaccagcccttcacgcacataatcgctggcatggtgacgggtcagaggaaatgaaccagcggcaatcggagtcactttacccaaacgggccggaaacgcctgaaatatttcccgttcaagctgtttcattgacatcgcctgtaactgacgaatgcgggcgggagagtcataccataccagcgatgcccactggtcgaataacggcagaaaggctctggggccagaaggaaaaaattgctgccatgttatatcctgctgaagttgttccgttttaatagttatcagcatgcacgactgacgatattgccatcccctgctgccaattcccgctaattgccgaacctgagagcgggcaccatcagcaccgataatcaaacgagtgtttaattccgtaccatcagtcaattcaagttgccatgttttatgaccaccatgacgctgcatcgatttcagctctgcgggacaaaacagtgtcaggttaggataccgttcaaactcctgccacaaggccagttgcagaatgcggttttctaccatgtatccaagttcaggcaggccaaggcttgctgcatcaaaaatcacattggaatcattctgttcccatgtctccagctttcgataaggtacgctacgcatctgcgcaacatgttcccaagcacccaattgcttcagcaaatccacggatgcccggctaatggcagaaatacgaatatccggctcactttctgcactgtagggttgtggtggctgatgttccaacagagcgacacgccagccttcctgcgccaatcccaatgccgttgccgcaccaatcatcccggcacccacgataaccatatcgaatttttgttgtagattattcatattcatcacgctattaacttcttgattaaaatagtgtaccggaattttccctttccggctgtgaatatccggtgttacagtctggtcactggtgcctcaaatgaatacaatagcctgtaacattatgctaaacacactgtattcaatatgctggttcaatagactatgcttttcagtgttgacgcatcatttcactggaaacaccggatacacaaaatgtcgacgataaaaaaactgtatatcaaaacctggggctgtcagatgaatgaatacgattcatccaagatggccgacctgctggaaaccactcacggttatcagttaaccgatatcgccgaagacgcagatatcttactcttgaatacttgttcaatccgtgaaaaggcccaagaaaaagtctttcaccaactcgggcgctggaaagggctgaaagacaaaaaccctgaagttatcattggcgttgggggctgtgtggcttctcaggaaggggattacattcgccagcgtgctccgagcgttgatattatattcgggccacaaaccctgcaccgcctgccggaaatgattaatcatgtgaaaggcacccgcagccctgttgttgatatcagtttccctgaaatagagaaattcgaccgcctaccagaaccccgtgctgatggcccgacggcattcgtttctatcatggaaggctgtaataaatactgcacattctgtgttgttccttacacccgtggggaagaagtcagtcgtccttgtgatgatattctgtttgaaattgctcagcttgctgcacagggtgtgcgtgaagtaaacctgctcggtcagaacgtgaatgcttatcgcggtgcaacatttgacggagatatctgcacatttgctgaattactgcgtctggttgcggctattgacggaatcgaccgcatacgattcactaccagccatccaattgaatttactgacgatatcatcgccgtgtatgaagacacacctgaactggtcagcttcctgcacttacctgtccagagtggctctgaccgcattctgactctgatgaaacgtgctcatactgcgctggaatataaaggaattattcgtcgtttgcggaaggctcgtccggatatcctgatcagttcagatttcatcattggtttcccgggtgaaacacaggatgactttgaaaaaacaatgaaattaattgccgatgttaatttcgacatgagcttcagttttatttattcagcacgtccgggtactcctgcggctgatttgccggatgatgtgagtgaagacgagaaaaaacagcgtctgtacctgctccagcagcgtattaaccaacaagccatgagcttcagccgggcaatgcttggcagtactcagcgcattcttgttgaaggcccgtcccgtaaaaatattatggagctttccggacgcacggaaaataaccgtgtagttaattttgaaggcgcacctgatatgattggcaagtttgttgatgttgaaattgtcgacgtctatgccaattccctgcgcggtaaggtcatccgcaccgaagatgaaatggatttacgtgtctatgaatcacctgaatcagtcattgcccgaacccgtaaagaagacgaaatcggtgttggcatttatcagccttcataacaggccagccgtaaaagaacaggataactttaacaaataggccggattcacaggccttaacatagagataatcagtgacacaaatcaacccacaagtagcaacacaagagatctttctggaacccgcagataatcagcgattaatgagcctgtgtggcccacttgatgacaatctgaaacaacttgaacgtcgcttgggaatagagataaaccgccgcgacaatcgtttcaaattggtgggcaagccactgtgtgtcagcgcagtagccagtatactgcgccgcctgtatgttgaaaccgcccctgtacgcggagtgataccggatctcgaacctgagcagattcatctggctatcacggaaacccgcgtactggagcaagcagcagaaagcgtccctgactacggtaaggccgtgaatatcaaaaccaaacggggcgtagtcaaaccccgcacacctaatcaggctcagtatattgccaatattcttagccatgatattacgtttagtatcgggcctgcggggacgggtaaaacctatctggccgttacagcagcagttgatgcactggagcgtcaggaaatccgccggatattgctcacccgtcctgctgttgaagccggagaaaaactgggctttctgccgggggatctgagccagaaagtcgatccttatctacgtccgctttacgatgcattatttgagatgctgggatttgaaaaagttgagaagctgatcgaaagaaatgtcattgaagtcgctccactggcctatatgcgtggacgaacgctcaatgatgcctttattattctcgacgaaagccagaatacaaccatcgaacagatgaaaatgtttctgacccgtattggtttcaactccaaagcagttatcactggtgatgtcacccagatagacttgcccagaggccagaaatcaggtctgagtcacgcaatggaagttttatctgacgttgatgaactgagctttaacttcctctatagcgaagatgtggttcgccacccggtagttgccaaagtcgtcatcgcttatgaagcatgggaagccgctgagcagaaacgtaaacaggcgcttaatgaaaagcgcaggcaggaagcacaatgagttcagttatattagatttacagattgcatgtgaaaaacctgaagggcttcctgaggaggttcttttccgaaactggctggaaggcgttttgccacaatttcaggcagaaagtgaagtcacaatccgtttagtcgatgaggcagaaagccacgaattaaacctcacttatcgagggaaagacaaaccaaccaatgtgttatctttcccgtttgaagctccgcctgaaattgaactacccttgctcggtgatttaatcatatgccgtcaggttgttgaaaaagaagcgcaggagcagcaaaaaacagtcgaagaacactgggcacatatggtgatacacggctgtcttcatctgcttggatatgaccatattgaagatgaagaagcagaagaaatggaatctctggaaacagaaattctgggaaaaatgggttatcctgatccctatcttgcggaaaaagaataaccaccaataatatttttatgataaatattacgatcactttaattaatgaggaaatacaattagaacgccatgagcgacgaccatccttctagtaacgatagccctggacctaagaaaggcttttttgcacttcttaatcagattttccacggtgagccgaaaaaccgcgatgatttagttgaactgatccgtgattcagaacagaacgacctcatcgaccccgatacccgagaaatgctcgaaggggtgatggatattgctgaccagcgcgtgcgtgacattatgatcccacgctcacaaatcgttaccttaaaacgcaaccagcctctggacgaatgtctggatgtcattatcgagtcagcccactcccgtttccctgtgatcagcgaggataaagatcacattgaaggcattctgatggcaaaagatcttctgccatttatgcgtacgaacgcagaacctttcagcattgataaagttctgcggcaagcggtggtggtgccggaaagtaagcgcgttgaccgattgctgaaagaatttcgttcccaacgctaccatatggcgattgttatcgatgaattcggcggtgtttccggtctggtcacgattgaagatatacttgaactgattgtaggcgaaattgaggacgagtacgacgatgacgaagataacgacattcgtgccctgagccgccatacttactcagtgcgagcattggctcaaattgaagatttcaacgatgttttcggcactaatttcagtgatgaagaagttgataccataggcgggttagtcatgcaggcattcgggcatctgccttcccgtggagaatccatcagcattaatggctatcatttcaaagttgcaatggcagatagccgtaaaatcattcaggttcatgtaaaaataccggatgatgctgaagtttctggccttgataaagaactatttagag

SEQ ID NO: 1300 - DNA, 6109 bp, Xenorhabdus sp.; identical to SEQ ID NO: 1299
  CDS (3644)..(4690)

SEQ ID NO: 1301 - DNA, 6109 bp, Xenorhabdus sp.; identical to SEQ ID NO: 1299
  CDS (4687)..(5154)

SEQ ID NO: 1302 - DNA, 6109 bp, Xenorhabdus sp.; identical to SEQ ID NO: 1299
  CDS (5224)..(6108)

SEQ ID NO: 1303 - DNA, 6109 bp, Xenorhabdus sp.
  CDS (4191)..(5378)
ctctaaatagttctttatcaaggccagaaacttcagcatcatccggtatttttacatgaacctgaatgattttacggctatctgccattgcaactttgaaatgatagccattaatgctgatggattctccacgggaaggcagatgcccgaatgcctgcatgactaacccgcctatggtatcaacttcttcatcactgaaattagtgccgaaaacatcgttgaaatcttcaatttgagccaatgctcgcactgagtaagtatggcggctcagggcacgaatgtcgttatcttcgtcatcgtcgtactcgtcctcaatttcgcctacaatcagttcaagtatatcttcaatcgtgaccagaccggaaacaccgccgaattcatcgataacaatcgccatatggtagcgttgggaacgaaattctttcagcaatcggtcaacgcgcttactttccggcaccaccaccgcttgccgcagaactttatcaatgctgaaaggttctgcgttcgtacgcataaatggcagaagatcttttgccatcagaatgccttcaatgtgatctttatcctcgctgatcacagggaaacgggagtgggctgactcgataatgacatccagacattcgtccagaggctggttgcgttttaaggtaacgatttgtgagcgtgggatcataatgtcacgcacgcgctggtcagcaatatccatcaccccttcgagcatttctcgggtatcggggtcgatgaggtcgttctgttctgaatcacggatcagttcaactaaatcatcgcggtttttcggctcaccgtggaaaatctgattaagaagtgcaaaaaagcctttcttaggtccagggctatcgttactagaaggatggtcgtcgctcatggcgttctaattgtatttcctcattaattaaagtgatcgtaatatttatcataaaaatattattggtggttattctttttccgcaagatagggatcaggataacccatttttcccagaatttctgtttccagagattccatttcttctgcttcttcatcttcaatatggtcatatccaagcagatgaagacagccgtgtatcaccatatgtgcccagtgttcttcgactgttttttgctgctcctgcgcttctttttcaacaacctgacggcatatgattaaatcaccgagcaagggtagttcaatttcaggcggagcttcaaacgggaaagataacacattggttggtttgtctttccctcgataagtgaggtttaattcgtggctttctgcctcatcgactaaacggattgtgacttcactttctgcctgaaattgtggcaaaacgccttccagccagtttcggaaaagaacctcctcaggaagcccttcaggtttttcacatgcaatctgtaaatctaatataactgaactcattgtgcttcctgcctgcgcttttcattaagcgcctgtttacgtttctgctcagcggcttcccatgcttcataagcgatgacgactttggcaactaccgggtggcgaaccacatcttcgctatagaggaagttaaagctcagttcatcaacgtcagataaaacttccattgcgtgactcagacctgatttctggcctctgggcaagtctatctgggtgacatcaccagtgataactgctttggagttgaaaccaatacgggtcagaaacattttcatctgttcgatggttgtattctggctttcgtcgagaataataaaggcatcattgagcgttcgtccacgcatataggccagtggagcgacttcaatgacatttctttcgatcagcttctcaactttttcaaatcccagcatctcaaataatgcatcgtaaagcggacgtagataaggatcgactttctggctcagatcccccggcagaaagcccagtttttctccggcttcaacagcaggacgggtgagcaatatccggcggatttcctgacgctccagtgcatcaactgctgctgtaacggccagataggttttacccgtccccgcaggcccgatactaaacgtaatatcatggctaagaatattggcaatatactgagcctgattaggtgtgcggggtttgactacgccccgtttggttttgatattcacggccttaccgtagtcagggacgctttctgctgcttgctccagtacgcgggtttccgtgatagccagatgaatctgctcaggttcgagatccggtatcactccgcgtacaggggcggtttcaacatacaggcggcgcagtatactggctactgcgctgacacacagtggcttgcccaccaatttgaaacgattgtcgcggcggtttatctctattcccaagcgacgttcaagttgtttcagattgtcatcaagtgggccacacaggctcattaatcgctgattatctgcgggttccagaaagatctcttgtgttgctacttgtgggttgatttgtgtcactgattatctctatgttaaggcctgtgaatccggcctatttgttaaagttatcctgttcttttacggctggcctgttatgaaggctgataaatgccaacaccgatttcgtcttctttacgggttcgggcaatgactgattcaggtgattcatagacacgtaaatccatttcatcttcggtgcggatgaccttaccgcgcagggaattggcatagacgtcgacaatttcaacatcaacaaacttgccaatcatatcaggtgcgccttcaaaattaactacacggttattttccgtgcgtccggaaagctccataatatttttacgggacgggccttcaacaagaatgcgctgagtactgccaagcattgcccggctgaagctcatggcttgttggttaatacgctgctggagcaggtacagacgctgttttttctcgtcttcactcacatcatccggcaaatcagccgcaggagtacccggacgtgctgaataaataaaactgaagctcatgtcgaaattaacatcggcaattaatttcattgttttttcaaagtcatcctgtgtttcacccgggaaaccaatgatgaaatctgaactgatcaggatatccggacgagccttccgcaaacgacgaataattcctttatattccagcgcagtatgagcacgtttcatcagagtcagaatgcggtcagagccactctggacaggtaagtgcaggaagctgaccagttcaggtgtgtcttcatacacggcgatgatatcgtcagtaaattcaattggatggctggtagtgaatcgtatgcggtcgattccgtcaatagccgcaaccagacgcagtaattcagcaaatgtgcagatatctccgtcaaatgttgcaccgcgataagcattcacgttctgaccgagcaggtttacttcacgcacaccctgtgcagcaagctgagcaatttcaaacagaatatcatcacaaggacgactgacttcttccccacgggtgtaaggaacaacacagaatgtgcagtatttattacagccttccatgatagaaacgaatgccgtcgggccatcagcacggggttctggtaggcggtcgaatttctctatttcagggaaactgatatcaacaacagggctgcgggtgcctttcacatgattaatcatttccggcaggcggtgcagggtttgtggcccgaatataatatcaacgctcggagcacgctggcgaatgtaatccccttcctgagaagccacacagcccccaacgccaatgataacttcagggtttttgtctttcagccctttccagcgcccgagttggtgaaagactttttcttgggccttttcacggattgaacaagtattcaagagtaagatatctgcgtcttcggcgatatcggttaactgataaccgtgagtggtttccagcaggtcggccatcttggatgaatcgtattcattcatctgacagccccaggttttgatatacagtttttttatcgtcgacattttgtgtatccggtgtttccagtgaaatgatgcgtcaacactgaaaagcatagtctattgaaccagcatattgaatacagtgtgtttagcataatgttacaggctattgtattcatttgaggcaccagtgaccagactgtaacaccggatattcacagccggaaagggaaaattccggtacactattttaatcaagaagttaatagcgtgatgaatatgaataatctacaacaaaaattcgatatggttatcgtgggtgccgggatgattggtgcggcaacggcattgggattggcgcaggaaggctggcgtgtcgctctgttggaacatcagccaccacaaccctacagtgcagaaagtgagccggatattcgtatttctgccattagccgggcatccgtggatttgctgaagcaattgggtgcttgggaacatgttgcgcagatgcgtagcgtaccttatcgaaagctggagacatgggaacagaatgattccaatgtgatttttgatgcagcaagccttggcctgcctgaacttggatacatggtagaaaaccgcattctgcaactggccttgtggcaggagtttgaacggtatcctaacctgacactgttttgtcccgcagagctgaaatcgatgcagcgtcatggtggtcataaaacatggcaacttgaattgactgatggtacggaattaaacactcgtttgattatcggtgctgatggtgcccgctctcaggttcggcaattagcgggaattggcagcaggggatggcaatatcgtcagtcgtgcatgctgataactattaaaacggaacaacttcagcaggatataacatggcagcaattttttccttctggccccagagcctttctgccgttattcgaccagtgggcatcgctggtatggtatgactctcccgcccgcattcgtcagttacaggcgatgtcaatgaaacagcttgaacgggaaatatttcaggcgtttccggcccgtttgggtaaagtgactccgattgccgctggttcatttcctctgacccgtcaccatgccagcgattatgtgcgtgaagggctggttttgctgggagatgcagctcatacaattaacccactggcagggcagggtgtcaatctgggctatcgggatgtagatgctttactcaatgtattgattgatgccaaagaatcactggaagagtgggattccctgactgtactgatgcgttatcaacgtcgcaggatgcctgataatttgattatgcaggcgggaatggatctctttcatacggcattcagccatgatctgccaggattgaaaacaatgcgtaatttggcattgatggcagcgcagcgctcaggtgcgatgaaaaaactagcgctgaaatatgcgctgggggtgtgattactgttttagtcaatattttgagggtaggagccgtattttgaatacttctacccttagatatattttctattgagcacttcataaaataggattagatgtgtcaatttcaggtaggttatcaaacaaagatggagattatcaggcgataagctggggatattttttggcagaaaaacaaaaaaaaccaccaaaaggcggttatcagttcagtcaacgttttgaaaaatttggctggggtaccaggattcgaacctgggaatgccggaatcagaatccggtgccttaccgcttggcgataccccaactgaatttaaaatggtggctacgacgggattcgaacctgtgaccccagcattatgagtgctgtgctctaaccagctgagctacgtagccatttacgttaaccgtaaattttatgaaaaccttcagaagaatggctggggtacctggattcgaaccagggtatgccaggatcaaaacctggtgccttaccgcttggcgataccccacctgaacattttcattttaaaccttgttttattaatggctatctatttcttagcaattatcgttttcagaaatatggctggggtacctggattcgaaccagggtatgccaggatcaaaacctggtgccttaccgcttggcgataccccacctgaaaacaacacactaaaacttaaaacaaccttagcaaaactcgatttaagtgcaacctttagagcac

SEQ ID NO: 1304 - DNA, 5961 bp, Xenorhabdus sp.
  CDS (2)..(5959)
gtgctctaaagaaacgctggccggttatgaaccgctggccttgcctgctgacaatcccagacctgctcaggtcagctatcagggacgggatttcaactttgtactggacacccggctttcagagcaattgcggacactggcaaaaacacaggaaaccaccctctatactgtgctgctcagtgccttttacgtcacattagcgaaactctccgggcaggacgatatcgttctgggaacaccaacggataaccgccaccatgcccagactcagcccctgattgggatgttcgttaactcgctggttttaagggcacaacttgaacaaaccaccagcgtagaaaatctgattcagcacatccatcagttagttgccgaagccaaagctcatcaggatatgccgtttgaacaactacttgaaatactcggcattgaacgcgatacctcgcgccatccgatttttcaggtcatgttcggcttacacaatcccgaagaaaacctgccacagggaacgcatctgcccttcagcccggtcatactggaagaacctctgtacagccccgctaaatttgacctgcatctgtatttatccgatagccaaagcggaattcccggctgcctgaattatgcggtcagtctgtttaatgaaacaaccattatgcggctggcagatatttatcagcgggtgctggtggcttttgtggcagaccaaaaacagccgctattcgggctggatatcctgtcgggacaggaacgccatactctgctgcatcgctggaatcaggctgagatggactatccgcaggataaaaccctgtcgcaactgtttgaagctcaggcagacaagaccccaaataatgtggcactggtatttgaggacgaaacgctgacctatcgccagttaaacgaacgggcaaatcaattagcggttgtgatccgtgagcgttatcagcaacagcatcatcaaccgatgccggctgatacgctgattgcgctctatctggcacgcagcccggaaatggtgatcagtattctggcagtactgaaagcgggaggcgcttatgtgcccgtttcaccggaatatccgcctgaacaagtccggtttattctggaagatagccaaacgccctgtgtagtgactcaacaacggtatttggaaacgctgaaaggatgcacacaagcagggatggaacagcccgccctgattaccgcagatgatccggctgtgacacaaaacccgtcaacggagaatctggcactcactcatcaggcaaccgatctggcctatgttatctatacctccggcaccaccgggcagccaaaaggcgtgttgcagacacatgaaaatgtcgcccgcctatttgccagtacacaggcagattaccagtttaatcagaatgatatctgggtgctgtatcatgcttacactttcgatttcagtgtctgggaattatggggcgcactgctctatggcggacgcctgattatcccgactattgagtgtaccaaagattttgaccggttcagccgcctttgttcagatcagaacgttaccgtactgaaccagacgccgggcgcattttatgcctttattgacgctgcactgaatataaaagcggaattccctcgccttcgttatgtgatcttcggtggtgataaactgaatccggcacaactgaaaccctggtgggatcgttatggcgatcaggctcctgccctcattaatatgtacgggatcaccgaaactactgtccatgtgacctataaaaaattaacccgaaacgatgccaccacagtctcctgcatcgggcgaccactgcgtgacatgtctgcctatattctggatcaatacgggcaactggctccgactggtacaccgggcgagctgtatatcggtggtgcaggactggcgcggggctatttaaaccgaccggaactcactgctgaacgctttgtggaaaatccttttgcctcgaagagagaccaagaacgcggttacacccgtctgtataaaaccggcgacttagcccgctggctgccaaatggggagctggaatatctgggacgtaacgattttcaggttaagatccgtggttatcgtattgagctgggtgaaatcgaaagcgcccttgcttcacatccacagataaaacaggccgtcgtgatcgatcgtgaatatgacggcaacaaaacgctggtcgcttatctggtcatcaatggtgaacttgcagatgatgcattaacccgttacttatcctcccgtctgcctgaatatatgctgcctgccagctttacctccattgaggaaattcctctgaccaaaaacggtaaagtcgatcgccgggcattgccggagccggttttcggcaataaaacaggttatgttgctccccgcaatgcgttggaagctcaactgtgtaccatttggcaggaggttctggggctggaacaggtggggattgaagataatttcttccgtatcggcggcaactccctgaccgccattaagctgaccgctgcgatccgccgcattctgacaacggaagtctcgctggcacaactctttgagctgaaaaccatcgcaggtctggtcacgcagatggagaagcagacttatacggttattccgcatctggccctgaatcgttatcccttatcctttgcgcaggaacggatgctgtttatcgaacagtttgaacaaggttccgatacctaccatattccttatctggttcagctggatgatgaaacctgtctgcctgtattagaaaccgccattaatcggctggctgagcgccattcagtaataaaaatggtgtaccagcctgatgataacggccagatttaccagcaggaaatggattgtaatctggttattcagtcccagtcctgtgaaacgatggaaacgctgctgagtaccgtgcaggctgagatagccacaccatttgatctatctgatgagcctagcctgcgcctgcgtcattatcaggtcgctgacagtcactatttattgctgttgtggcaccatatcgcctttgatggctggtctgccgatattttcatcaatgaactggcggagatttaccctgccctacgggatggccgtgactaccagcttacacctctggagatcaactacggagattatgctgtctggcaacgccattatttgcagggtgataactatgaacagcagcttgcttactggcaacaaacgctggcgggttatgcttcactgaatttacccactgattaccccagacctgcacaggtaaattatcaggggcaggatttcagttttgagctggatatcgccctctcggaacagttgcggacactggcaaaatcacaggaaaccactctctataccgtgttgctcagtgccttttacgtcacgctggcgaaactctccggacaggacgatatcgttctgggaacaccaacggataaccgccaccatgcccagactcagcctctgattggcatgttcgttaactcgctggttttaagggctcagcttgaaaaaaacaccagcgtggaaacgctgattaagcagacgcatcagcaggtgagcgaagccaaagcgcatcaggatatgccgtttgaacaacttattgatgccctgaatcttgagcgtgatacctcacgtcacccgatttttcaggtgatgttcagtgctcagagtgaagctcagtcaagtgaaacctgtctgccattttgttcagtaacactggataaaccgctatacagccctgccaagtttgatctgagcctgtttttatccgatgggaaaaccggcattacgggttgcctgaattacgcgctcagcctgtttaacgaaaacaccatcacgcggctggcagccagttatcagcgggtactgagcgcttttgtggccgatcaacgacaagccttatccagaattgatattttatctgcgcaggagcgacataccttgctacacggctggaaccagacggctgctccatatccgcaggataaaaccctgccacaactgtttgaagcacaggccggtcaacatccggaggccatcgccgttatctttgaagaccaaagcatcagctacagcgaactcaaccgacgggccaatcagctggctcatcatctgattgcgctgggcgtacgccctgatgaccgtgtcgctatttgtcttgagcgcagcccggagatgatcgtgggattactcgctattctcaaggctggcggggcatatgtgccgctcgatccgacctacccgactgaacggctcagctttatgctggcggattcagcgccggtcgccctgctgactcaaaccacacaggctgataaattatccggctctgtcaccacggtattgctcgatgagcagactcaattcctcaccaccctgccggatacggatcctgatacgcaagcattagggctgacatcgcgacatctggcttatgtcacctatacctccggttctaccggacagcctaaaggcgtgatggtggagcatcgcaatgttttacgcctgattattaataatggctttgccgatatcgggccggatgactgcattgcgcattgtgccaatatttcatttgatgctgccacatgggaggtctggtcagggttaatgaatggtgcccgtatcctgctggtgcctgaaaaaaccctgttacaacctgtagaatttggtcagtgcctgtcaaccgccggtgtcagcgctctgttcctgaccactgcactatttaaccaatatgccgacctgattgctccggcactatcaggattgcgctatgtcctgttcggcggtgaacagagtgataatcgggccgcgatgcgtctcagagcggaacattcccctcaacatttactgcatgtctacgggccaacagaaaccacgacgtttgccacagcctacgatatgccacaggtagaaggcggaaaactgcccatcgggaagcccatcaataatacccgcatctacattctggataatcagggccagcccgttcccgcaggcgttcccggtgaaatccatattggcggggacggcgttgcgcgaggttacctgaaccggcctgaactgacagcggaacgtttccttatcgatccattctctccggaaccgaatgcccgcatgtataaaaccggcgatctcgcccgctggttaccggacggtaatattgaataccttagccgcaacgattttcaggtcaagctacgtgggttccgtatcgaactgggggaaatcgaaaacgccctgaccgctcacccacaggtaaaacaggccgtagttattgatcgggaacataacaaccataaggtgctggtagcctatctggtgacagaaggtacactgtccagtgacagcctgatggaatatctctcttcccgcttgccggaatatatgctgcctgccagctttagcgttatagaatctattccgctgacgctgaacggcaaagtggatcgccgcgccctgccagagccaatctggagtaatcaggagcactatattgcgcctcgcaatgcactggaaactcagctgtgtcatatctggcaggatgtgttaggtctggagcagattagcgttgaggataatttcttccgtattggcggtgattcgattgtcagcatccagctggtttctaaactgcgtcaggccggttttacccttcaggtgaaagccatttttgaagcgcctacagtcgcacaattagcccgattgctgactcagacggtttcttccgagaaagttattgctgaacaagggttgctaaccggagaatttgatctgttgcctgtccagcagactttctttgattgggatttcgccaatgcacaccactggaatcaggcctttatggttcagatacccggtcatattaaatctgcgcaggttgaacaagcactgataatgctgactgaacgacacgatatgctacgtacccgttttattaagaccgaaaa

SEQ ID NO: 1305 - DNA, 655 bp, Xenorhabdus sp.
  CDS (1)..(585)
caaccaatactgagatatgtattgcggtttattccgcaaattttccgccaagtggcactgaccgcatgtagttctcagatttcccagatacgtagtaaaaaacctgaaactcagtccgtaaatggtcagaacagtcaaaagcattttttcctgcaaacatctcaggatgaatttgaaacattggttaaaaatctggatatcaaatttaagatccttaaccaatacgcagactggaaaggagttgcctatcggctcggtggtaatacgaaacgtggcattgattgttcagcattcgtacaacgcacctttcatgatcagttcgggatggcgttaccccgctctacatcagggcaacaaagtataggtcagacagtgagccgtactaaattaaaagcgggtgatttagtactctttaaaacaggtgttcaccggcgccatatcggtatctatataggcaataaccagtttgtgcatgcttccaccagtagtggtgtcatggtttccaaattaacggatacttattggagcaaacgctattacggtgcacgtcgtgttttagcagatgatcttaaggcctcaatatagcctcttttttctaccctatattttctcttgcagtataaaaaacgcctccattcggaagctttagagcaca

SEQ ID NO: 1306 - DNA, 8918 bp, Xenorhabdus sp.; identical to SEQ ID NO: 324
  CDS (6574)..(8622)

SEQ ID NO: 1307 - DNA, 8918 bp, Xenorhabdus sp.; identical to SEQ ID NO: 324
  CDS (5376)..(6527)

SEQ ID NO: 1308 - DNA, 8918 bp, Xenorhabdus sp.; identical to SEQ ID NO: 324
  CDS (3390)..(3905)

SEQ ID NO: 1309 - DNA, 8918 bp, Xenorhabdus sp.; identical to SEQ ID NO: 324
  CDS (2490)..(3179)

SEQ ID NO: 1310 - DNA, 8918 bp, Xenorhabdus sp.; identical to SEQ ID NO: 324
  CDS (551)..(1666)

SEQ ID NO: 1311 - DNA, 6332 bp, Xenorhabdus sp.
  CDS (2813)..(2926)
tgtgctctaaaggtcatgaatatcctgagccagcagttttgcggtgaccacatcttcaatatcttttttcactaatagcttgctgaggcatccttcaaggataagttccatctgtttggcaacttgttcactattttcaatgccaatttgctgtagtagctcattcgaatattgaaatgagctttgtttttgtaatgcagctaattgatggataggatgatcggtatcaggaaaagcactacaggccgcaataaacaggcaaccggggcagcgattttcctctactttttctttgagaatgtcgtaacgagctaatagcttttgttccggggataatgtttcatccagcagggtatggcgctgccaggcttctatttgttggctatggaaacgcaggcagtcataaagtagggcttcgcggtctggccagaaatgttttatttggtcgatatcaatgttcaggggagctaaaagtgtctccagtgttactgacagaccctgttgctcaagtaaattgagtacatgattaagtacgtattcacgctgcactgttgctctccttttaaatgatttttattgatcttttatctgttctgaagctattgggtataaatgctgtaaatggcgattaaaatgttctgcatccataaatccgttgactcgcgagtcgggtatttccttgcctcgtgtgtcaaaaaacaagatagtgggaagccccagcactgccagtttttttagcaactctttctggtcagggccattctttgtaacattggcctgcaatatgagaaagtgacttagttgcttttggacttgtggatcacggaaagtatatttttcaaattccttacaagcgacacaccattctgcatagagatccagcatgatcggtttatgacgattttcagccagaatatgactcaattcctgccagtcattgatttgctggaattctaaaggtgcttgttgttgttctataacagaatttccccatacccagtcttgtaaaggacgtgaggcgattaaagccagtgccagtaagatgagttgtagggtgcgtagccagccgtttttgtggtttagcgtcaatgaaaaagcccagccacagaaggcaaccgctaatatgctccataatcttattccccatacatctcccagaactctttccagcaaaaatattggtagcgcaaggataataaagccgaatgcttcttttacgtattgcatccacgggccactgcggggtaagaatttgtggccgaataaagtcacggctataagtggtaaacccattcccagtgcatacagataaagtgtcaggccaccgagcacagcgttaccactttgggcaatgtacagtaaaatggcgctgagcggtgcggttgtgcatggggatgcaatcaggcccgccagcatccccatgacgaatacaccaaaataggagccacttttttgctgattactccagttcaccaaacgggtctgaacggaagaagggagctggagtgaatacataccgaacatggatagtgctaatagaataaacaggacggaaagccctatcagaatataagggctttgtaatgcggcctgaaactgtaaacctgctgcggcgacaattaaccctaaggccgtataagtgatggccattccctgcacatagctcattgccagccagaagatacgtttcaggctttcagggcgtttctgtcccagaataatagcggagattaacggatacattggcaggatacatggtgtaaatgcgatacctataccaatcaataatgcccataagggcgaaaatggcatttgctctgttttgagtaacgttttctcctgcggcaatgagtcactttgaggtgtttttattgcagcaggtttagattctgactgttttggtgttgcatccactgatggctttatgggggcggttactgcgtatagtggcacgctgattgtttctggaggataacagtaccctgcttccgcgcagccctgataggttacctgaagtgttgagtcatttgtcgcactaaggataggaatattgatgtgtgctgactgaaaataaacttcagttttgccaaaaaattcatcttcatgagcggttgctttggaaaagtcgatatggcctaaagaagtttgctgatcgggggtgataacgaactgttttctatagaggtaataaccaggtttaatatcccaacttagcgtcagttgttcccctttttgctgaaaatcaaacataaatgcctgttcagcgggaagataccgattctgtcccagttgtccggcttgctcaaacagcgcactggatttaagagggaacgcactgattgcaccgaacagtagaaacaatatgagaatacgtttcatcataggatacttttttacctgagttatagggagtcaatgggtgaaatttaccagaatcggcactacgactaaaatgggcactataaccgatggaatctgagacaaaaagctgattgattaatattaatgcaaagaggtgtttttttcagggaagaggataaaagaaagaaaatatttcagggggttttaatccccctgaaaatcaaacataaagcctgaaggctacaggatcataccaccgaacagaaagccgaatgtgactgccagcccaacagcaatcgtacccggaataaagaacggatggttaaaaacaaaacgtccgatacgggttgtgccggtatcatccatctgtactgcggcaactaaagttgggtaagttggcagaatgaacagcccggaaacagcagagaaagaggcaattgcagtcagtggcgtgacatgcagcgctaatgccattggcattaaagccttcgctgttgctgcctgcgaatacaataaggctgaacagaagaagaaaataactgcgagtagccaaggtcgagaatgaatcaggttaccggcagtttccttaatccagtcgagatttgcctgaacaaaagtatcacctaaccaggccacacccagaatacaaatacaggcactcatgccagccttaaaagtactcgaattcagaatagcatctgtattgacggaacaaataatcgtggtgagcgttgcaacactcagcataataatcagaatcgcgttggtggtattcatcagtggtttttccactaacccgacactcgggctattgataaccgcatagataacgacgccgataacacccagcaaaaataatagaacagaaagttttgccttcggtttgatttcaatctgagacgcaccgcgcatttctatcagaccgtcagccagacgtttctgatagataggatcatttgccaacttggaatcgaaaagccatgaaatgatgaatgacattaacacgatggcacaaaatgtggatggcagcagtatcatcagcaaatgaatatagctgataccttgcccttccataaccgaagccatataaaccactgccgcagagataggggaggcggtgatcccgatttgagcggagactacagcggtcgaaagtggacgacatggtttgatgccttgctctttagcaacttcggcaataacaggcagtgttgccagtgagatgttccctgtacctgcgaatagagtcagaaagtaagtgactataggtgcgaggattgtgatgtattttgggttcttacgcagtaatttttcagtttgctggacgaggtaatctaacccgcccgctacttgcattgctgatattgcagcaatcacagccataataattgagataacatcaaatggaatactgcctggttttacacctagaatggcgaggattaaaacgccaattccacccgcaaagccaattccgattccccctaatcttgcccccagaaaaatggccagcagaacaataaccaattctacggctaacatgttacatactccttcatttatttagttttatgaaaatttatggttaataatttgtgtttgctgccaattaaaaaggcacgcttccggttggaatagcgtgccttaaaaattaagacgaactcgttattataatcatttaattagtcatcaaaacgttttgctttgtaagtcggattttttaggttctcaacagagaaaatatcatctaattccgcttctgtcagcagaccacgctccaaaacaacttctcggacgcttttacctgtttctgcacagattttacctacgatatcgccattatggtgaccgatgaatgggttcagataggtcacgataccaatagagttaaagacaaagctttcacagacttctttgttggcagtaataccgttaacgcacttctcaaccagattacggcaagcgttgctcaggatagtgatagattcaaacatagcctgaccaatagctggttccatgacgttcagttgcaactgaccagcttctgctgccatagtgatacaggtatcgttaccgataactttaaagcagacttgattaacaacttctggaacaactgggtttactttggctggcatgatggaagaacctgcctgcaattctggcaggttgatttcgttcagaccagcacgtgggccggaagacagcagacgcaggtcgttacagattttagacatcttaacagccagacgtttcagggcactatgaaccataacataagcaccacagtcagaagtcgcttcaatcaaatcttctgcaggtatacaaggcaagccggtcacttctgccagcttttcaacagccagtttctgatagccaggtgctgtgttcaaaccagtaccgatagcggttgccccaaggttcacttccagcagcagttctgcggtacgagtgatatttttaatttcttcttttaataacatggaaaaagcacggaattcctgacccagagtcattggtaccgcatcttgcaattgagtacgacccattttcaggatatcgtcgaactcaataccttttttgtcgaagcccgcttttaataattcgattgaattaaccaactgcatgattgcgttgtaaacagcaatacggaaaccggtaggataggcatcgttagttgactggcttctgttcagatgatcattggggttcaggtactcatattcacctttctgatgccccatcaattcaagaccgatatttgccagcacctcattcgtattcatgttcagtgaggtacctgcgccaccctgaaaaacatcaacagggaactgatccatacatttgcctgtgttgagcagttcatcacacgctttgacaatgatatcagcaactttgccgggaatggtatggagttctttgtttgccagtgctaccgcttttttcaccatgaccatgccgcgaatgaactcagggacatcgttgatggagcggtcactaatatagaagttttcaatcgcacgtagagtgtgaataccgtaataggcttcagcagggacttcacgtttacctaacaggtcttcttcgatacgaatgttgtttgacatgagaaccttcttaaattggatacgttttactgtttgttatatgtttgttgagataatgttgccgacagcaatcgctgtgatattaggtgattaccacaaaattgcaggcgcgatcatatgtggatttgtcagaaatgccttgaacctggatcactttatagtacgattttactaatgaaatgacatatgtgtgattgaggtcacggttactcaggtaaaaagtcaaatgtcttaagtattgaaaaccgttattgttatccccacatatgttatccatataaactagtcatctatagatgttgctatcaatgagctgggttataaacgagattcgtagtaataaaaacgctttggtagtatacacagcgcctaaagcggatgagaataccggcttatatccttcatctttcaggtgcctcattttaggcggcctcattttaagttgcttcaacttaatttgctttaacttaaattgctccaatttctttttcttcaactcattttcttcaactacaggagaacaacgtgcgctggtttcctcttatcctgatatgtctgctgatttatatcgaatcagtactgtttgtccgcatcgcttctgaggtcggcgtcctgttaacgctgttattggttgttctgacttcctgtgttggggtttctctggttcgtaatcagggcataaagaactttatgtcaatgcagcagaaaatggctgccggagaaagccctgcggaagaagcaatcaaaagtgtttctttagtcattgcaggtttcctgttaatcattcccggcttttttaccgattttctcgggctattattgttgttgtcgcctgtgcaaaaattgctgacagcaaaatcttta

SEQ ID NO: 1312 - DNA, 6332 bp, Xenorhabdus sp.; identical to SEQ ID NO: 1311
  CDS (5994)..(6332)

SEQ ID NO: 1313 - DNA, 6332 bp, Xenorhabdus sp.
  CDS (5781)..(6326)
taaagattttgctgtcagcaatttttgcacaggcgacaacaacaataatagcccgagaaaatcggtaaaaaagccgggaatgattaacaggaaacctgcaatgactaaagaaacacttttgattgcttcttccgcagggctttctccggcagccattttctgctgcattgacataaagttctttatgccctgattacgaaccagagaaaccccaacacaggaagtcagaacaaccaataacagcgttaacaggacgccgacctcagaagcgatgcggacaaacagtactgattcgatataaatcagcagacatatcaggataagaggaaaccagcgcacgttgttctcctgtagttgaagaaaatgagttgaagaaaaagaaattggagcaatttaagttaaagcaaattaagttgaagcaacttaaaatgaggccgcctaaaatgaggcacctgaaagatgaaggatataagccggtattctcatccgctttaggcgctgtgtatactaccaaagcgtttttattactacgaatctcgtttataacccagctcattgatagcaacatctatagatgactagtttatatggataacatatgtggggataacaataacggttttcaatacttaagacatttgactttttacctgagtaaccgtgacctcaatcacacatatgtcatttcattagtaaaatcgtactataaagtgatccaggttcaaggcatttctgacaaatccacatatgatcgcgcctgcaattttgtggtaatcacctaatatcacagcgattgctgtcggcaacattatctcaacaaacatataacaaacagtaaaacgtatccaatttaagaaggttctcatgtcaaacaacattcgtatcgaagaagacctgttaggtaaacgtgaagtccctgctgaagcctattacggtattcacactctacgtgcgattgaaaacttctatattagtgaccgctccatcaacgatgtccctgagttcattcgcggcatggtcatggtgaaaaaagcggtagcactggcaaacaaagaactccataccattcccggcaaagttgctgatatcattgtcaaagcgtgtgatgaactgctcaacacaggcaaatgtatggatcagttccctgttgatgtttttcagggtggcgcaggtacctcactgaacatgaatacgaatgaggtgctggcaaatatcggtcttgaattgatggggcatcagaaaggtgaatatgagtacctgaaccccaatgatcatctgaacagaagccagtcaactaacgatgcctatcctaccggtttccgtattgctgtttacaacgcaatcatgcagttggttaattcaatcgaattattaaaagcgggcttcgacaaaaaaggtattgagttcgacgatatcctgaaaatgggtcgtactcaattgcaagatgcggtaccaatgactctgggtcaggaattccgtgctttttccatgttattaaaagaagaaattaaaaatatcactcgtaccgcagaactgctgctggaagtgaaccttggggcaaccgctatcggtactggtttgaacacagcacctggctatcagaaactggctgttgaaaagctggcagaagtgaccggcttgccttgtatacctgcagaagatttgattgaagcgacttctgactgtggtgcttatgttatggttcatagtgccctgaaacgtctggctgttaagatgtctaaaatctgtaacgacctgcgtctgctgtcttccggcccacgtgctggtctgaacgaaatcaacctgccagaattgcaggcaggttcttccatcatgccagccaaagtaaacccagttgttccagaagttgttaatcaagtctgctttaaagttatcggtaacgatacctgtatcactatggcagcagaagctggtcagttgcaactgaacgtcatggaaccagctattggtcaggctatgtttgaatctatcactatcctgagcaacgcttgccgtaatctggttgagaagtgcgttaacggtattactgccaacaaagaagtctgtgaaagctttgtctttaactctattggtatcgtgacctatctgaacccattcatcggtcaccataatggcgatatcgtaggtaaaatctgtgcagaaacaggtaaaagcgtccgagaagttgttttggagcgtggtctgctgacagaagcggaattagatgatattttctctgttgagaacctaaaaaatccgacttacaaagcaaaacgttttgatgactaattaaatgattataataacgagttcgtcttaatttttaaggcacgctattccaaccggaagcgtgcctttttaattggcagcaaacacaaattattaaccataaattttcataaaactaaataaatgaaggagtatgtaacatgttagccgtagaattggttattgttctgctggccatttttctgggggcaagattagggggaatcggaattggctttgcgggtggaattggcgttttaatcctcgccattctaggtgtaaaaccaggcagtattccatttgatgttatctcaattattatggctgtgattgctgcaatatcagcaatgcaagtagcgggcgggttagattacctcgtccagcaaactgaaaaattactgcgtaagaacccaaaatacatcacaatcctcgcacctatagtcacttactttctgactctattcgcaggtacagggaacatctcactggcaacactgcctgttattgccgaagttgctaaagagcaaggcatcaaaccatgtcgtccactttcgaccgctgtagtctccgctcaaatcgggatcaccgcctcccctatctctgcggcagtggtttatatggcttcggttatggaagggcaaggtatcagctatattcatttgctgatgatactgctgccatccacattttgtgccatcgtgttaatgtcattcatcatttcatggcttttcgattccaagttggcaaatgatcctatctatcagaaacgtctggctgacggtctgatagaaatgcgcggtgcgtctcagattgaaatcaaaccgaaggcaaaactttctgttctattatttttgctgggtgttatcggcgtcgttatctatgcggttatcaatagcccgagtgtcgggttagtggaaaaaccactgatgaataccaccaacgcgattctgattattatgctgagtgttgcaacgctcaccacgattatttgttccgtcaatacagatgctattctgaattcgagtacttttaaggctggcatgagtgcctgtatttgtattctgggtgtggcctggttaggtgatacttttgttcaggcaaatctcgactggattaaggaaactgccggtaacctgattcattctcgaccttggctactcgcagttattttcttcttctgttcagccttattgtattcgcaggcagcaacagcgaaggctttaatgccaatggcattagcgctgcatgtcacgccactgactgcaattgcctctttctctgctgtttccgggctgttcattctgccaacttacccaactttagttgccgcagtacagatggatgataccggcacaacccgtatcggacgttttgtttttaaccatccgttctttattccgggtacgattgctgttgggctggcagtcacattcggctttctgttcggtggtatgatcctgtagccttcaggctttatgtttgattttcagggggattaaaaccccctgaaatattttctttcttttatcctcttccctgaaaaaaacacctctttgcattaatattaatcaatcagctttttgtctcagattccatcggttatagtgcccattttagtcgtagtgccgattctggtaaatttcacccattgactccctataactcaggtaaaaaagtatcctatgatgaaacgtattctcatattgtttctactgttcggtgcaatcagtgcgttccctcttaaatccagtgcgctgtttgagcaagccggacaactgggacagaatcggtatcttcccgctgaacaggcatttatgtttgattttcagcaaaaaggggaacaactgacgctaagttgggatattaaacctggttattacctctatagaaaacagttcgttatcacccccgatcagcaaacttctttaggccatatcgacttttccaaagcaaccgctcatgaagatgaattttttggcaaaactgaagtttattttcagtcagcacacatcaatattcctatccttagtgcgacaaatgactcaacacttcaggtaacctatcagggctgcgcggaagcagggtactgttatcctccagaaacaatcagcgtgccactatacgcagtaaccgcccccataaagccatcagtggatgcaacaccaaaacagtcagaatctaaacctgctgcaataaaaacacctcaaagtgactcattgccgcaggagaaaacgttactcaaaacagagcaaatgccattttcgcccttatgggcattattgattggtataggtatcgcatttacaccatgtatcctgccaatgtatccgttaatctccgctattattctgggacagaaacgccctgaaagcctgaaacgtatcttctggctggcaatgagctatgtgcagggaatggccatcacttatacggccttagggttaattgtcgccgcagcaggtttacagtttcaggccgcattacaaagcccttatattctgatagggctttccgtcctgtttattctattagcactatccatgttcggtatgtattcactccagctcccttcttccgttcagacccgtttggtgaactggagtaatcagcaaaaaagtggctcctattttggtgtattcgtcatggggatgctggcgggcctgattgcatccccatgcacaaccgcaccgctcagcgccattttactgtacattgcccaaagtggtaacgctgtgctcggtggcctgacactttatctgtatgcactgggaatgggtttaccacttatagccgtgactttattcggccacaaattcttaccccgcagtggcccgtggatgcaatacgtaaaagaagcattcggctttattatccttgcgctaccaatatttttgctggaaagagttctgggagatgtatggggaataagattatggagcatattagcggttgccttctgtggctgggctttttcattgacgctaaaccacaaaaacggctggctacgcaccctacaactcatcttactggcactggctttaatcgcctcacgtcctttacaagactgggtatggggaaattctgttatagaacaacaacaagcacctttagaattccagcaaatcaatgactggcaggaattgagtcatattctggctgaaaatcgtcataaaccgatcatgctggatctctatgcagaatggtgtgtcgcttgtaaggaatttgaaaaatatactttccgtgatccacaagtccaaaagcaactaagtcactttctcatattgcaggccaatgttacaaagaatggccctgaccagaaagagttgctaaaaaaactggcagtgctggggcttcccactatcttgttttttgacacacgaggcaaggaaatacccgactcgcgagtcaacggatttatggatgcagaacattttaatcgccatttacagcatttatacccaatagcttcagaacagataaaagatcaataaaaatcatttaaaaggagagcaacagtgcagcgtgaatacgtacttaatcatgtactcaatttacttgagcaacagggtctgtcagtaacactggagacacttttagctcccctgaacattgatatcgaccaaataaaacatttctggccagaccgcgaagccctactttatgactgcctgcgtttccatagccaacaaatagaagcctggcagcgccataccctgctggatgaaacattatccccggaacaaaagctattagctcgttacgacattctcaaagaaaaagtagaggaaaatcgctgccccggttgcctgtttattgcggcctgtagtgcttttcctgataccgatcatcctatccatcaattagctgcattacaaaaacaaagctcatttcaatattcgaatgagctactacagcaaattggcattgaaaatagtgaacaagttgccaaacagatggaacttatccttgaaggatgcctcagcaagctattagtgaaaaaagatattgaagatgtggtcaccgcaaaactgctggctcaggatattcatgacctttagagcaca

SEQ ID NO: 1314 - DNA, 6332 bp, Xenorhabdus sp.; identical to SEQ ID NO: 1313
  CDS (3951)..(5759)

SEQ ID NO: 1315 - DNA, 6332 bp, Xenorhabdus sp.; identical to SEQ ID NO: 1313
  CDS (2430)..(3731)

SEQ ID NO: 1316 - DNA, 6332 bp, Xenorhabdus sp.; identical to SEQ ID NO: 1313
  CDS (853)..(2289)

SEQ ID NO: 1317 - DNA, 7194 bp, Xenorhabdus sp.
  CDS (7031)..(7189)
gtgctctaaagccacggggacaaaaagccgctgggctggcaatggggctgactctgcctcagacttaccgctacgttctgctacccaacgcttatcgtgtcattacgccccctatgacttcagaaatgctcaatctggtgaaaaattccgcgattgcttcaactatcggtctggtggatatggcagcacaggcagggaaattactggattattcagcacatgcctatgaaacatttacggttatcacactggcatatgtgggtatcaatctcgtgatcatgctggcaatgagcatgcttgagaaaaaaatacagctgccgggcaacataggagggaaatagaacatgtatcaatttgactggagttcgattgttcccagcctgccgcttctgttggatggattaatcatcaccgcagagatcacactgatagctatcgtgattggcattgcctggggaaccattctggcaatgatgcggctttcttccattaaggctctaagctggtttgcggccctgtatgttaacctcttccgttccgtacctctggtaatggtattgctatggttctatttaattgtgcctagcttagttcaaaatgttctgggtatatcaccaaaaactgatatccgattaatctctgcaatggtagcgttctcaatctttgaagcggcctattatgctgaaattatccgggccggtatccagagtatttcccgtggccagtcagccgcatcgctggcattagggatgacacacatgcaaagtatgcgtttggtcattctgccacaggcattccgggcaatgataccgttgctgctgacgcagggcattgtattatttcaggatacttctctggtatacgtattgagtctggcggattttttccgtacagcaagcaatattggtgaacgtgacggtacacaggttgaaatggttctgtttgccgggttggtttattttattattagtttttccgcctcgatgctggttaactatttaaagaaaaggactatttaatgatctcgctgaaaaatgtatccaaatggtatggccagtttcaggtgctgaatgactgttcaactgaagtcaaaaaaggcgaagtcgtggtcgtctgcgggccttctggttctggcaaatccacactcataaaaacggtcaacggtctcgaagctgtccagcaaggtgaaatttcggtcaatggaacaaaagtcaacgataaaaaaaccgatctggcacaattacgttcccaagtcggcatggtatttcaacattttgaactgtttcctcatctgtcgatcattgacaatctgacgctggctcaggtgaaagttctcaagcgcgataagcaggcagcaacagaaaaagccctgaaactgctagatagagtcgggttatcaaaccacgcccataaattcccttcccagctttccggcgggcaacagcagcgggtagctatcgcacgtgctctttgtatggatccgattgccatgctgtttgacgaacccacttctgcccttgatccagaaatgatcaatgaagtgctggatgtgatggttgaactggctaacgaaggaatgaccatgatggtcgttacccatgaaatggggtttgcaaaaaaagtggctcatcgcgttatctttatggatgagggaacaattgtcgaagacagcagaaaagaagatttcttcgtcaaccctaaatcggaacgcgcccgcgattttctggcaaaaattctgcactgattacgtttctggtcggcggtaccaacattaccgccggctttaaaccgcatctgttcccggtaggaaagatgaagggggtaaaaattcagtaattttctgtgttgttccactaacaggtgttgttgcccctattcctatccgctatgctatggcatcttaaatttcataaacaaacatactcgctatacccaataaattttgagttgcttcacgacggcagggagttaatcccagatagcccaacaaagaggcagcctgaaaggtgaagggtataaaggcgtagcattattactcaccataggatcatcggtgccatgcaagaacaatatcgtccagaagacatagagcaacaagtccagcttcattggcaagagaagcaaacttttaaagtgaccgaagacagcagcaaagaaaaatactactgcctgtccatgctaccttacccttctggccgactacatatgggccatgtccgtaactatactattggtgatgtgatttcccgttaccaacgtatgcttggtaaaaatgtcctgcaacctatcggttgggatgcattcggtttaccggcggaaggcgcggcagttaaaaacaagaccgcaccagcaccgtggacttattccaatatcgaatacatgaaaggccagctgaaaatgctgggatttggttacgactgggatcgtgaagtcacaacctgtacaccggaatattatcgctgggaacaatggttcttcaccaaactgtatgaaaaaggtctggtttacaaaaaaacttctgcagtgaactggtgtccaaacgacctgaccgttctggcgaatgagcaggttattgatggttgctgctggcgctgtgacagccctgtagaacgtaaagaaatcccacagtggtttattaaaatcaccgattacgcagaagaattgctgaatgatctggataagctggaagagtggccggagcaggtcaaagttatgcagcgtaactggattggccgttcagaaggtgctgaaatcatctttaatgttgctgacagtcaggaaaaactgaccgtctatactacccgcccggatacctttatgggagctacctatgttgctgtagccgcaggtcatcctctggcaaaacaggcggcggaaaataattctgagctggcagaatttatcaacgaatgccgtaataccaaagttgctgaagcagatatggcaacaatggagaaaaaaggcatgccgaccggtatgttcgtaatccatccattaactaacgaaaaaatgcctatctgggttgccaacttcgttctgatggaatacggcacaggtgctgttatggcggttccaggccatgatcagcgtgactgggaattcgcaaccaaatataatctgccaataaaagcggtcattctggacaacgatggtaatgtaccaactgttcaggaaagcgcgatgactgataagaacgcgctggtcaattccggtgaattcagtgggctgagccatgaagacggcttcaatgctatcgctgacaaactggttgaaatgggtgtaggcaaacgcaaagttaactatcgcctgcgtgactggggagtttcccgtcagcgttactggggtgcaccaattccaatggcaacactggaagatggtacagtagttccggttcctgaagatcaactgccggttattctaccggaagatgttgtaatggatggcatcaccagcccaatcaaagcagatccggaatgggccaagacaactattaatggtcagcctgcattacgtgaaacggataccttcgatacctttatggaatcgtcatggtattacgctcgttatacctgcccggattatgataaaggtatgcttgatcctgccgctgctaactactggctgccagtggatcaatatattggtggtattgaacacgccatcatgcacctgatgtatttccgtttcttccacaaactgatgcgtgatgcgggtctggtcaattcagatgagccagcaaaacatctgctgtgtcagggcatggttctggctgaagccttctattacactggcagcaacggtgaaaaaatctgggtatctccggctgatgctattgttgagcgtgacgagaaaggccgcatcaccaaagcaatggatagtgatggtcatgaactggtttataccggcatgagcaaaatgtccaaatccaaaaataacggcatcgacccacaacttatggttaataaatacggtgctgatactgttcgtttgtttatgatgttcgctgctccaccagaactgactctggaatggcaggaatctggggtagaaggagctaaccgcttcctgaaacgtgtatggcgtctggttcacgagcatgtaagcaaaaatgctgataaaggcgaaattcagccactggatatcaccagcctgacaacagaacagaaagatttgcgtcgtgacctgcacaaaactattgctaaagttacggatgatatcggccgccgtcaggcattcaataccgcaatagccgccatcatggaactgatgaataaactgacccgcgcaccgctggaaacagagcaagatcgcgccctgatgcaagaagcgctgactgccgttgtacgtatgctttcacctatcacaccacatgcctgcttcgtgatgtggaaagcacttggtaatgaatgtgacattgataccgctgcatggccgcaggctgatgaaaaagccatggttgatgatactaaactggttgtcattcagatcaacggtaaagtccgtggccgtatcaccgtaccggcagatgcgacaaaagaatatgttcaggagatggcttctcaggaatacagcgtaacgaaataccttgaaggcgtcagtatccggaaagttatctatgttccgggtaaattgctgaatctggtcgttggttaataattataggaaagagtatgcgacatcgtattttcacgttgttgctggggttagcggtgcttgtcaccgctggctgcggctttcatctacgtggcacaacacaggttcccaaagaactccagacattacagctaaactctggtgatccttatgggccattggcacgggcagtacgtcagcagctacgtctgaacgatgtcagaattgctgagcaggccagtgcctccctgccaattctgaaattactgggttcaagtgaaaacaatgtcacggtttcagtctttcaggatggtaaagcggcggaacgtcaactggtgctggatgttgatgcacaggttctgatgccaaatggtaacatttacccattagaggtcagagttgagcgttcgttttttgataacccattggaagcactggctaaagatgcagaaaacgaacttgttaagcaggaaatgcgtgaacaagcggctcgtcaactgatacgcaagctgctgacaattcaaagttcagagcaacctaaatctgctgaaacacaaaagcaatgatcagactctatcctgaacaacttctttcgcagctcaatgaagggctgcgaaataactacctgctatggggcaatgagccattgctgctacaggaaagtcaggacagtatccggaaggtagctgagcagcacggctttctggagcatttctcgttttcactggataaccataccgagtgggatgaaatcttcagtttatgccagtcactcagccttttcgccagccgtcagtcaattactctgttgttaccagaaaatggccccaatgcagcaatggcggaacgtctggctaagctatcagaattattgcatgacgatgttttattgatactccgtgggcacaaactgactaaggcacaggaaaacagcacctggttcaaagcaatcgggaaaaatggtgtttatatcagctgtctcaatcccgagcaaaaccgtcttcctcaatgggtcgcacaacgtgcaaaaagtatgggcctgtcactggaagatgaagctaaccagttattgtgttattgctacgaaggaaatctgctggcattgtcacaggcgctggagcggctctcattgctctatcctgataatcgcctgacgcttcatcgggtcgaagaggctgtcaatgatgcggcacattttgccccttaccattgggtcgatgcgctactggcgggaaaagtcaaacgcggatggcatatcctgaaacaattacgacaggaagataccgaagagattattctgcttcgtactatacagcgagaactgatgctactgttaacccttaagcgtcaggaaaaaacaacacctttaaagacactgtttgatcaacataaagtctggcaaaaccgtcggatgcttttgactactgcattacaacggctatcactgcaagatctacactcagctatacacttgttgacccagatggagttgcgcatcaaacaggattatggccaatctatttgggctgacctggaaaccctttctatgctgctgttatacggaaaagacctcggaaaaacgcacggaaaaatattaccagagagctttttgaatgcttcacaccactaattcatccttaactcatccatcgttaaattcaccgattattcatgctttatttggtggtacttttgatcccatccattatggtcatttacgtccggtagaagctttagcaaaactggcggggcttaaacaagttattctgttacctaaccatgttccgccacaccgccctcagccagaagccaccgcccagcaacggctggaaatggtgcgtctggcagtacaggataatcccctgtttactgttgatacgcgggaattgcagcgtcagacaccttcttacactattgatacattaaagtcattccgtgaagaagtcggtgagcagtgtccgctggcatttatcatcgggcaggattccctgcaatccattcatacctggcatcgctggtctgaattactggatatctgtcatttactggtctgctcccgtcccggctattcaaagcagctttcaacaccggaaatgcaggaatggctggaacagcacaaaattgatactcccgcaccattaagtcataaatcacatggttacatttatctggccgaaacaccattgttggacatttcagcaaccgatattcgccgccgccatcaacagggcttaaactgtgatgatttattacctccattaatacaaaattatattgattcccagcagttatatagttgatagttaaatcatatgtgatttcccggctcagtagcttacgtttatagagacgggcatgctattattctgcgttactcaactactttgataaaattaaggtgatccttttgcaaggcacagaactacaacaatttattattgataaacttgaagattcaaaagcacaggatattgtttctatagatgttcgtggaaaatccagcattacagactgcatggtgatatgcaccaggtacatacaagtggtcattttttagtagcg

SEQ ID NO: 1318 - DNA, 7194 bp, Xenorhabdus sp.; identical to SEQ ID NO: 1317
  CDS (6300)..(6932)

SEQ ID NO: 1319 - DNA, 7194 bp, Xenorhabdus sp.; identical to SEQ ID NO: 1317
  CDS (5471)..(6262)

SEQ ID NO: 1320 - DNA, 7194 bp, Xenorhabdus sp.; identical to SEQ ID NO: 1317
  CDS (4710)..(5198)

SEQ ID NO: 1321 - DNA, 7194 bp, Xenorhabdus sp.; identical to SEQ ID NO: 1317
  CDS (2059)..(4653)

SEQ ID NO: 1322 - DNA, 7194 bp, Xenorhabdus sp.; identical to SEQ ID NO: 1317
  CDS (1019)..(1744)

SEQ ID NO: 1323 - DNA, 7194 bp, Xenorhabdus sp.; identical to SEQ ID NO: 1317
  CDS (345)..(1019)

SEQ ID NO: 1324 - DNA, 7194 bp, Xenorhabdus sp.; identical to SEQ ID NO: 1317
  CDS (3)..(341)

SEQ ID NO: 1325 - DNA, 6175 bp, Xenorhabdus sp.; identical to SEQ ID NO: 61
  CDS (1397)..(2161)

SEQ ID NO: 1326 - DNA, 6175 bp, Xenorhabdus sp.; identical to SEQ ID NO: 61
  CDS (2560)..(3282)

SEQ ID NO: 1327 - DNA, 6175 bp, Xenorhabdus sp.; identical to SEQ ID NO: 61
  CDS (3291)..(3677)

SEQ ID NO: 1328 - DNA, 6175 bp, Xenorhabdus sp.; identical to SEQ ID NO: 61
  CDS (3732)..(4091)

SEQ ID NO: 1329 - DNA, 6175 bp, Xenorhabdus sp.; identical to SEQ ID NO: 61
  CDS (4195)..(4398)

SEQ ID NO: 1330 - DNA, 6175 bp, Xenorhabdus sp.; identical to SEQ ID NO: 61
  CDS (4639)..(5013)

SEQ ID NO: 1331 - DNA, 6175 bp, Xenorhabdus sp.; identical to SEQ ID NO: 61
  CDS (5677)..(6174)

SEQ ID NO: 1332 - DNA, 6175 bp, Xenorhabdus sp.
  CDS (5222)..(5440)
ttggggtagctgccagacgagttttgatctgctcaacaacgcgcaggaagttcgcacccatacggtccattttgttaacgaacgcgatgcgtggaacattatatttgttagcctgacgccatacggtttcagactgaggctgaacaccaccaactgcacagtaaaccattactgcaccatcaagaacacgcatagaacgttctacttcgatagtgaagtcaacgtggcccggggtgtcgatgatgttgatacggtgtggctcatactgtttagccataccagaccagaatgcagtagtcgctgcggaggtaatggtaataccacgctcctgctcctgctccatccagtccatcgttgctgaaccttcgtgagtttcaccgatcttatggtttacacctgtgtaaaacagaatacgttcagtagttgtggttttaccggcgtcgatgtgggcactgataccgatattacggtaacgtgctataggtgtttgacgagccattttttcctctctcgtgggcgttcttcaatttggagaacgggcagccgcagctacccagaacatattactgccgatggattccaaaaaaatggattaccaacggtagtgtgcgaacgccttgttagcatctgccatacggtgaacgtcttcacgtttcttaacagcagcgcctttgttttcagccgcatcagataattcattcgccaggcgcagagccatagacttatcaccgcgtttacgagcagcatcaacgatccaacgcattgccagagcattacgacggaccggacgaacttcaactggaacctgataggtagaaccacctacacggcgggatttaacttccacagtcgggcgcacgttatccagtgccagctcgaatgcttccagatgttctttaccggaacgctgagccagggtctcaagcgcaccatatacgattgcttctgcgacagactttttaccgtctaccatcaggatatttacaaatttggccagcagttctgatccgaactttggatctggcagaattttacgttgaccaattacacgacgacgtggcatggaaatactccgtttcgaatttcagggttgtccaaaactctacgagtttattttgacatttaaagtgaacaatgtttggccttacttaacggagacccattaagcctttggcttcttcacaccgtacttagaacgaccttgtttacggtctttaacaccggaacagtccagtgcaccgcgaacagtgtggtaacgcacacctggcaagtctttaacacgaccgccacggatcaggataacggagtgctcttgcaggttgtggccttcaccaccgatgtaagaagtcacttcgaaaccgttagtcaaacgaacacggcatactttacgcagtgctgagtttggtttttttggagtggtagtatatacacgagtacatacgccacgtttttgcgggcaagcttccagagcaggaacgttgcttttcacaactttcgagctacgagatttgcgaaccagctggttaatagtagccattattaaaaaaactcctggtttttttgcttcgtaaacacggattttaccctctgtcagccatgatgacaaaacgagaggacgcggaattttattgctgacttgacgaggtgtcaagaaatatacagtctttctatatgttggtatctgtcagtattctgtcagcgcactaaaaagttcacaggccactgatttattaactgaatgatcacaggcaatatctgcggaaaaaatgcggaatatttaccaacttaaactttgctgatgtttcaccgttaaactgacaaagccattgtaattgaccatctttacatgctctgaaacccgctccgtaagcccccgggcatccagatcctcctgtaaggcatagatacccgcacccgtgtgaatcagctcagccaaatagggattgccattaacacccagtaataccccattttgcagcatcaggacatcatctgcatcagtgatcaagccaagtattgcattgaagtcattctgataaggtgagcatctaacagtatataacatgtcatctctccaaagtagattaaaatttcaacacaacatcgtagcccgccagcatttgccggattgccgcagccgagagaaattcagcgtccagaataaaatcatcttctggagtaaatcctctaaccgtcagatcttccaggcagatatagcatttctcaatgtcatacagaggtaaaatcttaaatgttgaaatatagtcacgtgacaggattttatccggctgctggttggacagcagctgaagtactccatcagaaataaagaatacgccgacctgctccgtcagtgctgatgttgcaagcagtgcatccagcccttctctaccagcagaagagccgtggggggcctcagtaaaaatgaaggcgatttttttcattatgaatgtcttcctgttatgcccctaaccctgtgccattacgccatcgtactcttaaaattgtactacgcgatcacacagcatcatggcctcagccaaagaaccaaggccattgagttcaaaaccatcggcgagatttgcagaactcaaatccagttcatttgcctgctgttcatccacaacaccgcgtcgtaacgcggctgcaacacaaataaacagctcagactgatgctgaatagccaatgattgccacgccctgacaagatcaatctcatcattggcaggtgcagtcagctgattaccgttctggacaccttcacgataaaaaaacacgctatgcaatttatgaccagaggcaataagtgcctgagcaaactgataggcactactggcttgctgagtcccgtatgccggcccggttaccagtaagcagtaagacagtggcaacattacttctccggatgtgcacattcaccgtttttaaactggcgaatatagaggtataccgtatgcttggagatattcaggcggtcagcgacctgattaatcgcatctttgatatcaaaaatgcccttctcataaaggttcagaacaacctgcctgtttttggcattattggaaacattgcgatcagcattcacttcttcgatagtgaattccagtgtctgagcaacaagatcatccacggaagaagcaaaattgacgtttgaagaaacgtcgtgagttttctcagggataaaagtctgaataatttcagaaaaaggaacatcaagattcatgttgatacacaaaagcccgataacccgacgctgacgattgcgaatagcaatagtgacagatttcatcaatgcgccacttttcgcccttgtgaagtaggctctggaaacagaagagtcttcatcagtaatatcgtgcagcatccgcaatgccagatcggtaataggagaaccgatttgacgaccggtatgctctccgttagctattctgacagctgaacatttaaggtcttccagtgaatgaagaacaatttcacaatgcccaccaatcagcatagccaggccatcaactgccgcttcataagactttaagatttcatgatccgtttcactgaacggttgattttccagtaaatcaatatcgctggtatcaccggatattttatcaccagatattttttcaccagaaaataacggggtagacatgtaatacaccatccttcaagcttagactccgcctcactaaaacatcagggagagatttattataaccgcacttagcagaaaacatttttaatacgctgtattctatccagaataatgacgttaaaactacattaaattatcgtcaagttctcgctgggcagaccattcggctttatcacagcttagtgttcgaatacacctgatatatgagaaagttattctatttaataccgtagaaaataataagtggtcaaactcattttctatatttaatctttataacttatcaagtcgaagtaaatattctcataacaaaacaggggcatgatagcccctgttataaaatcacgtattaattacgatgaaaattattttgttttcgcgctaggtttaatatccagcaattcaatttcaaagaccagagttgagttaaccggaattccctgaacaccatttttaccataagctaactcaggtggaataaccagcttcatttttccaccttttttcaggtgttgaaggccttctttccagcctgtgataacgctattcagagggatagacaggggttctttccggtcataggagctatcaaacacattcccgtcaatcaaagaacctttgtagttcacgatgacagtatcggttaatgtaggagtcttgcccgttccttcacgttcaactttgtacaaaagacctgatttagttttgactactccggcttccttagcgaactgttcccggaatttatttcctttttcgctattttcgctcgcttctttttccattttaacttgtaaagaagccctgatttttgcatcaaactcactgaggatctgctgaatttcgctatcattcagtttgcttttattatttattgcgtctccaaagccagacataacctgagatttatcgagatcgatacccagagctttctgttcctctaaagatttttccatataacgaccaatggaagctcccagcgcataagaattctgctgttctgcggtcttgaaagctttattcaatttcacttcgtcgctggcttttgcttcattagccattacataaggtacaccgaatgtcattgccagtgtagttgctaacaaagttgtttttaagaatgatttcatcatattctccaataaatttgactgaatttgtcatcagcaaaaatcatgcaaccacatgtactataactgcctactaaaaccaataacaatatttgctatacattggcctgaaaaagattagcaacatattgatgtcaaaagctttttacttattccgttttttcttcttttttctctgccctcacctttgccaaaaggtttatacccactggatttcgagttgcatcgcggcggcaagataactcatccccgggagcatagctaaccgtatgtttataaaaactgtgaccggggtgagtgagcgcagccaacaaagaggcaacttgaaagacgaagggtataggcatcaggccaccggtattatagtatcaacccggttagaataatcatttcaccatgaaattaaatgaacaaacaacaaacaaagatgagaggggaaataatggaattatccagctttgaacaaagatttgagcaactggaaactaaactgacctatcaggaaatgaccattgaagaattaaaccaagaggttagaaagcagcaggtagaaatagacagactgaaagagcagctaaaattaatggccgaacgactgaaaacccaccagtcatcaattatcgcaccaatgtcagaagaaacaccccctccgcactattaagagccgacttcgtggggacgcccctgcatgactgaccagcgtcaatacctgtcagcaaagtccggggcagaccgtaaaaaagagaagcccgtcagcttccctttttcctgccaaaattagtggcagcttccgccgcaacagctatggccttcgtgatcatgctgatgatcgtgatcgccacaaccaccctgaccatgcacgtgaccgtgagccagttcttcttctgttgcttcacgaaccgcaacaatttcaacgttgaatttcaggttctggccagccagcatgtggttaccatcaacaacaacgtcatcgccttctaaagcggtaatttcaacaggtacaggccccatatcagtgtcagccaggaagcgcatacccacttctaattcttcaacgccaacaaaaacgtcttttggtacgcgctgaaccagattttcatcatactgaccatatgcatcgtcagcttcaacgcttacgtcaaagcgctcaccagcctcacgaccttccagtgatttctctaaaccgctgatcagggaaccacggccatgcagatagtctaacggtgcgctcaccggggactcatcaactaaaacaccatcttctgttcttacttgataagccaagctgaccaccaaatcttttgctactttcatgacatctcctacaatacccgggtaaaaacgtgagggaaaattcttacgttacgactaaaaatgccgctgattgtacgttaaa

SEQ ID NO: 1333 - DNA, 6509 bp, Xenorhabdus sp.
  CDS (6127)..(6507)
cgtgctctaaaggcccgctgattttcgtaatagagtctgtgagatcgcagacttaatcggttttccgagagaaaaaatatggctgggaggcgatcatctggggcctaacgcctggcaggatcaacctgctgaagaagcgatgacacttgcagaaacccttatttatgattacgtcgctgctggttttcgtaaaattcatctcgattgttccatgtcctgcgccgatgatcctgttccattgactgatgatattgtggctcaacgggcagcccgtctttgtctggctgccgaacaaagctggcagaacaatggtggtgaaaaaccggtttatgtgattggcacagaagttcctgtaccgggaggaacgacggaagacgttgtggatgaaatgcaggtgacgactcctgtttctgcggcatctacactgaaaattcatcgggcagaatgggtgaaagcacatctggcacacgtttggccgcgagtcattgcattggttgtgcagccgggtgttgagttcggtaatcaccaaattgaacattatcaaccggaaaaagcgtattcactcagtcagtatatcgcgacacaaccgaatattgtttatgaagctcattcaacggattaccagacgccacaaacttatcgcaatctggttcgtgatcactttgccattctgaaagtgggaccggcactgacctttgccctgcgggaagggctgtttgcccttgataagctggatcgcgaatggaatggagaatcagaggctgttcacttacgtgaaactctggagcaggtgatgtgcaatcagccggaatattggcgttcgtactataaaggcaatgctcatgaacagtatcttgatcgccaatatagtttaagtgatcgcatccgctactactgggccaattctgcagttgaatctgctgtcgaaaagttgctctctaacttgcggcgcaggcctctccctctttccatgataagccagtacctgcctgaacaggctaaagccattaatgctggcagtcttgcctatgatgatcccaaagtatgggttatggataaaatccgacaggtactgaaggattatgcagaggcttgtgaagctggagggactgcattatgacggattttttccctcattcaactcagtggttgactgaacatcaggcgcatcatacagcggaagagatccagcatcagcccaggttgtggcgtactctgtatcatgaactgcaacacagccagccattctggcaaccttttctccggcagttgctcataaagccggatttacagattattttgtgtggagcagggtcttcggcctttgtggggaaggcgattgctccttatctgcgtgaaatatggtggtctggtgcgaaattcgatgatggaaagaaacaccggcctgatattcaagccgttgcctccacagatattgtccctgctcccctgcaatatctggatacgaccaaacccactttactggtttcttatgcccgttctggtaacagtcctgaaagtattgctgtcattcaactggctgattctctcctggctgattgtcaccatctgatcctgacttgtaatccggaaggggaactggctcgttatgcagagaacaaaaagcatgtttgttcgttaattatgccggaaggggccaacgatcgtagctttgccatgacttcaagttttagttgtatggcaatggcaacgctgttacttctgggtgagcggacttttgatatgacaaagcaaaaagacgctctggaaagagtagctgcgctgtgtgaaacacaggcacctggctggcaaccgctgatccagcgaattatcgggctgggattcaagcgaatgattgcgctgggcactgccggttttgcgggtattgctgaagaaggtgcgctcaaaatgctggaattaaccgcaggccggatagcaacacgttatgactcttgcatgggagtacggcacgggccgaagtttatgattgatcatgatacgctagtggttgttatgctctccgctgatccccatcgccgccattatgatatcgatttacttaatgaactcagacgggatggtctggcaaaacaaatcatcgtcttaaccagtcagcctcatcctgaatctctggaaattcccgctgatttaccggatagctggcttattttcccgtatttacttttttttcagctactgggttttgaaacctcactggagcttggcctctctcccgataacccatgcccgacaggtgaagttaaccgagtagtaaaaggcgttcagatttatccctatacccgatcagaatagtaaaaggagttctcatgtctaccccaaatatcctattaacccgtatcgataatcgcttgatacacgggcaggttggcgttacctgggcaaattctctgggtgccaatctggttgtggtggcgaatgacgaagcagcaaatgatcttgttcagcagtctcttatggacatggtgatgtctgatggtgtccagacccgctattttactctgcaaaaaactattgatgttattcataacgctgcggaacggcagaaaatttttatcgtttgtaaaacaccgcaggatgtgctgacgctcgtaaaaggtaatgttccaatccattttgtaaatatcggaaatatgcatttttcagaaggaaaaaagcagatccataaaatagttgctgttgataaaggggatattgagacttttatcgaattacaaaaaaggggtattccctgtgaaatccgtcgtgtaccggatgaatcgggtgaagatatcgctaatcttctgaactgaggagagtgaatatgtttgttgacgcacttttgatctcaatactggcagggattgcaggaattgatttattcaacggattgacacatatgcaccgcccggttgttatcgggccattggtcgggctgattttaggggatatccagactgggttattagtgggtggcgcgttagaacttgtctggatgggaatggttccactggccggagcccaacctcccaatgtcgtgattggcgggataatcgggacgacttttgccattctcacacaggcagaccctaaagtcgcggtgggtattgcagtgccttttgctatcgctgtgcagggctgtatcacactgctgtttaccatttattcaccgatgatgcacaaatgcgatcagatggcaaaaaaacgcaactggcgcggtatagaatgggttaactattttggtctcattatcctgttctgcttctattttattgttgctttcctgcctatctactttggtgcagatactgccagagccgttgtacaacaagcaccaaaatggctgcttgatggtctttctgttgcgggtggcatgatgccggctattggttttgctctgctaatgaaagtcatgatgaaaaaaacctatgtggcttatttcattctgggttttatttcggtcactttcctgcaattgccaatcattgctatcgcgctgggtgcactcgcaattgctttaatcgattttttcaatcgtactcgtgacgataatgggaatccgcaaggtacagcatcacagtcaaattccgcagaggagatgcaagatggtatttaataaactggataaggcagtgtctgaaaaaagtcgcaagcatggaaaggatatcgctcaggatagtaactcagccgatcgtgatgactatatcgatatgacaccggcagaagatttaactaaacgtgaaatcaacgttatggctttgcgttctttgctgctacaggcttctttcaattatgaacgtatgcaggccggaggctggctctacacgctcatcccgtcgttgcgtaagatccacaaaaaccccgacgatttgactagctcgatgaaaatgcacatggagtttctcaatgtccatccgtttgacgtgactttcctgtccggtctggtgttggcgatggagcgcagtaaagagaaaatttccactattcgcgcggtaaaagttgccctgatgggaccattaggcggaataggtgacgcgctgttttggttaacattattgccaatctgtgcgggtatcggagcgtcattagcgttacagggcagtattctgggtcctattctgttccttctgatgttcaatgttgtgcactttgcactgcgttttggtctggcacattatggttatcacaccggcactaaagcgataaccatgctgaaagttcatacaaaaaacatttctcatgctgcttcgattgtcggtatgacggttattggcgcgcttgttgcttcttatgtccatctttcgacaccttttgttatgaaggctggtgaggcaaaaatcgcattgcagactgacgtcctcgataagctgatgccgaatttgttgcctctcacttttactttgctggtttattggctgatgaaacgcggtttctcgccagtaaaacttatcggtatcacagccgtatttggggttgttggtaaattggtgggatttttataaggaaaaaacatgctgggtattgtaatcacaggacacgggatgtttgccagtggtctgctacaggcggtggtgcagattattggtaaacagtcgtcatgcattgccattgattttcccgatggtatgaccacagagcaactgtctcaggaattatataccgccagagagacgtgtgattcggggaaaggggggattttcctgacagatttgttagggggttctccttttcgtcaggcggctcaactggctttaattcaccctcagtggcaggttattacgggtacgaatatgcaactcgctgttgaaatgatgatggtacgtgatgagatgaatgcggttgagtttcgtgatatggcactggagtgtgggcatcgcgggctgaccagtctgtggcaccagcagcaacaagtaaaacaacaggtattacctgatgacagtgatggtatctgaggagtccgtatgtttttaatctctaacagtaaaatgttgaaaaaagcccagcgggaaggttatgccgttcctgcattcaacgtccataatctggaaacagtgcaggttgtggtggaaacagcggcaaaaatggagtctccggtcattctggccggaactccgggtaccttcacttatgcaggtcttgaatacatggtttctatctgcaaagaagccgcgatgatcaataaactcccgctggcactgcatcttgatcaccatgaagatatcaatgacatccgtcacaaagtcgaaacagggatccgttcagttatgatagatggttctcatttccctttcgaaaaaaatatatctacagtggctgaagttgtacgtttatgtcagcgttttgataccagtgtagaagccgagctgggaaggctgggagggcaggaagatgatttgacagttgacagtaaagacagtttttataccgacccactagccgcgaaagaatttgttgaacgaaccggaatagattcactggcagtggccattggttctgctcacgggctttatcacggcgaacctcatctggatttctcacgtctggcagaaattcatcgtcacgtagaggttccattggttttacatggtgcatcgggcataccggaagagatgatccataaatcaatagcactgggcatttgtaaagttaatgtcgcaaccgatttaaaaattgcttttgctgatgcggtaaaagcctatttcgctcagtatccagatgctaatgatccgagaaaatatattacaccgggtaaaattgcgatgcagaaagtggtagagaagaaaattactatttgtggtagtgctgggagggtataggttttatataccttccatcttttaaatttcctctttttgttagctaagctagctcacctcagccacataatcatttatgctcttggaggttctttctcttgctactgagacgaaactcaagattcattgagtatatgttaaggtcttgaacaatgtcacaaaaatagtgaaaaccataagctagttactaatggatatgataaccatatgaaagtactttggttatctaaaggtattcaaaatgaacaaatggttagcgattgcaggttcagtgcttatcctttctggttgtaaggttgatgttgaaacgaaagtgaatacggatgatcttacctcggttgaacataaactggttaagggcaacatcgatattgaagtctcatcctgtaatgattacgaagattcccgtaaagaatcaaagaatgtcattgaattaaaaaataaaatccccactatttttaaaaatgacgagtatgtagagtgttatcgtaagaaatttgattcctatgcacatttcactattcctgttgctgtaggcatatcaccagaaaatggtctgagtcatgatgcagatgtctttattctttctcaccaaaaaacctatgcgggtgcgctgatccccaaagatgtgcttgatagaatcaaaaaggcacaaaaagacatgatgggaaaacttgatatcagaatgactattat

SEQ ID NO: 1334 - DNA, 6509 bp, Xenorhabdus sp.; identical to SEQ ID NO: 1333
  CDS (4959)..(5813)

SEQ ID NO: 1335 - DNA, 6509 bp, Xenorhabdus sp.; identical to SEQ ID NO: 1333
  CDS (4509)..(4949)

SEQ ID NO: 1336 - DNA, 6509 bp, Xenorhabdus sp.; identical to SEQ ID NO: 1333
  CDS (3603)..(4499)

SEQ ID NO: 1337 - DNA, 6509 bp, Xenorhabdus sp.; identical to SEQ ID NO: 1333
  CDS (2897)..(3613)

SEQ ID NO: 1338 - DNA, 6509 bp, Xenorhabdus sp.; identical to SEQ ID NO: 1333
  CDS (2328)..(2810)

SEQ ID NO: 1339 - DNA, 6509 bp, Xenorhabdus sp.; identical to SEQ ID NO: 1333
  CDS (1174)..(2313)

SEQ ID NO: 1340 - DNA, 6509 bp, Xenorhabdus sp.; identical to SEQ ID NO: 1333
  CDS (14)..(1120)

SEQ ID NO: 1341 - DNA, 7169 bp, Xenorhabdus sp.
  CDS (1579)..(1791)
gcccgaacattagcattacaaccacaaaatggaagaaacggcagagtacgtataatgcctcgagtgaaatcattatcttacagtaaagttatagacaccttttgttttatgaccatcgactgacaacacactccagtcaacgcgatattccccggcagacagtttggcttcaaccggcagaatcaacttggttttagtttctggatcaagctccagtcttcctgttttaatctcttcttttttcggaccagttaattttactttgctaaaaccgagttcaatgcgctctgaaaaactcagggttatagcttgtggtgctgcttcaaccgttgtattttcagccggagtttgatcttttaagtgggcgtgtgctaaagcctgttggcaggatataccaacaaataaaacaaccaaagcagataatttagtccagaatgagcgaatgctaaaaatagtcataaatatataaccctttaatataaagacaaattttataattgagaggattctatatcaaaagacaagtttaatctgtggtaaaaggccggacctgtgaagcaccacgcaaaaacaatagtggaaaataaaacgaaaaaccgtgaatcctgcttgacatagtcaaaaaacagaagtcacggtctaaaaattcatcagctacagactaatttattataaactcttctcaggcgtgggctgcatgtgcaggaacagataatcctttcaagtccttatccagtaagaataaagatttaccactttcacccaccatacccagtttatccagaatagatttgaataatttctcttcttcatgctgctcagaaacataccactgtaagaagttaaaagtagaataatcctgagttgtcatcgccaagtgagccaatttattaatctcttcagtaatcaacttttcatgctcataggtttgattgaatacatcagaaatggaactgaattcaacaggtggagcctgaatcgcacccagtacaggcattgctcccgtatcacccagataatcaaataagcgttgcatatgctgcatttcttcctgtgaatgggctctcagaaatgctgccgctccttcgtaccctttatcgctacaccatgcactcatttgcagatataaattagcagaataaaattccagatttaattgctcatttaatttcgtgatcatttcttgtttcaacattagcccaatctcctgatgattaattaactggagcatattatgcctattaaaaaccaataaaacaaaaataaattaaaaataaataagccattgaaaataaataatttatatttatcctttaacaagaataaatctcattaaatataaggaaataataatcagttttatttgattaaatacttattaaaacaaagtcaatttaatagaaatgataattgatattattaatatttactcgactattttttattcaaataacagcttgctaaatgaacgagactccattaattttatctcttgaggagatatcttatagatttcaagaatcaatttgagagacgaaaggtatacatagtatttttggagacaatatgatagagcataatttagccaggctatcaaaagatgaaatggacaaagtcaacactgatttagcggcatcaggagttgcatttaaagagcgttataatatgcctgtcattccggataatgttgagcaaactcagccacaacatctgagggaatattttcagcagcggttgaggcattaccgtcagcaatcaaggtctttatcacgtttaccttacgagccaaaaagtcgttaaaaaatagtaacttaaaaatagcaaaaagtaaccactgcgtgagcaagtggttacctcatctactttccaacaaacttatccgttgccttgattaactgatgcaaaatacccggttcatcaaaagagtgacctgctccttcaataatatgaagttcagcttctggccatgcttttgccagatcccaggcattctgtacctgacatgccatatcatagcgtccatgaataatgactgctggaatatgtctgatagcatcaatatgatctaatagctgttgcgtctcatccataaaaccgttatggataaaataatgattttcaatacgtgcaattgccagagcaaactgttcttctgcaaatgaatcagcatgttcagaaggtaacagtgtgatagtttcaccttcccaggtactccatagttgagcagcttccaactgtacggcgggatcgctacttgtcagacgtttctgataagcactaatcacatctgtgcgctcttcttcagaaagaatggataatatacgctcccatttttccggaaaaaatcgggaggcaccttcctgataataccattgcaattcctgaggccggagtaggaatattccccttaataccagctctgatacagcatgaggatgtttctgggcataagccagagataatgttgacccccatgaaccaccaaaaaccagccaattatcaacgcccattagtgtacgtaagcgttcaatatcatcgaccagatgccaggttgtattattttcaaggcttgcatgaggcttagaacgcccacaaccacgctggtcaaatagcatgacatggtaatgttcagggttgaacagttgccgatggtagtgggctatttctccgcccggtcctccgtgaataaataccgcaggtttacctttgggattaccgcacagttcccagtaaatctggtgcccgtctccggtatccagataaccagtcttatatgcatcataagccggataaagtttccgtaattccgtcatagagacctctcaatcagatacacccactgggttccaaaactgtgtccgccagtaagagagtgacaaagttgccggagcaaccaaaactggctccattgggaagcaggagcctttaattgatcctcagaaagcctaactcattatgtgacaggaataagagagcgtaaccaacaaataggcaacttgaaagaagaaaggcataaaaagggatacgtttccagtatcccgaacacatgtgaagctatcatgactctttaattaccggatttcactatagctgatagtctctttctggcaatcaattgtgacattatagcttttgtcatttttagtgcccctgacagctaacggaacctgcaatgcgtctttatcaccggtaatatcgttgacatttacccatgctacgggttttgcagtacctaattgtttcctgtccttatcccagtgattaagacgattttgcaggaaatcttgtttaacttgtgcggctatttgatctttagtcagatttttgcaggaaacaaatttagcgacatggtcattttcagcagctgatacagcagttgtaaacgcaaaagaaagtgcaacggccacattcaataaccctgcacgatggatgaattgttttatcttcatgttacctcctattaccatccaaatagtatggattaatgttaggttaaactagggcgtgttgacgttttgttttcatcacttactcgacccacatgggtaaccagataatgataaatgccagtgctaatgtgctggcgtaatttctcgctaatttatcgtatcttgtggcgattgcacgaaaatgtttgattctggcaaatgcattttcgactaaatgacgataacgatataaatccttatcccactttttatccgaatttcggctattttttcggtagggaataaccgctgttgcaccttgttcttcaatataagttctcaatgcctgactatcgtatcccttgtcagcaacgacaaaatccgcgggcggtgattgcgccaccaaactttccgcatgcaccatgtcgggagtttgtccctcggataattcaaaatgaacaggcaggccgtaactgtctaccgccaaatggattttaatcgagcctccaccccggctttttccaatcgcttcattttcctttgaagctgcgcctgaactgtgctgatgagcacggacaatactgccatcaataaacaaccattcagtatcagaattcttagctaattcgttgaataatgaattaaaaacacctttttttgaccagacattaaaacgcttaaagaccgtattccatttcccatattcagcaggtagttcccgccagggtatcccggttctcattcgaaaaagaataccttccatgatgaggcgatgcgtttttttatgataggtaagccgattttgttgcatgaagacaaatagcttatcccacacaggatctgataacataggtcgtggcatgatagttcgggtaacgagttttttggcgaaaataagagaccaaattatcatgccacccaattcccttcgagcaaacgtcaacacgccctaactgcaatggcaattttttggtgcgattcatgagtattgtaaagcaaattaaatttcagaggattgtctttattgaatcctgcttcattcaatagcgctttagctttttcaatacgctgttcctgagtccaagaagcatagtcaggccctgaaaattcgaagccgccagtattggggggaacaagagtataagcaggcttctgaccctgccttaatactttataagcgatcacatctctgtctactgctaaatttaatgcctgcctgactttaatattatcaaaaggtggttttttattattaaattcatagaaataagtaccaactttagaagatgtataaacctgctctcccattttttcctttactgattcataagactccagtggaatggtgccggtaaagtccacctcaccagccaaataacggcttaaagcggatttttcagaagcaataacaagataatgtactttatcaataacggtgtttttatcatcccaataatgtggatttctgactcctacgattttttcattcaccttccactcagacagtttaaatggcccattgcccacaaaattacccggccttgtccatttgtccccatgtttttcaatggcatttttattcacaggtaccataacggtatgagtcagcgcctgtaaaaaatcccccattggtttatcaagacgcacttccaaggtcatatcatctaatgcttttactccaagttcttcgcctttcctcttgcctgtaagcacatcattggcattgataatgctgatattttcaagataactaccatagggagatacaatgtcaggctcaaccaaacgtcgccaactaaagacaaaatcatgagcagtaatcggcgtaccatcagaccacttaatcccttttctcagatgaaaaacccatgttttattatcactggtttcccaactctcagctaaccttggctcaatattgccccgcctatcgatataaactaatccctcaaaaaaatcatgaataatatcaaactcaacatcgctggagactttatgcacatccaatgaggcaggctctgataaactattacgtacaatttcctgcttagcagccagttttgttccttccggcacaacagcagcgtaagataatgaaacatttccaaatattgctgcaataacacaagagagtatgctgatttttttctttactgctaaattagtcatcattttttgtatagacataataaagctctccataattatattatcacttaaacattcatcattatatttctctataaaaacctgacttatatggcatctaaaaaacgctttaacacttgttcttacgttacatatttggcatatcttctgacgccaatatcaaaaaacaatttagccataagaattaaaattaatgtaatagctgactgaataaaaaaccatttcacgctcattagcccatttgcaactgaagcaggaactccggttataaataaacagggaagcacaaacatcagaataatacgtatcaagccgtggaaagattgctctggccttactaacactttaaaacaaggattagaatatttaatactcactaaagccgatgtccagaatatgctcgttcttatgatccatgtgatcgctgtcagaactaaaactccctcaaagaccataattaaatgtaaaaacatgtacaaaatatcagtatttaaataaatatgaacaacaaaaaataagactaaagataaaaatgacaataaaaagtgttcaaatgcaatgcctgttgcaacataaagaaattgagtatttatcggcaatatcaaatgtggatctaacctcaatgacttaactttatttgtcagtaaaaaacttcctattccgaataaaaaaagataaaagttatctaccagacatacagtagtaaaaaaaataagaacgaagtcattagacaaaatataatcagaagactttgatcctaaaatggcataccagaaaaaaccctgtgccacatagaaattaaaattaataaaagccgccatccaaaaattaaaagagctttttttagcttctgacaaactatttttaaaccctataaatataatattaagcattgccattatacccttgattatattttatcatataacgccagatgacactgaaaattatcatcaggaagaacattaccaacaatccactcagtataaagtaaagagaaattgaatttgttgcaattttaacagggacgtaagtaatatactgaaaaggaatataattaaaaaacatttttatggtgttattaaatacatctaatggtattaccgcacctgataatgcccatgataatgtatcctttaccataataaaaagaaataacacatctaaaatacaacaaaacttaactaccacctactgaagtaggtgggttagcgcacttcggtgctgacgactgaaagtcgtcgaaccacgcacctcgtaaacgcgcgtaggtcaaaacattaaagtcaaagtcaccgtctaaagacggtggttttaacctgtcatatggaaaaataaatctaaaaaaacataatatcgggcatcatacatataaattaatgttaaagttcaaaactaagttacattcaaattaaaaaataataatttcatatagagattacttaattaacaaaattacaacatttgttttcaaaaacacaaggtgcatcacaattataatgttgcattagctcatacctccgtgagcagagatatggagcaatccttttatttaatccggtttttttagag

SEQ ID NO: 1342 - DNA, 7169 bp, Xenorhabdus sp.
  CDS (6711)..(7097)
ctctaaaaaaaccggattaaataaaaggattgctccatatctctgctcacggaggtatgagctaatgcaacattataattgtgatgcaccttgtgtttttgaaaacaaatgttgtaattttgttaattaagtaatctctatatgaaattattattttttaatttgaatgtaacttagttttgaactttaacattaatttatatgtatgatgcccgatattatgtttttttagatttatttttccatatgacaggttaaaaccaccgtctttagacggtgactttgactttaatgttttgacctacgcgcgtttacgaggtgcgtggttcgacgactttcagtcgtcagcaccgaagtgcgctaacccacctacttcagtaggtggtagttaagttttgttgtattttagatgtgttatttctttttattatggtaaaggatacattatcatgggcattatcaggtgcggtaataccattagatgtatttaataacaccataaaaatgttttttaattatattccttttcagtatattacttacgtccctgttaaaattgcaacaaattcaatttctctttactttatactgagtggattgttggtaatgttcttcctgatgataattttcagtgtcatctggcgttatatgataaaatataatcaagggtataatggcaatgcttaatattatatttatagggtttaaaaatagtttgtcagaagctaaaaaaagctcttttaatttttggatggcggcttttattaattttaatttctatgtggcacagggttttttctggtatgccattttaggatcaaagtcttctgattatattttgtctaatgacttcgttcttattttttttactactgtatgtctggtagataacttttatctttttttattcggaataggaagttttttactgacaaataaagttaagtcattgaggttagatccacatttgatattgccgataaatactcaatttctttatgttgcaacaggcattgcatttgaacactttttattgtcatttttatctttagtcttattttttgttgttcatatttatttaaatactgatattttgtacatgtttttacatttaattatggtctttgagggagttttagttctgacagcgatcacatggatcataagaacgagcatattctggacatcggctttagtgagtattaaatattctaatccttgttttaaagtgttagtaaggccagagcaatctttccacggcttgatacgtattattctgatgtttgtgcttccctgtttatttataaccggagttcctgcttcagttgcaaatgggctaatgagcgtgaaatggttttttattcagtcagctattacattaattttaattcttatggctaaattgttttttgatattggcgtcagaagatatgccaaatatgtaacgtaagaacaagtgttaaagcgttttttagatgccatataagtcaggtttttatagagaaatataatgatgaatgtttaagtgataatataattatggagagctttattatgtctatacaaaaaatgatgactaatttagcagtaaagaaaaaaatcagcatactctcttgtgttattgcagcaatatttggaaatgtttcattatcttacgctgctgttgtgccggaaggaacaaaactggctgctaagcaggaaattgtacgtaatagtttatcagagcctgcctcattggatgtgcataaagtctccagcgatgttgagtttgatattattcatgatttttttgagggattagtttatatcgataggcggggcaatattgagccaaggttagctgagagttgggaaaccagtgataataaaacatgggtttttcatctgagaaaagggattaagtggtctgatggtacgccgattactgctcatgattttgtctttagttggcgacgtttggttgagcctgacattgtatctccctatggtagttatcttgaaaatatcagcattatcaatgccaatgatgtgcttacaggcaagaggaaaggcgaagaacttggagtaaaagcattagatgatatgaccttggaagtgcgtcttgataaaccaatgggggattttttacaggcgctgactcataccgttatggtacctgtgaataaaaatgccattgaaaaacatggggacaaatggacaaggccgggtaattttgtgggcaatgggccatttaaactgtctgagtggaaggtgaatgaaaaaatcgtaggagtcagaaatccacattattgggatgataaaaacaccgttattgataaagtacattatcttgttattgcttctgaaaaatccgctttaagccgttatttggctggtgaggtggactttaccggcaccattccactggagtcttatgaatcagtaaaggaaaaaatgggagagcaggtttatacatcttctaaagttggtacttatttctatgaatttaataataaaaaaccaccttttgataatattaaagtcaggcaggcattaaatttagcagtagacagagatgtgatcgcttataaagtattaaggcagggtcagaagcctgcttatactcttgttccccccaatactggcggcttcgaattttcagggcctgactatgcttcttggactcaggaacagcgtattgaaaaagctaaagcgctattgaatgaagcaggattcaataaagacaatcctctgaaatttaatttgctttacaatactcatgaatcgcaccaaaaaattgccattgcagttagggcgtgttgacgtttgctcgaagggaattgggtggcatgataatttggtctcttattttcgccaaaaaactcgttacccgaactatcatgccacgacctatgttatcagatcctgtgtgggataagctatttgtcttcatgcaacaaaatcggcttacctatcataaaaaaacgcatcgcctcatcatggaaggtattctttttcgaatgagaaccgggataccctggcgggaactacctgctgaatatgggaaatggaatacggtctttaagcgttttaatgtctggtcaaaaaaaggtgtttttaattcattattcaacgaattagctaagaattctgatactgaatggttgtttattgatggcagtattgtccgtgctcatcagcacagttcaggcgcagcttcaaaggaaaatgaagcgattggaaaaagccggggtggaggctcgattaaaatccatttggcggtagacagttacggcctgcctgttcattttgaattatccgagggacaaactcccgacatggtgcatgcggaaagtttggtggcgcaatcaccgcccgcggattttgtcgttgctgacaagggatacgatagtcaggcattgagaacttatattgaagaacaaggtgcaacagcggttattccctaccgaaaaaatagccgaaattcggataaaaagtgggataaggatttatatcgttatcgtcatttagtcgaaaatgcatttgccagaatcaaacattttcgtgcaatcgccacaagatacgataaattagcgagaaattacgccagcacattagcactggcatttatcattatctggttacccatgtgggtcgagtaagtgatgaaaacaaaacgtcaacacgccctagtttaacctaacattaatccatactatttggatggtaataggaggtaacatgaagataaaacaattcatccatcgtgcagggttattgaatgtggccgttgcactttcttttgcgtttacaactgctgtatcagctgctgaaaatgaccatgtcgctaaatttgtttcctgcaaaaatctgactaaagatcaaatagccgcacaagttaaacaagatttcctgcaaaatcgtcttaatcactgggataaggacaggaaacaattaggtactgcaaaacccgtagcatgggtaaatgtcaacgatattaccggtgataaagacgcattgcaggttccgttagctgtcaggggcactaaaaatgacaaaagctataatgtcacaattgattgccagaaagagactatcagctatagtgaaatccggtaattaaagagtcatgatagcttcacatgtgttcgggatactggaaacgtatccctttttatgcctttcttctttcaagttgcctatttgttggttacgctctcttattcctgtcacataatgagttaggctttctgaggatcaattaaaggctcctgcttcccaatggagccagttttggttgctccggcaactttgtcactctcttactggcggacacagttttggaacccagtgggtgtatctgattgagaggtctctatgacggaattacggaaactttatccggcttatgatgcatataagactggttatctggataccggagacgggcaccagatttactgggaactgtgcggtaatcccaaaggtaaacctgcggtatttattcacggaggaccgggcggagaaatagcccactaccatcggcaactgttcaaccctgaacattaccatgtcatgctatttgaccagcgtggttgtgggcgttctaagcctcatgcaagccttgaaaataatacaacctggcatctggtcgatgatattgaacgcttacgtacactaatgggcgttgataattggctggtttttggtggttcatgggggtcaacattatctctggcttatgcccagaaacatcctcatgctgtatcagagctggtattaaggggaatattcctactccggcctcaggaattgcaatggtattatcaggaaggtgcctcccgattttttccggaaaaatgggagcgtatattatccattctttctgaagaagagcgcacagatgtgattagtgcttatcagaaacgtctgacaagtagcgatcccgccgtacagttggaagctgctcaactatggagtacctgggaaggtgaaactatcacactgttaccttctgaacatgctgattcatttgcagaagaacagtttgctctggcaattgcacgtattgaaaatcattattttatccataacggttttatggatgagacgcaacagctattagatcatattgatgctatcagacatattccagcagtcattattcatggacgctatgatatggcatgtcaggtacagaatgcctgggatctggcaaaagcatggccagaagctgaacttcatattattgaaggagcaggtcactcttttgatgaaccgggtattttgcatcagttaatcaaggcaacggataagtttgttggaaagtagatgaggtaaccacttgctcacgcagtggttactttttgctatttttaagttactattttttaacgactttttggctcgtaaggtaaacgtgataaagaccttgattgctgacggtaatgcctcaaccgctgctgaaaatattccctcagatgttgtggctgagtttgctcaacattatccggaatgacaggcatattataacgctctttaaatgcaactcctgatgccgctaaatcagtgttgactttgtccatttcatcttttgatagcctggctaaattatgctctatcatattgtctccaaaaatactatgtatacctttcgtctctcaaattgattcttgaaatctataagatatctcctcaagagataaaattaatggagtctcgttcatttagcaagctgttatttgaataaaaaatagtcgagtaaatattaataatatcaattatcatttctattaaattgactttgttttaataagtatttaatcaaataaaactgattattatttccttatatttaatgagatttattcttgttaaaggataaatataaattatttattttcaatggcttatttatttttaatttatttttgttttattggtttttaataggcataatatgctccagttaattaatcatcaggagattgggctaatgttgaaacaagaaatgatcacgaaattaaatgagcaattaaatctggaattttattctgctaatttatatctgcaaatgagtgcatggtgtagcgataaagggtacgaaggagcggcagcatttctgagagcccattcacaggaagaaatgcagcatatgcaacgcttatttgattatctgggtgatacgggagcaatgcctgtactgggtgcgattcaggctccacctgttgaattcagttccatttctgatgtattcaatcaaacctatgagcatgaaaagttgattactgaagagattaataaattggctcacttggcgatgacaactcaggattattctacttttaacttcttacagtggtatgtttctgagcagcatgaagaagagaaattattcaaatctattctggataaactgggtatggtgggtgaaagtggtaaatctttattcttactggataaggacttgaaaggattatctgttcctgcacatgcagcccacgcctgagaagagtttataataaattagtctgtagctgatgaatttttagaccgtgacttctgttttttgactatgtcaagcaggattcacggtttttcgttttattttccactattgtttttgcgtggtgcttcacaggtccggccttttaccacagattaaacttgtcttttgatatagaatcctctcaattataaaatttgtctttatattaaagggttatatatttatgactatttttagcattcgctcattctggactaaattatctgctttggttgttttatttgttggtatatcctgccaacaggctttagcacacgcccacttaaaagatcaaactccggctgaaaatacaacggttgaagcagcaccacaagctataaccctgagtttttcagagcgcattgaactcggttttagcaaagtaaaattaactggtccgaaaaaagaagagattaaaacaggaagactggagcttgatccagaaactaaaaccaagttgattctgccggttgaagccaaactgtctgccggggaatatcgcgttgactggagtgtgttgtcagtcgatggtcataaaacaaaaggtgtctataactttactgtaagataatgatttcactcgaggcattatacgtactctgccgtttcttccattttgtggttgtaatgctaatgttcgggc

SEQ ID NO: 1343 - DNA, 7169 bp, Xenorhabdus sp.; identical to SEQ ID NO: 1342
  CDS (5975)..(6487)

SEQ ID NO: 1344 - DNA, 7169 bp, Xenorhabdus sp.; identical to SEQ ID NO: 1342
  CDS (4357)..(5310)

SEQ ID NO: 1345 - DNA, 7169 bp, Xenorhabdus sp.; identical to SEQ ID NO: 1342
  CDS (3721)..(4098)

SEQ ID NO: 1346 - DNA, 7169 bp, Xenorhabdus sp.; identical to SEQ ID NO: 1342
  CDS (2886)..(3641)

SEQ ID NO: 1347 - DNA, 7169 bp, Xenorhabdus sp.; identical to SEQ ID NO: 1342
  CDS (1573)..(2802)

SEQ ID NO: 1348 - DNA, 4993 bp, Xenorhabdus sp.; identical to SEQ ID NO: 184
  CDS (1231)..(2064)

SEQ ID NO: 1349 - DNA, 4993 bp, Xenorhabdus sp.
  CDS (15)..(479)
aatgcgctctaaagaaaaagcacggtaggcgttatttgggttataaacttaccctaaatgtcgatccaaattttatagtgatccgccccatcgcgacaggaaccggggttgtccatgatagccagttttttgaagctgttttggacaggtcaaatccccgtcgggacatttatgcggataaagggtatgccagccaaaaccgtgaacgtgtgctgaaggagcagggctatcgtgtgcatattcagagaaaagcggcacgtaataagcccttatcacactgccaaaaaggccgaaataagaaaatagcgaaaactcgggcacgcgtagaacatatctttggctcactctctcagatgggtgaaaaaattattcggacgataggccagctgcgagccaattttgcgatgacgatgaaggcaacctgctatgatttgcaacgtttggtttatttcggaaaatcgggtattcatgctttttaatttcgagatgtgatgaaaaagtgatgcgtttgtttttttcccctgaacaagcaagaaaaagtcatacacaataaggtcagttattggtgagttcaaaattgatcttattttttgtattgagagtttttagaggttcccagatataaaattctgcacaagacactccgcaaataccctgttcagtatttgctgtctctcctactatcacatcacttcgtctgcctacagggaatattgctgacaatgacccatataattcagtggaatgggttatttttgattctgcctatacgcccaatgttaaggaaatatgccttagctaataccgacaaacgatgataacacgacgcaaagggagtatcggtattgcaattcctgtcaaaataaagaaattgccaccgttactttaacttcattaagtgatttatctcaaattttaatatgttaaaaataggtaaatttgttcttccatttctaagactatttgcaaacaaggagtctgtatgaattttcgttcgtgtatagaaaagattgaagatttatttgaaaaagtacctaaatttgccagtagaggcagcgcgataatgactaatcttgcaagttattcagtcgtaaatggactggttggcttctttgctctaagagcactttgcaaatactcgcaatatgaagtggttataggatctatggtaagttttttggttgctttcctatttgcactcttcttattagataccttttcgaatcacataccattgaaagaaatcagtggaaaaattaaatcagtaccggttagatgcttcctatacttcatttttgtcgcaattggcatattgatcaattttacatacactgcgggaatttatatttcattattcaatttttcttcacaagtattaacatgtaatccataaagatagtttgcacaaaaaaccatgtgtcatctgaatattaattcatttctgtacacccactattacaagacggacagggattaagttcgtttgtttcagtcattattttttctcccacattcaatattcacataatcctgcaaatagcttaattttgcccggtcgttgatgatgccttctcggatatcaagaacagttgatccaacttctccagtgagttcgacggaggttggagtgcccacgctgccggaagaagtggtttcagacacggggcaggtggcttggatgcgcagcttgcgacgaccagcggcaacatcagcccgaagagtgtcaatttcagtcttggcattggcgagttcctgagtgtgtttactatccaattcatgcagcatgtcaatatgcgtgttctgatagttaatggtgtcagtcagttgctgaatttccgttatctgctcactattaatcccaatctgtttcttatacccagagcggtataagaaggctgcaactgaagcaataatcaatgcaataacaacgccagaggtgaaattgagcttcatgataaaaacatctggtgttcagatgcccggcgattatccagcccacgcataaccttgcctgccgctctattccagcgggaaaactctgccgctgcacctgaataatcaccttgattgagtttcttcaatagagtggaacctgaaaagttaccactaccacaattgaagataaacgaacacaaagcatcgaattggccttgattcagcggaactttaacccattgctttaatgtgatgtaaataggttggagatcatcacgcagaaatgcttcggcttgctgttctgtaatcacatcaccttttctcaccccttttgtatgaccataaccaatggtccacggcatgccaccagttgcgggatcagggtaagcttttagtttcaggccttcatactgtttgatgcacttaaggcctttatcactgatttccatcagaggatgctcctgctcttttctctgccaccttacgcaacaattggccgataaagtccgtacctaaataaccaattaccacactgccgatataggccaaatcaggattcagaccaaacagatttaatacatcacgaataaaccaagcgaacatggcacatataaaggcatcgatagagacttttaaccaaccgacaccgttatagcggcctcggataaatgccattattcctgcgagtacagctccgatgccttgttcttttactgatataatccactcaccgaggtatacccagatatcagagttttctttcatttttatacaccccctattcgagcaatgagcatccgtggggtgaaatatatccacccctgtgagttgtagtaagtaaggcaccagcaacaaaaagtagtaacgtaattgcagtggcaaaaacaaaaaactgcgtcaagtgaagtgaagtgacttcattaagctggacacttcataaaacacagtcttaacataatctaatccagtactatgaatatattttttatatcaattattcctcaaaaaaattaaattcaagttctagtatttttccaattgatgagataaataattcttctaatgctgctgaaccttctgttcgaggatataatagagtcgcagaatagtatgtcttagcgattcctaaatcatattctttatctaaatatttaataattaatttttttgaaccaagttggtctttgattttactagagttactcatctcatcaagaacaaagtcacgattaggttctgaattcgaatgaattactctgaattgacgaattttatttggaagcaatgtatcattactaatgacttcccatgctcctgtactgtagtcagtagtggtaccatgtagatctccataaccaacatagtgagttttgttagaggaaatatattcaccaacagttaaccgtactttcaattgatgcgcaggcttaacaaatggtttaggtttaatgcgctcttctttctgttctacaaaattccaatcacacgccatcatatcttcctgcgttggctgccatggtacaaaattaccatgttcattgcgcagttcaatatgcgtcaaataatcgtatttagtcccaatagcaacaccatcaacggcataagcactctctttctctacgactaaattatttacacgtggagtgatagccaaatacatctcattattcccttggcaattcacccaaacagaacgggtaacgcgcttgcgtagttttaattgaatcaaagcccaagaaaaagaacccaccggtgcaataaaacaatcacagtgatattgttttggatcaaaagggcactcatgttcaggcttaacaaattcagacatattatttccttatatttataaataatgggaagttaaatttaatatttaatttcctcctgctgttaaacaggatgaatatattaataaattcttatgattgaatatatcgattcgccttgtgtggtcatttttacaatccactgaaatccatttcatttatttgtgaataatttgatttcctgctccgtctgcttaaaccgttcttcttccaactctacccccaatacacgacgattcagttttaatgcggctttcagtgtcgccccggaacccataaagaaatcggctaccagctccccttcccggctgctggactggataatatgggccattaaatcagccggcttttcgcacggatgtttgcccggataatactgtacaggggaaaagtgccagacatcggtataaggcacgtctgccgtcaccgtgaacgagcggcgcattaaaccgtattccttccgcagttcgtcatactgacgcgacagggttaaatgagacgccaccagctcagaatacgggatgttcagttcgccacgctggtgcttttctttggcgatacggtcaaacagtccctgcaacttttggtagtccgtttcactgggtaactgccactggctgtcgctgaaccagtgactggccatctgctttccggtggctttgtgtatggcttttgccgtgatgcctaaagctttgcgggcatcacgaaaataatccaccagcggtttaaacaccgactgtttcagttcccggcattgtttgaaatagccatcgcctttcgggtggtatggcccttggtaatgttcagcaaaaataatacgttcagtggccggaaaatacatacgcagactttctttatgctgcctgcgccacgggcctgacggtttcgcccagataatctggttcagcacattaaaccgttcccgtaccagcagttccgtatccgaggctaggcgcgaaccgcagaacatatacaggctgccgctcggtttcagtatcccatgtggccttttgactgggcaggtctgatttgtgattcgtagggatcgcgtctttttgcccgttctgcgcgaagggcttggggattaaattagggtttttcattgttcaccttattgtgcaaaagcggcctgaccgaaaggctggaagcccgttccgtagaagccgaaaaattcacccgcgggcagttctgcgatagaaatctgaacccctgacggatgcggtaagatgtgg

SEQ ID NO: 1350 - DNA, 5768 bp, Xenorhabdus sp.
  CDS (25)..(360)
tgctcgagccatgtgctctaaagtctttggggagcgacgctgagcaccggtttcctaacagcaattctgtcatcagtgatgaataacctgcctaccgttctggttggtgcactgtctgttgaatccagtacggctacgggggttatcaaagaggctatgatttacgccaatattattggcagtgatctgggacctaaaatcactcctatcgggagcctggcaacgttactttggctgcatgttctcgcgcagaaaaatatcattatctcatggggttattatttccgcgttgggatcgtgatgaccgttccggttctttttgtgacgttgtctgcactggcactacgcctgtcgttttaataaacctttaattatgggccggattttccgctaaacagaaagataatgtgtaatagcagatatcactatttatcataatccggcctgtcgtgctttgcgcaatacactgaaattgatccgtaacagtgtattactgaccggcggtagcactcttgaaagccgggtaacggtcaggctcgctgtaatattaggtataaacactctctaattttaattaaaaatcaaagaactggaacaatgataattcatcataattcttcttgtaatgaataaacatttaaactcctctaaaaaataacacaaataaccccccctgtactataatagataacagatatcagctttcttcaagtcgctggtttaatgatttaaattaataggcaattattttaaatcaataacccaatgtacaaacttgcaataggtcatttaaagaaatatcaacttattcacttcgtttataacgacatttcacttactattttaatgacatttaatatataagactttattttaaataataaatcctatttttgaaatttcgtgtttatatcatttcatcttcaattcaatccacttattaaaatataaatactgtttaatttaaaaattaagagagtctaagatgaagtatattttattaattctattattatcagcatctaatgttttggctactcaggattatgatcccgctgctcgtacaaacccgaacaggcatgcttgctcttatgccattgatgatcaagtctatagtccaacccgatattacaataatcatctaagatatttaatagaaagtaatataggacaggttgcagtttttaatggcggaagacattatcttgttgatactgccacagaaatacgccatgcattcgatatgtggcggcggcgcttaacccaaaggggtatccctatcacccttactgaagtccctcaaggcccaccggctgaagttaatttttggttctccagagcagagacagacccagaatataaccagcaaggttttttacggcaacataatatacatgctctgacaacgttaatcttaccggatcaaattatgaatcattacgtatacccactttttaatatttcgggcattgttgtatcaaaccagatgcatttttcaaatgaagaattcgatatattcagggatgcattgccttcagggattggagatcaacaaattgcaaacatgctagtttattatgttatgtctcatgaaattggtcatgctttaggtctgcaccatccaaatgaacatatgagggatttgggatggtctcatcaggatcctatagatctagaagctggacatgtttatggagagtcaattactgcactcgttccccgaggagcaccagacgccagaacaccattaatgggggctgacgatggatattttgaacgattacatgaccaattacatagaagattaaactatgatgatattggaccatcagaattagagctaaacgctatagctaccgaaaatgcatgtgggggtttacattcatctcaatcgaaactaaatgtggcactttcggaaagttgtaaagaaaaacctcgtgtattttaccctatagcgcaggcactggtacccatttatcaaacacagttatttaactaaaatttgcctaagaagtccgggcgctaagaaaagcgctcggttgagctctcacagaacttgaacggtaatgtcaattagaaaattaaatcagggaaaaatactgacgaaacaacgccatgagggaattgagttttggcaggcaagccgcctgccaaatcattaatagggtgttctttaaagtattatcactcgttatcaaaaacctaaactatccagtaaatcatcaacctgttcttggttggcgataacgccaaccccgtcctggttgacctgtgggccattaagaagactgtcattctcttttttcgttttggccatctgatcagaaggtatattttccattaataccataaccagttgtttttccagttcctgaatgacttccatcatccgtttgattacctgcccggtgagatcctgaaagtcttgcgccatcatgatttcaagtagttgggcattggtaaatgcagcatgttccggtacgagactgagataatttctcgtgtccgtgaccaaagaacgtgccccggccagttctaaatcagtcggatttgcaaaccactcatcccagcgctgagtcagggattttgcagaagcttctaattcattctggcggggctgagccacttcaacacaattcaacactctttctgctgcctgtgccgtcatttggacaacgtaattcaatcgttccctcgcatcagggatcgcctcagccgcctgagcaatggtttgatccaatcccagttcacgcagactatctcgcagcattcttgttaactgcccgatacgactgattatttcactggttgtaatcgcctcatctcttctaggcatgactggattttcactcattttgtctccttagagccccaacttttcaaatattttgttgagcttttcttccaaaattgccgcagtaaatggtttcacaacataaccactggctccggcctgtgcggctgcaataatattttctttctttgcttccgccgttaccatcagaaccggtaaagcagccagttcactgtcactgcgaattgttttcagtaactctaagccatcaatgttaggcatgttccagtcagaaataacaaaatcaaattcagctgtccgaagttttgtcagggcttctgctccgtcctgtgcttcatctacattgttaaatcccagttctttcagcaaattacgcacaatacgacgcatggttgaaaagtcatcaactaccagaaatcttaaatccttacttgccataaaaactccttgaaattttgttcatccgacagcatcgtgctgtaaaagttaatactcaatattccctttatctttcagtctactatcctgtaatctgaaatccatcgggcctaaatatgactcaattcaatcagcccccgattaaatacgaactgattgcacagtgctgattttagccagcatcgttctgctgagtttttgcagatccatcacatcatcgacagcgcccagctggattgccgcccgcggcataccaaagaccacgcagctcgcttcactttgtgccagtgtataagctcccgcttttttcatttccagtaagcccgctgcaccatcacttcccataccagtcaggataacccccaccgcattacgccctgcatatttggcgacggatcggaacaggacatcgactgaaggacgatgacgattcactggtggagcactgctggtcatgatttggtagtttgcaccgctacggcacagctccatgtgacgatctcccggcgcgatataggcatgccccggcagaacccgttcaccatcttccgcttctttaacggtaatctggctcagtttattgagccgttcggcaaatgagcgggtaaaacctgatggcatatgctgcgtgatgagtagtgccgggctggtaacaggcaaaggttgtaacaggtttttaattgcttcagtccctccggtagaggcaccgaccgcgatcaatttttcactggataacagtggcttaaaactcagtggagcatcaactttatctacaggtttcatcgtactgacttttgcctgcgccgccgctctgattttctcagcaatcagctcgctataagccagcattccttcacggatccccaactgcggcttggtcacaaaatccaccgcgcccaattccagtgcttttaatgtgatttccgaaccttttcccgtcagggaggaaaccatcactacgggcatagggcgcaaccgcatgagtttttcaagaaaatcaattccgtccatccgcggcatttcgacatccagtgtcagtacctgcgggttatgctttttgattaaatcgcgggcaacaaagggatcaggcgcacaatccacaacttccatgtcaggatggctattgataatttcccgcatgatttggcgcatcagcgccgaatcatccacacaaagaactgttattttattcatgacccctccttgcctgacctacaccgtaaacggtctgtccctgcaagtagaactctcggctaatttgagtaacgttctcggaatgcccggcaaagagcagaccatctggttttaagaaattgacaaaatgtcgtaaaattctttcctgcgtttttttatcaaaataaatcatgacattacgacaaaaaatcgcatcaaatttaccttcaagtgcccactcagaatccagtaaattcagatgctgaaagctgaccatttcagtcagcaccgggcgaactctggcatatccttcataaaaaccaacacctttgaaaaagtattttttcttttgactgtcactcagatgctgtagttcatctaaccgataaatcccctgacgggctttttccagtacctgagtatcaatatcactggcaatgatttttatccggtttgaacgatgccctaacgcatcacataacgtcatggcgatggaatacggctcttctccggtggaagccgctgcactccagacacggtaagtccccccgttttttttgccggcatgtgccgcaagaatcggaaaatggtgggcttccctgaaaaacgcagtgagattagttgtcagggcattaacgaataattcccattccttgctatgactgttctgttccagaatcgacagatattgaccaaaatcattaaaccccagaacacgcaatcgcctgacaaggcggttgtaaaccatttctcgtttattttttgccagtacaatcccggcccgctggtaaataaattggcagatacgctcaaaatgcgcatccgacaatgtatgccgctgaaacataaagttcagcggtacagtggcttcagtatttgaagccgttaagttggatttcatctgacctcagcgtacttaatttacagcatactcatcggtcatttttgatgcagtatatccctgatggttgtgctcatattctgacatttttggcagttcaaattgagcaacggttctcaccaatgtatctgctttatcttcaagcgcagatgcggcggcagcggattgctccactaatgcggcattttgctgagtgacctgatccatctggctcacagcctgagctacctgatgaataccacgactttgctcatcggaagccgccgcaatttcagtcatcagatcagtaacctgattgaccgacctgaccagctcatccatagtttgtccggcatgattcaccagctctgaaccctgattaacacggtgaacagattcatcaatcagaattttgatctcttttgccgcttcagcactgcgttgtgctagatcacgtacttc

SEQ ID NO: 1351 - DNA, 5768 bp, Xenorhabdus sp.; identical to SEQ ID NO: 1350
  CDS (1565)..(1999)

SEQ ID NO: 1352 - DNA, 5768 bp, Xenorhabdus sp.
  CDS (2957)..(3574)
gaagtacgtgatctagcacaacgcagtgctgaagcggcaaaagagatcaaaattctgattgatgaatctgttcaccgtgttaatcagggttcagagctggtgaatcatgccggacaaactatggatgagctggtcaggtcggtcaatcaggttactgatctgatgactgaaattgcggcggcttccgatgagcaaagtcgtggtattcatcaggtagctcaggctgtgagccagatggatcaggtcactcagcaaaatgccgcattagtggagcaatccgctgccgccgcatctgcgcttgaagataaagcagatacattggtgagaaccgttgctcaatttgaactgccaaaaatgtcagaatatgagcacaaccatcagggatatactgcatcaaaaatgaccgatgagtatgctgtaaattaagtacgctgaggtcagatgaaatccaacttaacggcttcaaatactgaagccactgtaccgctgaactttatgtttcagcggcatacattgtcggatgcgcattttgagcgtatctgccaatttatttaccagcgggccgggattgtactggcaaaaaataaacgagaaatggtttacaaccgccttgtcaggcgattgcgtgttctggggtttaatgattttggtcaatatctgtcgattctggaacagaacagtcatagcaaggaatgggaattattcgttaatgccctgacaactaatctcactgcgtttttcagggaagcccaccattttccgattcttgcggcacatgccggcaaaaaaaacggggggacttaccgtgtctggagtgcagcggcttccaccggagaagagccgtattccatcgccatgacgttatgtgatgcgttagggcatcgttcaaaccggataaaaatcattgccagtgatattgatactcaggtactggaaaaagcccgtcaggggatttatcggttagatgaactacagcatctgagtgacagtcaaaagaaaaaatactttttcaaaggtgttggtttttatgaaggatatgccagagttcgcccggtgctgactgaaatggtcagctttcagcatctgaatttactggattctgagtgggcacttgaaggtaaatttgatgcgattttttgtcgtaatgtcatgatttattttgataaaaaaacgcaggaaagaattttacgacattttgtcaatttcttaaaaccagatggtctgctctttgccgggcattccgagaacgttactcaaattagccgagagttctacttgcagggacagaccgtttacggtgtaggtcaggcaaggaggggtcatgaataaaataacagttctttgtgtggatgattcggcgctgatgcgccaaatcatgcgggaaattatcaatagccatcctgacatggaagttgtggattgtgcgcctgatccctttgttgcccgcgatttaatcaaaaagcataacccgcaggtactgacactggatgtcgaaatgccgcggatggacggaattgattttcttgaaaaactcatgcggttgcgccctatgcccgtagtgatggtttcctccctgacgggaaaaggttcggaaatcacattaaaagcactggaattgggcgcggtggattttgtgaccaagccgcagttggggatccgtgaaggaatgctggcttatagcgagctgattgctgagaaaatcagagcggcggcgcaggcaaaagtcagtacgatgaaacctgtagataaagttgatgctccactgagttttaagccactgttatccagtgaaaaattgatcgcggtcggtgcctctaccggagggactgaagcaattaaaaacctgttacaacctttgcctgttaccagcccggcactactcatcacgcagcatatgccatcaggttttacccgctcatttgccgaacggctcaataaactgagccagattaccgttaaagaagcggaagatggtgaacgggttctgccggggcatgcctatatcgcgccgggagatcgtcacatggagctgtgccgtagcggtgcaaactaccaaatcatgaccagcagtgctccaccagtgaatcgtcatcgtccttcagtcgatgtcctgttccgatccgtcgccaaatatgcagggcgtaatgcggtgggggttatcctgactggtatgggaagtgatggtgcagcgggcttactggaaatgaaaaaagcgggagcttatacactggcacaaagtgaagcgagctgcgtggtctttggtatgccgcgggcggcaatccagctgggcgctgtcgatgatgtgatggatctgcaaaaactcagcagaacgatgctggctaaaatcagcactgtgcaatcagttcgtatttaatcgggggctgattgaattgagtcatatttaggcccgatggatttcagattacaggatagtagactgaaagataaagggaatattgagtattaacttttacagcacgatgctgtcggatgaacaaaatttcaaggagtttttatggcaagtaaggatttaagatttctggtagttgatgacttttcaaccatgcgtcgtattgtgcgtaatttgctgaaagaactgggatttaacaatgtagatgaagcacaggacggagcagaagccctgacaaaacttcggacagctgaatttgattttgttatttctgactggaacatgcctaacattgatggcttagagttactgaaaacaattcgcagtgacagtgaactggctgctttaccggttctgatggtaacggcggaagcaaagaaagaaaatattattgcagccgcacaggccggagccagtggttatgttgtgaaaccatttactgcggcaattttggaagaaaagctcaacaaaatatttgaaaagttggggctctaaggagacaaaatgagtgaaaatccagtcatgcctagaagagatgaggcgattacaaccagtgaaataatcagtcgtatcgggcagttaacaagaatgctgcgagatagtctgcgtgaactgggattggatcaaaccattgctcaggcggctgaggcgatccctgatgcgagggaacgattgaattacgttgtccaaatgacggcacaggcagcagaaagagtgttgaattgtgttgaagtggctcagccccgccagaatgaattagaagcttctgcaaaatccctgactcagcgctgggatgagtggtttgcaaatccgactgatttagaactggccggggcacgttctttggtcacggacacgagaaattatctcagtctcgtaccggaacatgctgcatttaccaatgcccaactacttgaaatcatgatggcgcaagactttcaggatctcaccgggcaggtaatcaaacggatgatggaagtcattcaggaactggaaaaacaactggttatggtattaatggaaaatataccttctgatcagatggccaaaacgaaaaaagagaatgacagtcttcttaatggcccacaggtcaaccaggacggggttggcgttatcgccaaccaagaacaggttgatgatttactggatagtttaggtttttgataacgagtgataatactttaaagaacaccctattaatgatttggcaggcggcttgcctgccaaaactcaattccctcatggcgttgtttcgtcagtatttttccctgatttaattttctaattgacattaccgttcaagttctgtgagagctcaaccgagcgcttttcttagcgcccggacttcttaggcaaattttagttaaataactgtgtttgataaatgggtaccagtgcctgcgctatagggtaaaatacacgaggtttttctttacaactttccgaaagtgccacatttagtttcgattgagatgaatgtaaacccccacatgcattttcggtagctatagcgtttagctctaattctgatggtccaatatcatcatagtttaatcttctatgtaattggtcatgtaatcgttcaaaatatccatcgtcagcccccattaatggtgttctggcgtctggtgctcctcggggaacgagtgcagtaattgactctccataaacatgtccagcttctagatctataggatcctgatgagaccatcccaaatccctcatatgttcatttggatggtgcagacctaaagcatgaccaatttcatgagacataacataataaactagcatgtttgcaatttgttgatctccaatccctgaaggcaatgcatccctgaatatatcgaattcttcatttgaaaaatgcatctggtttgatacaacaatgcccgaaatattaaaaagtgggtatacgtaatgattcataatttgatccggtaagattaacgttgtcagagcatgtatattatgttgccgtaaaaaaccttgctggttatattctgggtctgtctctgctctggagaaccaaaaattaacttcagccggtgggccttgagggacttcagtaagggtgatagggatacccctttgggttaagcgccgccgccacatatcgaatgcatggcgtatttctgtggcagtatcaacaagataatgtcttccgccattaaaaactgcaacctgtcctatattactttctattaaatatcttagatgattattgtaatatcgggttggactatagacttgatcatcaatggcataagagcaagcatgcctgttcgggtttgtacgagcagcgggatcataatcctgagtagccaaaacattagatgctgataataatagaattaataaaatatacttcatcttagactctcttaatttttaaattaaacagtatttatattttaataagtggattgaattgaagatgaaatgatataaacacgaaatttcaaaaataggatttattatttaaaataaagtcttatatattaaatgtcattaaaatagtaagtgaaatgtcgttataaacgaagtgaataagttgatatttctttaaatgacctattgcaagtttgtacattgggttattgatttaaaataattgcctattaatttaaatcattaaaccagcgacttgaagaaagctgatatctgttatctattatagtacagggggggttatttgtgttattttttagaggagtttaaatgtttattcattacaagaagaattatgatgaattatcattgttccagttctttgatttttaattaaaattagagagtgtttatacctaatattacagcgagcctgaccgttacccggctttcaagagtgctaccgccggtcagtaatacactgttacggatcaatttcagtgtattgcgcaaagcacgacaggccggattatgataaatagtgatatctgctattacacattatctttctgtttagcggaaaatccggcccataattaaaggtttattaaaacgacaggcgtagtgccagtgcagacaacgtcacaaaaagaaccggaacggtcatcacgatcccaacgcggaaataataaccccatgagataatgatatttttctgcgcgagaacatgcagccaaagtaacgttgccaggctcccgataggagtgattttaggtcccagatcactgccaataatattggcgtaaatcatagcctctttgataacccccgtagccgtactggattcaacagacagtgcaccaaccagaacggtaggcaggttattcatcactgatgacagaattgctgttaggaaaccggtgctcagcgtcgctccccaaagactttagagcacatggctcgagca

SEQ ID NO: 1353 - DNA, 5768 bp, Xenorhabdus sp.; identical to SEQ ID NO: 1352
  CDS (2516)..(2905)

SEQ ID NO: 1354 - DNA, 5768 bp, Xenorhabdus sp.; identical to SEQ ID NO: 1352
  CDS (1346)..(2374)

SEQ ID NO: 1355 - DNA, 5768 bp, Xenorhabdus sp.; identical to SEQ ID NO: 1352
  CDS (442)..(1329)

SEQ ID NO: 1356 - DNA, 5768 bp, Xenorhabdus sp.; identical to SEQ ID NO: 1352
  CDS (1)..(426)

SEQ ID NO: 1357 - DNA, 7901 bp, Xenorhabdus sp.; identical to SEQ ID NO: 62
  CDS (7099)..(7410)

SEQ ID NO: 1358 - DNA, 7901 bp, Xenorhabdus sp.
  CDS (6528)..(7862)
cctaacctgcgataaacacaacagccataacaacaatggcaatcactaactttttaatatcaatatcagttttaaaactttccatgtattcctcaccaatttaaaactaaaaattatgaacattactcgctagctcaatctcgaaacctacagtgaaatactattaaaaactcagttctattcaccggaaggatttggacaaaatttagaaatcactgataaaaagatcaggcgtcaggcacagaaaatcatactaaacacgacatacttatgcctgttggatgttatctgctggcgccaatccttcatttattgccactcaaatggggcatgtatcagctcaaatggttcataacgtttacggtgcatggatgagtgaaaatagcgatgatcacattaagctattaaacgaaaaactcacgattgccccatatataccccaaacaatcaactagcatgaatcgctaactataagtcaaatagataaaccactaaacctgcatattcatcacttcgtggtacgcactgaccagcttgtttctgacctgaatacccatttgcagtgaaatagtggctttctgcatattgaccatcacgtcattcagttccacgcccggtgtgcccagtgtgaaatcctgtgcctgtttagttgcttctacgcgggacagatttattttttctaccgcggcggtgagctggctggcaaagcctccttttaccggcataggcttggcaatacttgctgcctgtaatgcctgcgcctgcatctgttgcagtacaccttcaattgcctgaattgacataaaaacctcgtgttaaatcaccctattgattacgtgattaaatgccatattagccgtgggctggttggcagttttttcaggctgccaccgtaacatagccctttcaaactaaagcgggtaattaacgtaaaaattcgaagcttattgtgccattaaaagatgtgtgaacagcgaataatgacgggattaattatatctattgtatttaagttgcatcacggcggcaaattaagcaattcccggtgacacagataacgatgtcactgaggcggatgcagtcagcaaagaggcaatttgtaataaaatgaaaggtatagagatagttttttcgcttgcgtatggggagtctgttttgttacgccacgcttttagtattcatgttgaccagcaaggcaaggatcgtctatgagtgcagcaacaaccgacgctgagaatccacagaagggtttcagcgctatcatcaacaggataaaagctgatccaaaagttccattattagttgctggctctgctgccatcgctattatcgtcgccctttttctctggttgcgcagccctgattatcgggtgctttacagcaatctgagtgataaggatggcggcgagatcgttacacaattaactcaaatgaatgtcccttaccggtttgccgaaaacggcgccgccatcatgataccgactgataaggtacatgaaatcaggctgaaactggcacaacagggcttaccaaaaggtggcgctgcgggttttgagttgttggataaagaaaagttcggcatcagtcagttcagtgaacaggttaattaccagcgtgcgctggaaggtgagttggcacgcactatcgagtctctcggcccggtgcaaagtgcccgcgttcatctggcattgccaaagccttccctgtttgtccgtgagcaaaaatcaccttctgcttccgtaacagtaggattattgcagggtcgtgctctggatgaagggcaaatcaatgccattgtccatatggtttcaagcagtgtggccggattgccgccaagcaatgtcactattgtggatcaggccggacgcctgctgactcaatccgatgccaatggacgggatttgaataccacccagttgaagtacatacaggaagtcgaaaaccgcttccagcatcgcattgaaaccattctggcacctgttgtcggtcgtggtaatgttcatgctcaggtcaccgcgcaagtcgatttttcccgccgtgaagaaactgcggaagaatataagcctaaccagccaccgaatcaggcagcagtccgttctaaacagaccagtgccagcgaacaaagtggcgggccgttggtaggtggtgttccgggagcgctgtcgaatcagccaagtgccgcaccgagtgcgccaattgagaaaccgaaaggtaatggtgacgacaaatctgctcaggggcgcaatggcaataacagctatgagcgcatgatcagtaataaccgcaataatcgtcatgatgaaaccatcaactatgaagtggatcgcactatccgccataccctgttacaggctggcggcgtggagcgtctctctgttgcggttgtggtcaactatgccactgttcagggtgagaatggcccggaaactcaggcactgacaccagagcagttatcccagattgagtcactgacccgtgaggcaatgggcttttctgccgaccgtggcgacagcctgaacgttgtcaacacaccgttcaataataccgccgaagtgatagaaacactgccgttctggcaacaccctgtcctgctggagaaattactggagctgggccgttggttactgttagcactggttgcatggctgctgtggcgtaagatgatcgtgccgcaaattgccagaaaacgggctgcggaaaaagctgcactggaagcgcagaagaaacagaataagcctgcgactgaatccaatgctgaaatggatgaaaaagtgcgccgtcagttggctcgccagcgtgtcaatgctgagcttcaaagccagcgtatccgtgaacttgcggaaaaagatcctcgcgtagttgcgctggtgatccgccaatggatgagtaacgaacaatgagtctgaccggaacagaaaaaagcgccatcatgttaatgactctgggagaagatcaggcggctgaggtgtttaagcacctgaactcccgggaagtacaacagttaagtattgcaatggcggggatgaaacaagtctccaaccagcaactggctgaagttatggcccagtttgaggaagatgctgagcagtacgctgctctgagcatcaatgccaacgactatctgcgcagtgtgctggtaaaagcactgggcgaagagcgggcttccagcctgctcgaggatatccttgaatcacgcgataccacaaccggtatcgaaacactcaacttcatggagccgcaggcagcggctgacatgatccgcgatgaacatccgcagatcattgccacgattctggttcacctgaaccgtggtcaggcggcagatattctcgccatgtttgatgatcgtctgcgtaatgacgtcatgctgcgtattgccacctttggtggtgttcagccagccgctctggccgagctgaccgaagttctgaacaacctgctggatggtcagaatctgaaacgcagcaaaatgggtggtattcgtactgcggctgaaattatcaacctgatgaagagccagcaggaagagagcgttatcgatgctgtccgtacctatgacggcgaactggcacagaaaatcatcgatgaaatgttcctgttcgaaaacctcattggcgtggacgaccgcagtatccagcgtctgttgcaggaagttactaccgattcgctgttggttgcactgaaaggctgcgatcaggcactgcgcgatcacttcctcaacaatatgtcgcagcgtgctgctgaaattatgcgtgatgacctggcaacccgtggtccggttcgtatgtctcaggtagaagctgaacagaaagccattctgcttgtggttcgtcgtctggccgaaaacggggaaatgatcctgaatggtggtgatgatacctatgtctgataattcgaataatggaaactggcagcgatggctgccaagtgaattgactccgtgggaaacattacaagcgaaactggaatcatcggatgagatacaggagcttaccgaacaggagcgtttacaggagcaggcccgaatactcgacgaactgaaagaacaggcgcgtcaggcgggtcacgaacaaggtgttgctgaaggtcatgcccgtggatatgagcagggtgtcgaagaaggccggaaagccggatttgaacagggactcaaagaagccgaggaacaacaacaggttgttattgaacagtggaaagatctactgaatgattttagtcattcactggatggtctggatacggttgttgcatcacgcctgatgcagctttccctgacggcagcgcaccatattctcggccagccggcggtgtgtgacggcactgccctgctgaaccaaatccgtgaatttattcagcaggaacccatgttcagtggcaagcctcaattgcgtgttcatccgcaaaatatcccactggttgaacaacaactgggcgagatactggctctgcatggctggcgtctggttgcagataataaactgcatccgggaggctgtaaggtcagcgctgatgaaggtgatctggatgccagtctggcaacgcgctggcatgaaatgtgccgtctggcggtatcaggagaactgtgatgactgcaagacttgggcgctggctggctacattagatggtatggaaaaacgtctggaaaaaacgccgaaagtacgtcgttacggacgtctgacccgcgccacgggtctggtacttgaagctacaggtttacatctgccactgggagcaacctgccttattgaacggcaaaatggcaacacccttgaagaagtcgaaagtgaagtcgtcggcttcaatggtgaaaaattgctgttaatgcctttggaggaacttgaaggtattgtgccgggtgcccgtgtctatgcacgtgcttatggtgaagaagcgggtagcggacggcgtttacctctggggccggaattacttggcagggtgctggatggtgcaggtcgccctctcgatggtttacctgccccggataccggatatcgcgcccccttgaccacaccccccatcaaccccctgcaacgtactcccatcagtgatgtactggatgtgggtgtacgtgccattaatgctctgctaactgtcgggcgcggacagcgaatggggttatttgccggttctggtgtcggtaaaagtgtgctccttggcatgatggcccgttatacgcaggcagacgttattgtggtcggcctgattggtgaacgtggccgggaagttaaagatttcatcgaaaatattttaggtgaagaaggacgcgcgcgttccgtggttgttgcggcacctgctgacgtttcgccactactgcgaatgcagggagcttcctatgcaacccgtatagcagaagattttcgtgatcgcgggaagcatgtgttgctgattatggattctcttacccgttacagcatggcgcagcgtgagattgcgctggcaattggtgagccaccggcaaccaagggttatcccccttctgtgttcgctaaattaccggcgttggtagaacgggcgggtaatggtgtcagtgatggcggttcaatcactgcattttataccgtcctgactgaaggtgatgaccagcaggacccgattgctgattcagcacgggctattctggacggtcatattgtcctgtcccgtgccttggctgaatccgggcattatccggctatcgatattgaagcatcaatcagccgggccatgacatccctgattgataatacccattatcgacgggtgcaacattttaaacagctgctttccagctaccagcgcaaccgggatctgattaatgtcggtgcttacgctgccggtagtgatcctttgctggacagggcaattgagttgtatccgcatatggctcagttcctgcatcaaaacattgaggaacgcagtgaatacgatgcagcatgtgcccagctgcaacagttattaccaagttaagaccgcaacttaactatacccgatgaatttcgggttgcatcttggcggcaagggaatgacaaattcatcagaaacgaatttgcccagccaaaggcagcctgaaagacgaagggtataaaacgctgaggatagacatgcaacaacactcccctcttgtgactttgcgcgaacttgctcaggacgcagcggaaaaagccgcgacccaactggcacagatacgacaaagccatcagcaaatggagcaacaactcacggcgttaatgagttatcaggatgaatatcgtacacgtttgaacgacacactaagcagcggcatgtccagctcgacctggcagaattaccagcagtttatgaaaaccctggaaatggccatcgagcaacaccgattacagctcaaccaatggaaaaaacggcttgagcaggctatgtcgcaatggcaggaaaaacagcagcgtctgaacgcgtttgatacgctgcaacaacgggcagaacatagtttgaagttacaccagaatcgcatggagcaaaaacaaatggatgagtacgcacaacgtggtgcacaacggagaatgaaacaatgaatctcactcttttgcctactgatttaacacttgaaaaaagtgtgggaaaaaatcagcaagcactgaactcctctccgggcagtaacgcccctaaagagcaggtgactgaattcggccagattctcagtgcagaacaaaaaaactctgttcagaccgctaaaaatcgcacagatggcagtaatagcgaatctggagagaaatattccactgataaccgggatgaagaaaagttatcttcttcgctgactgttactgggcaggtcgccagactggataaatcttctgtttcaggctttttagcatccggcaatgatacagaattcaccttatccgaagaggatgatcttctgtctgctgaaatgttaatcaacgcgatgcctattcagctggcgggattaatcaaccatcgtccggccggtgagggttcagaaagctcagatgatttactgcgcactgaaaacagtcttgaagatacattatccgacagaaaactatctggtaaaaagactaaagccgatatagcgctgatagcaacaaatccggctgaagaaaatgatttggatagcgatatccgttcttttactacacagcagacagcctcagccacaaatcgtgcggctctggtaccagctaccggaaaagtaaaagccaccgctaacggcactgagcaaaatgcagagtcatcagttagcggaaaaggggatatcggaaaggcgtttctatcaacacaaggagcaacagcactggcttcagcttctgtagaaacttcttcttccaatacactacacaatctgttcagtgctcccctgctcgctacaggccatcaagctaacgggcagatccagctgaataatgctcccgcacctttgctgagcgctcacctcggcagtgaagagtggcagcagcaactcaatcagcaggtactgttttttaaccggaacgggctgcaacaggcagaattacgcttacatccacaagagctgggtgccctgcatatccgcatgaatgttgaagataatcaggcacagctgcattttgtttctgcacatcaacatgttcgtgctgctttggaagccgctctgcctaaccttcgcctctcactggcggaaaacggcattcagttggctgaaagcagtgtgggtagtgatacatcaggaaactggcaacaggaacaggccgccgatcctcaacagcatgacaataccggtagccatactggaaaccatagagcactggcagcaacacaggcaccggcaactcatgaatccgcaatccggctaacccctcagcaactggcttcaagccggggaggagtagacattatcgcctgattatctgccatgactttagagcagagcacaatgaaggaa

SEQ ID NO: 1359 - DNA, 7901 bp, Xenorhabdus sp.; identical to SEQ ID NO: 1358
  CDS (6085)..(6531)

SEQ ID NO: 1360 - DNA, 7901 bp, Xenorhabdus sp.; identical to SEQ ID NO: 1358
  CDS (4583)..(5950)

SEQ ID NO: 1361 - DNA, 7901 bp, Xenorhabdus sp.; identical to SEQ ID NO: 1358
  CDS (4308)..(4586)

SEQ ID NO: 1362 - DNA, 7901 bp, Xenorhabdus sp.; identical to SEQ ID NO: 1358
  CDS (2897)..(3889)

SEQ ID NO: 1363 - DNA, 7901 bp, Xenorhabdus sp.; identical to SEQ ID NO: 1358
  CDS (1209)..(2900)

SEQ ID NO: 1364 - DNA, 5516 bp, Xenorhabdus sp.
  CDS (628)..(921)
tttgacaataaaactgcccccaggggccagcacatcacgacacatatccaatgctaattcaatcagatacatggatcgaggaatatcgaccgcgggagtcccactcatattgggagccatatccgacatgacgacctggactttattatcaccaactctctcaagtaatgttttcaatacctgctcatcacgaaaatccccttgcagaaaatcaacaccgacaatgggatccattggcaaaagatcgcaggcaatgacccgaccacgtccaccaatctgactgactacgtattgagaccacccacctggagcagcgcctaaatcaacaacggtcatgcccggtttaaatattttgtcgctttgctgtatctcatcaagtttaaaccaagcgcgggagcgaagcccttttttctgcgccttaagaacatatttatcactaaaatgttcttgtaaccagcgacttgagcttgctgagcgttttttattggccattgttctttccaactgttactaacagagagtcttatttttttcactctcttatcaaaccacaccacacacttatggtgatagataagagatggcggtagaataggtcgttttcaatcccaactaagcaaaaaaacgatgactcttaacaagaaacaagtgcaatacctgaaaagtctcgctcattcattaaagcctgttgtcatgatcggtaacaacggactgactgaaggcgtattggccgaaatcgaacaaaccctttcgcatcacgagcttatcaaagtcaaagttgcaggcgaagaccgtgaaatcaaaactttgatcgcggaagctattgttcgtgaaactggtgcatataatgtgcaaattattggaaaaatgctagttctctatcgcccttctgaagagcgtaagattagtttaccgaaataatctcgatatctttatacaaaagtgccattttatcatgacaaaaaaagacctcatcgggccttttaattatcattatcggtattatgaccacttaccattttccttcccgcaccatcgtgtgggaaggaaagcttagcttttaagctggatatcaaacatactcgacgttcagaacttcatattccactttaccgccaggtgtttcaatcacagcgacatcatccacttctttgccaattaagccacgggcaataggtgaattaaccgaaagcagattttctttgatattcgcttcatcgtcacccacaatgcggtaagtctgttcttcatcagaatcaacattcagcaccgttaccgtcgcaccaaaaatcacgcggccattgttggtcatcttcgtgatatctatcacctgcgcattagaaagtttagcttcaatttcttgaatacggccttcacaaaacccctgttgctcacgggcagcatgatattcggcattttctttcaaatcaccgtgttcacgtgcctcagcgattgcagcaataatttgagggcgacgtacatttttcaaatgttctaattcttcgcgcaatttatccgcgccacgtaccgtcatcggaatttgtttcatttattaaacctctaaatcaatcctaagcccagacaacatcttcctgatttttgcaaaaaggtaacttattttgcaataacagtagattgcaatatattgcaacacaatgagcacaccctatcaggcgggcttccagacaataaaaggggcgtaaactacagaaatagtctgatagttcacatacacattctacctgctaatctatcattttaacgtagagttggtgatggatcatcgtttactttttcctgaattgcgtcttagtattattaatacaaattttattgaaatacacccacatttatatgcgagatctatggctcttttaaaagttaccagcaaaatagcttgtatgctcagtttgagcctgagcgtttttaatgcaaacgcttcttcaattgagaagaatattgaatatttgccagcaggggccaatgtctcatttatcgcccaaaaaatcggtgaaaaagcaccaattattgattatcgtggtcagcaactggcattacccgccagtactcagaaaatagtgacagcattagctgccttattacagcttggcaaagattttcgttttgtcacaacgctggaaagcaatgcaaatattgaagatggcaaattaaagggtaaccttattgcccgctttgtcggcgatccgtcactgacgcgcacgcaactacgcaatatggttgagaagctgaaacagtcgggtatacaccagattaatggcgatctcatcatcgacatttctattttctccagccacgataaagcgccaggatgggtatggaatgatatgacccaatgttttagcgcgcctcccggcgctgccattgtcgataaaaactgcttttctgtcctactctatagcgcagaacaggctaatggaccagctattgttcacacaccttcttattatcctgtcaacgccttcagcgaagttaaaacgctcgctaaaggttcatcggaagcaaaatactgtgaacttgatgtaaccacaggcgaattaaaccgatataccctgactggctgcctgactcagcgcgatgaacccttgccactggcatttgctgtccagaatggggcaagttatgctggaactattctgaaaaatgaattacgtctcgcgggaattgaacttaaaggccacctacggcgccaatcatttcctcagcaacctgaaaaaacgctggcagtgaatcagtcggcacctttacctgatttgctcaaagtgatgctaaaaaaatcagataatatgatagcagatacggtttatcgcactctgggccattattattttaatgttcccggtacatggcgttccggttctgatgctgtccgccaaattctaaaacaaaaagccggtattgatatcggtaatgcagtcatcgttgatggttctggtctttcacgtcacgatctcatcaccccttcaacaatgatggaaatcctgcaattcatcgcgcaacacaacaatgagctggatatcatctctatgttacctaaagcaggttttgacggcacgttagcctatcgtccgggacttcatactgcgggtgtggatggtaaggtatttgcaaaaacaggttcactgcaaggggtgtataatcttgcgggctttatgacagcggccagtgggcaacagattgctttcgtccaatttatttcatcttactctgttactccagaaaatctacggaatcgtcgagcacctctggtccgtttcgagcatcatttatataaatctctctatcagaataattgatatacccgtcgtctttcaagttgcctctttattggctacgctcactcaccggaggccagctttggctgggcaaattcgttcccgacgaatttgtctctcccttgccgccgtgaagcaactcgaaatccataaggtataagtaattcataaaaagaaattccagaaaaaagggcgccttaacagcaccctttttcatcattaaagcatctgaaataagcaattagcgtttataaataaactcaatgccttcttcatcttcttcatcccagtcgtcatctagatcatctgcctcagatgcctgttgcaactgttccttatgatagtcatcccacatgaattcaactttttccggctgagcgccttcttcagcattcatgtggcgaggctgaactttaatgaattccatgatatcccagcagagttctttcacaccctgacgattcacggctgaaatcatgtagtaatcgccttcccaacccaattcatccgcaattgctttcgctttcagcttagcttcttctggatcagtcagatcaactttattgaataccagccaacgtggtttttcagccagtttctcactgtacttatgcagctcgttgataataatacgggcattttctactggatcagattcatcgatcgggcacagatcaattagatgcaacagaacacggcaacgctccagatgtttcaggaaacggatacctaagcctgcaccttctgatgcgccttcaatcagaccgggaatatcagcgactacgaagctctgctcattatccatacgtacaacgccaaggcttggtaccagcgtagtaaatggataatcagccactttaggtttggctgctgaaaccgctcgaatgaaggtggatttacccgcattcggcataccaagcataccgacatcagccagcagcatcagctccagcatcaggtcacgagtctctcccggtgttcccattgttctttggcgcggagcacggttaaccgaggatttaaagcgggtgttgcccagcccgtggaagccgcctttggcaaccatcagacgttgctcatgacgcaccatatcacccagaatctctcctgtagcgatatcgcggatacgggttcctaccggaactttaatggtaatgtcctgaccacgtttgccggtgcaatcacggctctgaccgttttgcccacgctcagcacggaaggatttttcaaaacggtagtcaatcagggtattaaggttttcatctgccagcaggtagacgtcaccgccgtcaccgccgtcaccgccgtccggcccaccttttggaatatatttttcacgacggaagctgacacagccattgccaccatctcccgctgcaaccagtattctggcttcatctacaaatttcatcacttttctccgtaggatagccactataaagctggatggcagatcgtacccagagatggcgtaatccaaaatataaaaagccccgcaacacacattgcagggcttccgattcgatcgaagttcaaaaaacttattcagctacgatgctgataaatttacggttttgtggacctttaacttcgaatttaacttttccgtcagctaatgcgaacagggtgtggtcacggccacaacctacgttgttgcctgcgtggaatttagtaccacgttgacgaacgatgatgctgcctgctaatacagactcaccaccaaaacgttttacacccagacgtttactttcggaatcgcgaccgttacgagtcgagccgccagcctttttgtgtgccatttatctgctctcctaatatcttaagcgatgccagtgatcttaacttcagtgaaccactgacggtggccctgctgcttacggctgtgtttacgacgacgaaacttaacaattttaattttctcgccacgaccgtgtgcaactacttcagctttaactttaacgccttcgattactggagcgccgatctggatatcttcgccattagcgaccatcagaacctggtcaaactcaacagtttcacctgttgcgatgtccagcttttccaagcgaattgtctgaccttcgcttactcggtgttgtttaccaccactttggaaaaccgcgtacatataaactccgctttccgcgcaccccctaaaattctttccagagcgcgctataaaatattcacaatagggcgcgaattctacgcaactttagagcg

SEQ ID NO: 1365 - DNA, 5516 bp, Xenorhabdus sp.; identical to SEQ ID NO: 1364
  CDS (1773)..(3314)

SEQ ID NO: 1366 - DNA, 5516 bp, Xenorhabdus sp.; identical to SEQ ID NO: 455
  CDS (5025)..(5516)

SEQ ID NO: 1367 - DNA, 5516 bp, Xenorhabdus sp.; identical to SEQ ID NO: 455
  CDS (813)..(1982)

SEQ ID NO: 1368 - DNA, 5516 bp, Xenorhabdus sp.; identical to SEQ ID NO: 455
  CDS (425)..(682)

SEQ ID NO: 1369 - DNA, 5516 bp, Xenorhabdus sp.; identical to SEQ ID NO: 455
  CDS (96)..(404)

SEQ ID NO: 1370 - DNA, 7659 bp, Xenorhabdus sp.
  CDS (7511)..(7645)
gcattagatccctaatgttttttaactgaagctgcagaggtaatattatcatctattttggatgatatctcaggtcaaaggaaagagttactaacaatacttttgttaggaaaaggtttgataaaagagaataaaaaagcaacagagctaatgaaattcacagaaggaaaaatcaataccgcagttattgatgttaaaattaaacttgcctctaatatggtaactaataacatcatcagaagtgctattgtttctgctgttgtgcatagtatagtacatttcgtagctactaaaaacccactctttattagaaagagagctggaattattaaacgtgctaatatttttgttgtttttgcatccaattatggaattatagagaaactgtctaaatcagcaagatggcttaaaataaaccaccctaaagtatatgagagattagataaagtcaggctgaccttaagctatcatttttttgaagatgtatttggtgatatacttaggctatcggaacataataaaaatagttcttctgatcaggattttgtaagagctattgagaaattattggataaatatgcaaattaaaaatgggggaaatatgaaaatattattagtgaattgtattattatttttatattatcttttaatgtagcttggtctaatactgtcacttctgattcatgtcagattgaatcatatttttttaatgcttgtttgaaattagcaaaacaaggggatcgggatgctcaatataaaataggcatgttctatgagaaaggagtaggtattcagcaagattatagcgaagctgtgaagtggtataatcaggctgcaaaaaaagggcatgcagaagcgcagtttaatctaggtagcctttacattgaagggcgaggcatatctctgaactatactactggggcttcatggtatctgaaagcagccaatcaaggtcattcagatgctcagaataatataggttttttgtacaaagaaggcttggggttaaaacaagataaacaaaaagctttagaatggtatctgaaggctgcaatgttggggaatcccggagctcaaaataatttgggtatggtttacgatgaaggggaaattgtaccacaagattataaaaaagcgctggaatggtataaaaaatcagctgagcaaggattcacaacggctcaaaataatataggtttcttatatcaaagaggtaaaggtgtatcattagactataacaaggcaatggaatggtatttaaaatctgcaaccgggggaaatgagataggaatgtttaacattggctatttataccaaaatggattaggtgtcgaaaaagatgagaaacaggctcttgagtggtataaaaaggcattagccgaagataaggattttactcaagctaagcttgcagtaacgaaattgacaaaaaaactgaatgagtaaaaatattatttggtgcatttattattcactttactgtgaagatccctatgtataactctcatagcgtttatgatatggtttttagaatcctgagatgtaagtataaattaccaccatgaagtttatctttataaattattgttcagggcttaaatcttaccaaattatctgtttaatcgacttttaaacagggcctatttagaccagtattttgtgtttcccagtttcatctcaactttctgctaatcgctgatagaattcgattagacaacgttgtattaggggaggataaaatcatcttattttaaactgaaaatttgatcgttttctattttggtcagttacatataggccatattccattttcctttggcgagaaagttgcctgttatagcaacaggccatctttattagaatccgacaattgtagataaatttaagtaaaataattgtgtaaaaaaaatgggtgttaatgattcatccataggataaagtataagagatttttctttacagagcagcgatagtaatatattttttttaggttgaggtggaggaatagcgccacacaaattctccatatcaatatagcagctaattccgtttaagccatcactgaaaagttttccacacagaaaacgatatttcagtaatggcttaaacggaattaaggttagttaaataactgtgtttgaaaaataggtatcagtgcctgcgctatagggtaaaatatacggggtttttctttacaaatttccgaggccgtaacatttcttttagacctagatgaaggtgaaccaccacatgcattttccgtagctatagcgtttagctctaattctgatgggcggagatcattatattctaattgcctgcctaattggttacgtaatcggagaaaataggtatcgttacttgtcattaatggtactctggcatttgcttgtccctgttcaagttctgctgtaatcgatatagcaaaaaagtgtccgggatttgatctatctaattgtatttgattttctttttcattcagccctcccaattcaagcaacccgggatgcgtcagacctaaagcatgtccaaactcatgagctatagtatggtaaaccaatatttttgcaacgtggtgttctgtataatgattatttaacgttcttctaatattgtcgaaagtttctcttggataattgaatgtattagttaggactattccaggtctattaaaaacctgatttgctatacgctcttggatttcaggaggtaaaactaaagttgtttcagctaaatccgaacccaaacttgtctgttgcgcatcattcgctctggtgatttgaaaatcagtatcactcgatgagccctgaggtatttctgtaagacgaatagggctattccttgctataagacgttgattccacatatctgccgcatctcttactaatggagcaacctcgatagtaatatttcttgttgttccatcatcattatgaatagagactgtaactgatcctatattttcagctattcgatatcttaaattattactaaaaaaatcagatggattatagatttgattgtttaaagctatagaacagacatgcctattagggtttgagtaggcagagggatcataaggataagcataaaatgctgatagagataaaattagtaaaatatatttcatattatattctcttgtttttctaatgtggtagatatgttattttcattaatgcattataacttggttatctactactttttatttggtctaatgtttttatttttatcttgtttattactgaggtttaattaatttggattttaaacccctgtcttaatttctattcataatattaaaagagatttttcataagaatgtttgatgaatgcattaatttttttaaagtgaaatggataacacagcgattttaataaattcaatgtctactgtttaatatagtacctgattggtatttttgttatttttttatagaaaaatctcagtgttttctttgtcacaacaacaatgataataagtgattatactctttcatttttccagttatttgatttttaatctgaactatacacaatggatttcaagatgcatcgcgacagcaagggaactcatccccgggagcatagataattatgtgaccgaggtgagtgagcgtagctaacaaagaagcaacttgaaagacgaagtgtatagaagttgtgtaatcatctggccatcatctataggatacaggttattctatatttataacgataaaaaatgggacaggtgaataaagttaacgtggggataatccgcaagaagggatgctaataagcaaaaaccgaccccttatcaccattgatacaccaagaggtctgtatatagcacattgattaaaaggttttaaaaatcaaacgctgattttgtgacctgataatgcagaattacggcgagcctgaccatcagcgccataaaaagaggggctgtgatgactcttcagaaaagcaattgcctgactattctgatcaatatgctgttccagcaaaaatccgttatgggcatttaaatcacggatacgttcaaccgtctggctgatttgatcccacaatacaaccagtatttcatgatcggcatagggggcacttacttttagtgtttcatttaattgctggcgctttcgctcagaatgatcaagtgctgagagtaaaaatgttttttgctctgtcacacgatgtaaatgattcgccccaataaagccttcactcaggatacgttgttcttctgccatcgttatcgaaagcgaatttaaatgtgcgctttgctgctcaagcaacagttgaagttcttccatttatggcctttatgattttgctggtttatctgttttaaacaaccactgaaagtatacctaatggatttcaagttgcattgtggcagcaagagagcgacaaattcatcgggagcgaatttgctcagccaaaagctgacctccgatgagagactgagcctctcgttaatcccccgggagcataggcaaccgtatatctataaaaatgctgaccggggtgagcgagtgcagccaacaaagaaacaacttgaaagacgagaggtattatcagttttcaagagcttctctgatcagggcatcagcaattttgccgctatccatggtcagagttcctttcgctatcgcttctttcagctgttgtactttctggatattaatgtcttgactacttggctgaaccagttttttctgtgcttcgctcagtttaacctgcgtatcggcgcttttttctgcaacagccacggtcctgcgagtgctatggacaccttcgttggaattgcgttgctgtaaagccgcaatagccagtagaggttgagtgcgttcaatactcataatcgtaatcctttattcaggcattatttatttgtcttaggtagcaggcgatataccgctggcatgcctgtaaatcatggtctgatggttatatcggctgaaagcaatgaaactttagacacttataacatcatttttacactgccattttcctgagcttctccggtaataacctgcccggaaaccaaacggatacggatattatcaaaactggcagcattgttaattgcttttccttcataacgtacccggaaattttgcccatctacaatgacggtgacattttgtccggctttaatcacccacggacgccggatcatattgcttgtgatgagttgtccggcggggatattgcggatggcaattccattttttacggcctttttgttatgaatgatgttattcggcagtttgtccaaatgacccgtcttgctctgaaaatctttttctgtcagtactgcgttgcgctgaatggcccggtttgagaccagatacggaccggtaacactgacgtaaatctgcataaaacgacgctgttgaccacagttaacaggcagtgaaatattgccccagtttttattgctcatagggggatgtatgtcaggtgattcacacgtcggccattgttgttccggtgttttgatttcaacggaaactttgtagttcgtaccgtggtgaatttgcctgaaataatcatttattgagcgaggtaaatcacttccccatgccagagagcagcctgaaaacaaattaaggaaaaaggtaacggatccgataaattttaatacagacattttatcaccttaattttccttacctgacagacctaatacccaaccctaatagggtagaccatgattgcaaaaaataatcagtacctgttgccgttcttcatttcattaactctatctgactaattaatagtgtaacgcgcttgattattagttaatgggataaatagcaaatcaatttgtgtctattcttcgaatcggctttttcttctgcgtttatgctgttatcgctcttaatgcgttacagggcttggttctacggaattagtcctacaagaaaggccataaatctggcttaaaaaaacaggcgagggaggaatatgctcgataaattagatgccgcctttcattttcgacaggaagctctggtactccgcaaccagcggcaggaaattctgtctgcaaacattgccaatgcggatacccccggctatcaggcacgtgatatcgattttgccgctcagttaaaaaaagtgatggatcacgggcgggtaactgggaatggaattgggctgactctgacttccaatcgacatattcccattcagccccagcaacgtctggagatggatctgttgtatcgggttcctcatcagacggctatggatggaaataccgttgacatggatatggaacgcagcaattttgcagataacagtctgaaatatcaggctgaacttacgatgacgaatgctcagatcaaaagcatgatgtcagttctacagtcacaaggataatgggaatgtctctactcagtatttttgatattgccggctccgcgctttctgctcagtcccagcgactgaatgtcagtgccagcaatatggcgaatgccgatagtatcgtcgggccggatggcgagccttatcgcgccaagcaggttgtattccgtgtcgctgctcccgcagggcaggaagttggtggtgtacgtgtcagcgaagtggtggatgatccaactcctttccgccttgaataccagccgggtaacccactggcggatgaaaaaggctatgtacgtatgccgaatgtggatgtcgtcggagaaatggtcaataccatctctgcttcccgcagctatcaggccaatattgaagtgctcaataccaccaagtccatcatgctgaaaaccctgactatgggtcagtaacaggaattccattatggcagttactgcttcaatcaatgattctctggataattcaacaattggtgaattagccagtagccccaaaaaaaagcaagacagcaatgatattaaagataactttctgaatctgctggttgcgcaacttaagaatcaggatccaaccaatcccatgcaaaacaatgaactgactacgcagcttgcgcagatcagcacagtggaagggattgagaaactgaataaatcgctgggcgctgttgtcagccagatggaaggcaatcaggccatgcagacgacccagttaatcggtcgtaaggtcatgatcccaggcgataagattttaaccggtcccagtgaagataaaggcattagtgtatcgacatttggtttcgaactggctcgtcctgctgaacacgtaaaagtgaccatcagaaataagagtggcgtagtagttcgggaaatagaatcaaaatcagtacaaaacggtatacataaagttaactgggatggcaaagacgcagatggcaaggaagtggaaaacagtgcttatagtttcacggtttccgcaagctatcgagatcaagcgttagtgacacttccgttggtatctgccgaagtaaacggcgttacgcggggtgaggatggcactaaattagatttagggctggcgggtacggtaaccatggataaagttcgtcagattctttaacaaaacggaggacatatggctttttcacaggcagtcagtggcttaaatgccgcagcaagtaacctggacgtaatcggtaacaatattgcgaactcagcaacattcggttttaaatcgagttcagcggcgtttgccgatgtattcagcggtctttagagcacatg

SEQ ID NO: 1371 - DNA, 7659 bp, Xenorhabdus sp.
  CDS (2015)..(2686)
catgtgctctaaagaccgctgaatacatcggcaaacgccgctgaactcgatttaaaaccgaatgttgctgagttcgcaatattgttaccgattacgtccaggttacttgctgcggcatttaagccactgactgcctgtgaaaaagccatatgtcctccgttttgttaaagaatctgacgaactttatccatggttaccgtacccgccagccctaaatctaatttagtgccatcctcaccccgcgtaacgccgtttacttcggcagataccaacggaagtgtcactaacgcttgatctcgatagcttgcggaaaccgtgaaactataagcactgttttccacttccttgccatctgcgtctttgccatcccagttaactttatgtataccgttttgtactgattttgattctatttcccgaactactacgccactcttatttctgatggtcacttttacgtgttcagcaggacgagccagttcgaaaccaaatgtcgatacactaatgcctttatcttcactgggaccggttaaaatcttatcgcctgggatcatgaccttacgaccgattaactgggtcgtctgcatggcctgattgccttccatctggctgacaacagcgcccagcgatttattcagtttctcaatcccttccactgtgctgatctgcgcaagctgcgtagtcagttcattgttttgcatgggattggttggatcctgattcttaagttgcgcaaccagcagattcagaaagttatctttaatatcattgctgtcttgcttttttttggggctactggctaattcaccaattgttgaattatccagagaatcattgattgaagcagtaactgccataatggaattcctgttactgacccatagtcagggttttcagcatgatggacttggtggtattgagcacttcaatattggcctgatagctgcgggaagcagagatggtattgaccatttctccgacgacatccacattcggcatacgtacatagcctttttcatccgccagtgggttacccggctggtattcaaggcggaaaggagttggatcatccaccacttcgctgacacgtacaccaccaacttcctgccctgcgggagcagcgacacggaatacaacctgcttggcgcgataaggctcgccatccggcccgacgatactatcggcattcgccatattgctggcactgacattcagtcgctgggactgagcagaaagcgcggagccggcaatatcaaaaatactgagtagagacattcccattatccttgtgactgtagaactgacatcatgcttttgatctgagcattcgtcatcgtaagttcagcctgatatttcagactgttatctgcaaaattgctgcgttccatatccatgtcaacggtatttccatccatagccgtctgatgaggaacccgatacaacagatccatctccagacgttgctggggctgaatgggaatatgtcgattggaagtcagagtcagcccaattccattcccagttacccgcccgtgatccatcactttttttaactgagcggcaaaatcgatatcacgtgcctgatagccgggggtatccgcattggcaatgtttgcagacagaatttcctgccgctggttgcggagtaccagagcttcctgtcgaaaatgaaaggcggcatctaatttatcgagcatattcctccctcgcctgtttttttaagccagatttatggcctttcttgtaggactaattccgtagaaccaagccctgtaacgcattaagagcgataacagcataaacgcagaagaaaaagccgattcgaagaatagacacaaattgatttgctatttatcccattaactaataatcaagcgcgttacactattaattagtcagatagagttaatgaaatgaagaacggcaacaggtactgattattttttgcaatcatggtctaccctattagggttgggtattaggtctgtcaggtaaggaaaattaaggtgataaaatgtctgtattaaaatttatcggatccgttacctttttccttaatttgttttcaggctgctctctggcatggggaagtgatttacctcgctcaataaatgattatttcaggcaaattcaccacggtacgaactacaaagtttccgttgaaatcaaaacaccggaacaacaatggccgacgtgtgaatcacctgacatacatccccctatgagcaataaaaactggggcaatatttcactgcctgttaactgtggtcaacagcgtcgttttatgcagatttacgtcagtgttaccggtccgtatctggtctcaaaccgggccattcagcgcaacgcagtactgacagaaaaagattttcagagcaagacgggtcatttggacaaactgccgaataacatcattcataacaaaaaggccgtaaaaaatggaattgccatccgcaatatccccgccggacaactcatcacaagcaatatgatccggcgtccgtgggtgattaaagccggacaaaatgtcaccgtcattgtagatgggcaaaatttccgggtacgttatgaaggaaaagcaattaacaatgctgccagttttgataatatccgtatccgtttggtttccgggcaggttattaccggagaagctcaggaaaatggcagtgtaaaaatgatgttataagtgtctaaagtttcattgctttcagccgatataaccatcagaccatgatttacaggcatgccagcggtatatcgcctgctacctaagacaaataaataatgcctgaataaaggattacgattatgagtattgaacgcactcaacctctactggctattgcggctttacagcaacgcaattccaacgaaggtgtccatagcactcgcaggaccgtggctgttgcagaaaaaagcgccgatacgcaggttaaactgagcgaagcacagaaaaaactggttcagccaagtagtcaagacattaatatccagaaagtacaacagctgaaagaagcgatagcgaaaggaactctgaccatggatagcggcaaaattgctgatgccctgatcagagaagctcttgaaaactgataatacctctcgtctttcaagttgtttctttgttggctgcactcgctcaccccggtcagcatttttatagatatacggttgcctatgctcccgggggattaacgagaggctcagtctctcatcggaggtcagcttttggctgagcaaattcgctcccgatgaatttgtcgctctcttgctgccacaatgcaacttgaaatccattaggtatactttcagtggttgtttaaaacagataaaccagcaaaatcataaaggccataaatggaagaacttcaactgttgcttgagcagcaaagcgcacatttaaattcgctttcgataacgatggcagaagaacaacgtatcctgagtgaaggctttattggggcgaatcatttacatcgtgtgacagagcaaaaaacatttttactctcagcacttgatcattctgagcgaaagcgccagcaattaaatgaaacactaaaagtaagtgccccctatgccgatcatgaaatactggttgtattgtgggatcaaatcagccagacggttgaacgtatccgtgatttaaatgcccataacggatttttgctggaacagcatattgatcagaatagtcaggcaattgcttttctgaagagtcatcacagcccctctttttatggcgctgatggtcaggctcgccgtaattctgcattatcaggtcacaaaatcagcgtttgatttttaaaaccttttaatcaatgtgctatatacagacctcttggtgtatcaatggtgataaggggtcggtttttgcttattagcatcccttcttgcggattatccccacgttaactttattcacctgtcccattttttatcgttataaatatagaataacctgtatcctatagatgatggccagatgattacacaacttctatacacttcgtctttcaagttgcttctttgttagctacgctcactcacctcggtcacataattatctatgctcccggggatgagttcccttgctgtcgcgatgcatcttgaaatccattgtgtatagttcagattaaaaatcaaataactggaaaaatgaaagagtataatcacttattatcattgttgttgtgacaaagaaaacactgagatttttctataaaaaaataacaaaaataccaatcaggtactatattaaacagtagacattgaatttattaaaatcgctgtgttatccatttcactttaaaaaaattaatgcattcatcaaacattcttatgaaaaatctcttttaatattatgaatagaaattaagacaggggtttaaaatccaaattaattaaacctcagtaataaacaagataaaaataaaaacattagaccaaataaaaagtagtagataaccaagttataatgcattaatgaaaataacatatctaccacattagaaaaacaagagaatataatatgaaatatattttactaattttatctctatcagcattttatgcttatccttatgatccctctgcctactcaaaccctaataggcatgtctgttctatagctttaaacaatcaaatctataatccatctgatttttttagtaataatttaagatatcgaatagctgaaaatataggatcagttacagtctctattcataatgatgatggaacaacaagaaatattactatcgaggttgctccattagtaagagatgcggcagatatgtggaatcaacgtcttatagcaaggaatagccctattcgtcttacagaaatacctcagggctcatcgagtgatactgattttcaaatcaccagagcgaatgatgcgcaacagacaagtttgggttcggatttagctgaaacaactttagttttacctcctgaaatccaagagcgtatagcaaatcaggtttttaatagacctggaatagtcctaactaatacattcaattatccaagagaaactttcgacaatattagaagaacgttaaataatcattatacagaacaccacgttgcaaaaatattggtttaccatactatagctcatgagtttggacatgctttaggtctgacgcatcccgggttgcttgaattgggagggctgaatgaaaaagaaaatcaaatacaattagatagatcaaatcccggacacttttttgctatatcgattacagcagaacttgaacagggacaagcaaatgccagagtaccattaatgacaagtaacgatacctattttctccgattacgtaaccaattaggcaggcaattagaatataatgatctccgcccatcagaattagagctaaacgctatagctacggaaaatgcatgtggtggttcaccttcatctaggtctaaaagaaatgttacggcctcggaaatttgtaaagaaaaaccccgtatattttaccctatagcgcaggcactgatacctatttttcaaacacagttatttaactaaccttaattccgtttaagccattactgaaatatcgttttctgtgtggaaaacttttcagtgatggcttaaacggaattagctgctatattgatatggagaatttgtgtggcgctattcctccacctcaacctaaaaaaaatatattactatcgctgctctgtaaagaaaaatctcttatactttatcctatggatgaatcattaacacccattttttttacacaattattttacttaaatttatctacaattgtcggattctaataaagatggcctgttgctataacaggcaactttctcgccaaaggaaaatggaatatggcctatatgtaactgaccaaaatagaaaacgatcaaattttcagtttaaaataagatgattttatcctcccctaatacaacgttgtctaatcgaattctatcagcgattagcagaaagttgagatgaaactgggaaacacaaaatactggtctaaataggccctgtttaaaagtcgattaaacagataatttggtaagatttaagccctgaacaataatttataaagataaacttcatggtggtaatttatacttacatctcaggattctaaaaaccatatcataaacgctatgagagttatacatagggatcttcacagtaaagtgaataataaatgcaccaaataatatttttactcattcagtttttttgtcaatttcgttactgcaagcttagcttgagtaaaatccttatcttcggctaatgcctttttataccactcaagagcctgtttctcatctttttcgacacctaatccattttggtataaatagccaatgttaaacattcctatctcatttcccccggttgcagattttaaataccattccattgccttgttatagtctaatgatacacctttacctctttgatataagaaacctatattattttgagccgttgtgaatccttgctcagctgattttttataccattccagcgcttttttataatcttgtggtacaatttccccttcatcgtaaaccatacccaaattattttgagctccgggattccccaacattgcagccttcagataccattctaaagctttttgtttatcttgttttaaccccaagccttctttgtacaaaaaacctatattattctgagcatctgaatgaccttgattggctgctttcagataccatgaagccccagtagtatagttcagagatatgcctcgcccttcaatgtaaaggctacctagattaaactgcgcttctgcatgccctttttttgcagcctgattataccacttcacagcttcgctataatcttgctgaatacctactcctttctcatagaacatgcctattttatattgagcatcccgatccccttgttttgctaatttcaaacaagcattaaaaaaatatgattcaatctgacatgaatcagaagtgacagtattagaccaagctacattaaaagataatataaaaataataatacaattcactaataatattttcatatttcccccatttttaatttgcatatttatccaataatttctcaatagctcttacaaaatcctgatcagaagaactatttttattatgttccgatagcctaagtatatcaccaaatacatcttcaaaaaaatgatagcttaaggtcagcctgactttatctaatctctcatatactttagggtggtttattttaagccatcttgctgatttagacagtttctctataattccataattggatgcaaaaacaacaaaaatattagcacgtttaataattccagctctctttctaataaagagtgggtttttagtagctacgaaatgtactatactatgcacaacagcagaaacaatagcacttctgatgatgttattagttaccatattagaggcaagtttaattttaacatcaataactgcggtattgatttttccttctgtgaatttcattagctctgttgcttttttattctcttttatcaaaccttttcctaacaaaagtattgttagtaactctttcctttgacctgagatatcatccaaaatagatgataatattacctctgcagcttcagttaaaaaacattagggatctaatgc

SEQ ID NO: 1372 - DNA, 7659 bp, Xenorhabdus sp.; identical to SEQ ID NO: 1371
  CDS (2809)..(3093)

SEQ ID NO: 1373 - DNA, 7659 bp, Xenorhabdus sp.; identical to SEQ ID NO: 1371
  CDS (3394)..(3798)

SEQ ID NO: 1374 - DNA, 7659 bp, Xenorhabdus sp.; identical to SEQ ID NO: 1370
  CDS (6803)..(7495)

SEQ ID NO: 1375 - DNA, 7659 bp, Xenorhabdus sp.; identical to SEQ ID NO: 1370
  CDS (6379)..(6789)

SEQ ID NO: 1376 - DNA, 7659 bp, Xenorhabdus sp.; identical to SEQ ID NO: 1370
  CDS (5963)..(6379)

SEQ ID NO: 1377 - DNA, 7659 bp, Xenorhabdus sp.; identical to SEQ ID NO: 1370
  CDS (728)..(1447)

SEQ ID NO: 1378 - DNA, 5722 bp, Xenorhabdus sp.; identical to SEQ ID NO: 383
  CDS (4138)..(4884)

SEQ ID NO: 1379 - DNA, 5722 bp, Xenorhabdus sp.
  CDS (4606)..(5559)
ggtgacaaggcacgtatccgcaatattctgaaaatcctgatgccctggcgcaaagggcctttttcgttatacggtgttgaaattgatactgaatggcgttctgactggaaatgggatcgtgttttaccacatttctcccctctcgaaggaaaaaccatacttgatgtcggttgtggcagtggttatcacatgtggcgtatggttggcgaaggtgcggagttagttgtcggtatcgatcctactcaacttttcctttgccagtttgaagccgtcagaaaactcttgggtaatgaccagcgtgctcacctgctcccactgggtattgaacagttacctgaattaaaagcatttgatactgtcttctccatgggggtgctttatcatcgccgttcacctcttgaccatttgtggcagttgaaaaatcagttagtctcaggcggggagctgattctggaaagtttagtcattgagggagatgaatatcaatgcctaatcccgggtgaacgttacgcgcaaatgcgcaatgtttactttattccttcagctgaaatgttgaaaacatggctggaaaaatgtggttttgtcgatgtcaggatcgttgatcaggcagtgacaacgacggatgagcaacgtcagacagagtggatgaaaactgaatctttggctgatttccttgacccgtcagatcagcgcaaaacaatcgaaggctatccggcaccattgcgcgccgttcttattgcccgcaagccttaaaacctgaaaatttaaatattgatgtgtgaattgctcgttatggcagttcacaccttcaatgttcagaggtgattttagccgggatttagttatcaatcaggatcatcactcctttcatggattctactaactcaggatcgacactataattcgtgtattcctccatctcacggtcctcggaattcattcttacaccagccttacggtagaccattttagaagatacaattttacctgctgagctgtgcacttcctttactccaatttctaaaaacttactaatattactggcccggacacccgctcccggcataatactcgggccacgactggcctgcgccaattcttttaataaatgtaagcctaactctgcactactttgctgaccagaagttaatatccgctttacacccagttcagtcagctgctccagcgtatatagcggatcacaacacatatcaaaagcgcgatggaacgtaacagccatatctccagccaaagacatcagttgcctcatgcgcaacatatcaactttcccttcttcgttcaaaataccgaaagaaacaccgggaaatcccatatcgcggataaaggaaacatcatttttcatcgcttcaaaatcgaatttactgtagcaaaaatccccgcctctgggccgaacaatcgggtgtacaggaatagataagcattgcaatgcttgttttaatattcccatactgggggtcagccccccttccaatggccctgcacacaattcgattcgatcagctcctgcctcttgtgcaataagcgcacaatttacgctataacagcaaatttccagttttagcattaacccctcccctgaattcaaatctgtcaatgcgtcatatacacttcgtctttcaagtcgcctctttgttggctgcgctcgctcaccccagtcacatagttatctatgctcccggggattctctcccttgccgccgtgacgcatcttgaaatccattgtgtatagatagattcgaaatattttattggcgaacttattaactatgacaactatttttcaaaatgacatattgcaaatcacaagaacagaattttttgctgataaatcgttatgaaaaagtcaatttttctgatatgtccgcatttttatcaagattaatagatagaaaaagaataatgcttgatcacagtggcattatcagctattagctgcacaattataacaatctgaacatccatcaagacaaatcaattagctaaatattttctaaatatcagagtattaatcacatttatatgactctttatcagcgcgatgattgcctgcacataggctcatattttgttcaaccactaattcttaatttaagcgagtatattatgataattactcatgaattctttgtattggatagtaattattaatatctctattattttggtgtaataacaaacacattatttaactgaattaaaatagacaaaatatattaattaagactggagtaactaaatgaagatatacacaatggatttcaagatgcgtcgcggcggcaagggggtgaatccccgggagcatagataaccgtatgtttataaaaacggtgactggggtgagcgagcgcagccaacaaagaggcaacttgagagacgaagtgtatatttatggtcaaggtcaatcagacttgattgatcttgtcactctatcgttgcttctttatttttaaattccacttcttttaatttaagaaaatgacataaactggatttaacatttccatttacttatggataaaaaagtataaaaatatagccgcttaatcatggagaaggttaatatgaagcaatacctattaataactacaagtctattattatctttatttttagtctttggtgtcgctccaacactattttcagctaaaagtgatttatctgtagttatagcaattatcattattttatttgtggtgcctgcaatcctttatttcaccatcaaaaaactaataaaatggagtaaaaataaatgagtattagaaaaggaattattaaaacaatattagtttcacttattgcagtaggattggctggctgtgagcgggcaaaagtacctgccggaaatgtagggatcaaagtcgatttatatggttcagataagggagtacaaaacgaaaagttaggtacaggaaaatattggctaagttggaacgaggaagtttatttgttccctctgtttaagcaattacaccaatatcaagatccatttttgtttcaaacctctgattctatgtctgtcagcgcatctgttggcatagaatatcgcgtaatagaagacaaagtcgttgaagtatttaagacttatcgagctggcgttaaagaaattacagatagcaatattcgccaattaattgctgactctttaatcaatcatggctcaaaaatggatattgataaattatcttccggtggaaaaactcaattactggagtcagtaacaactgacttgcgtaaacaattggagcctgtaggtattgagatccagaaagtcagctggcttggtaaaatggattatccaaatgaagtgattgatgcaatcaataagaaaaacagagcagtccaggaagcgcaaatgcgtaaaaatgaggttgagcgctctaaggcagaagccgataaaatgattgaagaagctcgcggccaagcggagtccatcaggttaaaagctctggctgaagctgatgccatcgcattgcgcggtgaagctctccgtaaaaatccagaagttttgcaactggaagccgtaaataaatgggatggcgtaatgcctcaatatttaggcagcggtgctcctatgccattccttcaggtagagaaaaagaaataatcaataaatcataaccacccgtataacgggtggtttgctcttgccctataagggcttgttaccgactgcgcctaaatgacgctgctttctcttcgttcaagctaagtgtctttgctgctttggcctaccccttgaaggggtctacatgctctttactactcaatttatccgagattaaatccgacttttcttgctctctgatatacttttgaattgtcgcttcatttagccctaccgtactgacatagaacccttccgcccaaaactttctgttgccaaatttatattttaaattggcgtgtctatcaaagatcatcaacgaacttttacccttcaaatatcccataaagcttgaaacgcttagctttggtggaatactcaccaacatatgaacatgatctggcatgagatgaccttcgattatttccacacctttatacttacaaaggtctctgaggatctctcccacacttgaacgaatattattaaaaatcactttccgtctatatttcggcgaaaagacgatatggtatttacacagccactttgtatgcgctgagctttgtgctttaatgcccataaacacctttccttatttgagttacgaatattagcttgaacatctatatcgtaacggaaaggtgtttttcttggtataacctttgaactccacccgcaaagcgggtggttttatgtttaagacgctaacgcgacttaaactggctaaagccataaataaattaataaacacacaaatttgccatctgcgatttcttatcatttatatatgaatcatacgcaattaaaatgctcaaaccctttgttgtttatatgttaattaaatcacaataataaaaacaattattaacaggtttcattttttatcatgtcgttttgtgatggtcagcggaggaatttttattgatggtgaattattcttggtgagtatatttactttaggaaccataaaaggaatgaatatgtctcccaagaaaattattctcgattgcgaccctggtcatgatgatgccattgctatgctacttgctcatggcaaccctgatatcgaactcttagctgtgacgactgttgtgggcaaccaaactttagataaagttacccataatgcgctttccattgcccgtatcgctaatatccgtaatattccttttgctgccggctgctatcggccgttggtcagagagatcaaaaccgctcctgacattcatggagaaacgggactggatggccctattttgcctgaaccggaaataaaactagacactcgtcatgccgttgatttaattattgatatcatcatggaacatccgcccaaaagcgtcacattagtcccaaccgcaggcttgacgaatattgctttggctgtgcgtaaggcaccacaaattgtggaaagagtaaaagaaatagtattaatgggaggtggttatcatgaaggaaacaggagtgctgttgccgaattcaatatattaatcgacccggaagcggcacatattgttttcaatgaaaaatggccgctgacaatggtcggattagatctcacccatcaggcactggcaacaccggaagttactgaagagatagccaaaataaatacacgccctgctcagtttgtgttggatttacttcaattttatggaaaaagttatcggatgacacagcggggtttcgactaccctcccgtccatgatccttgcgctgttgcttatgtgattgatcccagtgtcatgaccacacaaaaagttcccgttaatatcgaaatgtctggaaccttaacaacgggtatgactgttgctgattttcgcttcccgccttcagaggactgccacactcaggttgcggtaaaactggatcaggccaaattttggcggatgatcatcgatgccctaaaaaatattggtgagactgatcactgagtaagctacctgacaaacagactaaaatcacctttgagttagttgtataagctcaaaggtgataaaacttcactttcagaatgatataagaaacagaacaacgaattatttaaccggaagagatagaagcttcaaaatcgaacaattcattcactttagggca

SEQ ID NO: 1380 - DNA, 5722 bp, Xenorhabdus sp.; identical to SEQ ID NO: 1379
  CDS (2777)..(3625)

SEQ ID NO: 1381 - DNA, 5722 bp, Xenorhabdus sp.; identical to SEQ ID NO: 1379
  CDS (1)..(753)

SEQ ID NO: 1382 - DNA, 6863 bp, Xenorhabdus sp.
  CDS (5157)..(6863)
cttcgccggtatctgtctccccagtctcgatgagttctcattctgattccatcagcccttttacagcatgacgaatgatagggtgatcatggatcatcatgactgcatgagtaagcgtattccttctcccataatacaaattccgatctgatgtgttgataaaccatacagaacagaactctgttttatgttcaatagctgtgcgactcccctagagtataccgagtcatcaataatagagattccaaaaatatatcctgatataaaaattgaaatatcgcaaataagattatcaattcacgtgaaataaattccacagacataagaaaatgattttccttaattgctaataattttctcaatcaaatttctatgattattttatagattaatttttgtttttgtaaactcattttaaagttgtttcttaaatgtctcttttattaattcagtgagttattgatggatagaaaatggagctacctctacatgagtataattagagtatttctatataatattggttaatgtgaagccattaacagatcattttatactctctatatttcaggttgtttctttgttgattgctttgctggctgcactgaattctgaaaacagcaggggatatgatctgaagtttcagtgatcattgacaaaaatgcggttagcaccatgatttcaccttccgtaactattatactgagcggatttttacttagacgtgactcacaaaggatcagacgatggacgaaaaattaaaacaaagtgcccttgattttcatgaatttccgcagccggggaaaatcacggttactccgactaagccgttgacgacacaacgtgacttagctttggcatattcaccgggtgttgccgctccttgtcttgaaatagcagaagatccactggcggcatataaatatactgcccgtggtaatctggtggcagttatctccaatggtagtgctgtattgggactgggaaatatcggtgcactggctggtaaacccgtcatggaaggaaagggagttctattcaaaaaattctctggcattgatgtttttgacattgaaatagatgagtctaatccggataaattaattgacatcattgcggcattggagcctacttttggtggtatcaaccttgaagatatcaaagctcctgagtgcttctatattgaacagaaacttcgcgagcggatgaaaattcctgtattccatgacgaccagcatggcacagcaattatctgtactgccgcagtacttaacggactgcgtgtcgttaataaagatatcagcaaagtacggatggtagtatctggtgcgggtgcggcatctattgcctgtatgaacctgctggtggctttaggcctgaaacgtgaaaatattgtcgtttgtgactcgaaaggcgttatctatcgtggccgcgaagagaatatggaaaaaacaaaagccgattatgcaattgaagataatggcagccgcacactggccgatgttattcctgattctgatattttcctcggatgttccggccccggagtactgacgccagagatggtgaaaacaatggcgaaggatccgctgattatggcactggcgaacccagagccggaaatcctgccaccactggcaaaagctgtgcgccctgacgcaattatttgtacaggtcgttctgatttccctaatcaggtcaataacgtgctctgtttcccattcatcttccgtggtgcgctggatgtaggtgcaacgactattaatgaagagatgaaactggcttgtgtacacgcaattgctgatctggcgctggctgaacaaagtcaggaagtggcttctgcctatggcgatcaggatttgttcttcggcccggaatacattataccgaagccatttgatccacgtctgattgtgaaaattgcacctgctgtagcaaaagcagcgatggattcaggcgtggcaacccgtcctattaccgatttcggtgcctatatcgaaaaactgaatgagtttgtctacaaaactaacttattcatgaaacctattttctctcaggcgaaaaaagagaaaaaacgtattgtactggcagaaggtgaggatattagggtactgcacgcgactcaggaattagtttccctcgggttggcgtatcctgttctgattggtcgtccaacgttattgaaatgcgtatcaagaagcaggggcttcatattgaagcaggtaaagacttcgaagtcgttaataacgaaaacgatccacgtttcaaagaatactggcaggaatattaccaactgatgaagcgccgtggtgtttctcaggatcaggcacgccggacggttattggtaacccgactctaatcggtgccatcatggttcatcgtggagaagctgatggcctgatttgtggtacggtcggtagttatggtgagcattaccagattatcaaagacgtctttggtttccgtcagggtgtgcacacagcaggtgcaatgaatgccttgttgctgccgatgggtaatacttttattgctgatacttatgttaacgaagacccgacgccagaagagctggctgaaattacactgatggcagcagaaactgtgcgtcgcttcggtattgaaccaaaagctgctctgttgtcccgttcaagttttggctcttctgactgtgaatctgctcaaaagatgcgtaagacactggagctggtgcaacaaatggcaccatcactggaaattgatggtgaaatgcatggtgatgctgcgctggtggaaagtattcgccgtgacattatgccggatagcccgttgaaaggttcagctaacctgctgattatgcctaatatggaagccgctcgtatcagttataacttgctgcgtgtcaccagttcagatggcgtcactgttggtccggttctgatgggggtttctaagcctgtccatgtactgacaccaatcgcttctgttcgccgtattgttaacatggtggcactggctgcggtcgaagcgcagactaatccactgtaattgattggtattataattcattggtatcaatatcccggtttcattaattagccgggataaacagacaaatatcccgtcaggcgcttgtttggcggggtatttttatttgtaaataattatcattatctataatatgcagggaatttttaactggataatcaataccaatgaaaacatctatctgtataaaaacaacttttttagcgtgtgcctttttgcttggtggttgtgcgacaacatcaacaacgacacaaaataactctcaggcagtaaaacaaacgctttccggtgaattaacccaatcaggtgtgttgcttgatatgagaacaggcaaagccatcacttctgatgaattacttaatcaactggcaacctatcccaaaattatcatcggtgaaaaacacgataacccttaccaccatcaaattgaattatggctggttcaacagctggagaaaaaacggcctcatggttcggtattgcttgaaatgatcaatccggatcagcaagaaagagtcaataaagttaaaagctggttgcaggatgatccgatagtcagggatgagcgcattaaacagttgttggcatggcaggaaggctggccttgggaacaatatggaaaactggttgtggaactggtgaaagcaccttatcccttgttagccgctaacctgaaccgcagtgaaatcgatcgggcgtataaaagttataaagctggagacaaaacttccttagtctctgaggatgtcaaaaagcgtattgatgaaaccatcaaaaattcccatggtggaaatatagatgaattacatctttctgcaatgagcaaaattcagcaactgcgtgatcagagaatggcagaacaattgatgaaagcgccatcgcctgcaatgctgtttgccggaggatatcatgcggtaaaagcaatgggagcccctcagcatgtgaaaaaagtagcatctgatgaacaggttgttgtgctggttattgctgaaaaaggcgttgttttgaataaagaatacgctgattttgtctggtttacacccaaagtgactaccaaagtaactaagtaggtgtatctatcacaaggatgtgatgctcataataaataaaaatagttttcatttatatatccaattgattaacattcccttaatttatctttgacataatgtgctataagaaatgttgacgtatacaacgtatcaaaccactcacgttggtcacgtgacaaaatcctttctcgccgctatcacactgcacgtcctgttggtcggttggttggtttataaaccgaaggatcttgatattgaggaatttttacctccacctgcagttatgatggaagtatcactacagacagaagcaatacacaaggtcgaaaaacagccgattggtattgaacagcagttatctgttaccagcgaacaacaggaaagtaagattgatgctgtcaatatgccgaaactggatgtaaatgaagaagccatgctcctggttgataaaacgaagaaaaagaaaccaaaagaacaggatgcacctaaaaaagcccaaccggttaagcgcgtgcaggcaaaagagcaggaaagtgaaaaatcacaaagtaccgcagcaccgacaaccagtacggctacggcggataatatcacttcccgcactgcggcttcttatgaaagtaattcagatgccgtagctgatgctaaagctgtctggcaggcggaagtcagtggccatttaaaccgctataaaaaatacccctcagatgctcagaggagaaaacgtacagggcgcccaacggtgaaatttaccgtcaatcaatttggtaatgtgattgacagtgaattggtaagacgctctggaacgaactcacttgacagggaagcaaggcttgtactggaaagggcgcagccattacccattccgcctgattctattttaaccaatggcagtgttacggttgaattaccggttgatttcactttatatcaataacaattgattttaaaaataataaaaaaacaggacgaatggcatgtcacagtataaaacggtgttttcaccaaaagtcaaaaaagctgtgctcagttttttgttgggtagtagtttgctgagtaatagcgtcacggctatcgcgatggaggaaaaaatgataccacctatggctaaaaaagagccgcatgaaataactattcatggtgatacccgtgttgacgattattattggttacgtgatgaccagcgtcagaataaagaagttattgattatctggccgctgaaaacaactataccaaagagatgctgaaatctggtcaggagctacgggaaacgctgtataacgaaatggttggccggatgaataaggaagaccagtcggtaccttatacctacaatggttatatttatcgtaccatttatgaatcaggcaaagatttcccgatctatcagcgtaaaccggttgataattccactgactggcaggtcatggttgatggtaacgaacgagcaaaaggccataaattttaccaaatcggtggattcgctgttacccgagacaataaacgcattgctattactgaagatactcagggccgccgtaacttccaaatttcttttaaaaattttggtgacagtgagtggcaaaatgacgttatagagaatacttccggcaatatcttgtgggctaatgatggtaaaactctgttctatgtccgcagagatccacaaaccttgctgccttaccagctatttcgtcaccaatatggcacggatacccaacaggataaaaagatctatcaggaagacgatgatcgcttctatctatcaatttcgaaaagtacctcgcttgactacattctggtttcgatcaccagctattcaacctcagaatatcggttgatagatgcaaataatccgcaacaggaaccacaaatgttctctgcccgtcaggctgggcgtgaatattatatcgaccatttccgtgggcaattttatatccgttccaattatgaacacccattgtttggtctatatcagacagatgccattaataagccatggaaaacagtaattgcaccacaggataatactgatctggaagattttagcctgtttaacaagtggctggtggtacaggagagaactaaaggattgtcctcaattcgtcagattgactggaaaacccagcaagaaaaacaggttaaattcgatgacccggcttatatggcatccttgaactataaccctgagccagaaacagatttgctgcgttatagttattcatccctgacaacgccaagttcagtattccagtggaatatgcaaaccggcgaacgcgaattactaaaacagcaggaagtgaaagggttcaataaagaaaactatgaaagccagcgtatttggatcaaagcgcgggatggggtagaagtaccggtttctttggtttatagcaagtccctgttcaaaaaaggtcagaacccgattttgatttatggctatggtgcctatggtatcagcatggatccttattttagttctgcacttttaagcctgttggatcgtggttttgtctatgcattggtgcatgttcgtggtggtggagacttaggccgtaattggtatcttcagggcaagctcgaaaataaaatgaacagcttccatgattttattgatactacgaaagcattaattgctgaaggttatggcgatagtaaacgagtttatgccgaaggtggcagtgcgggcggtttactgatgggagcggtagtcaatcaggcgccggagctataccgtggtgtgatcgctaaagttccatttgttgatgcagtgacgacaatgctttag

SEQ ID NO: 1383 - DNA, 6863 bp, Xenorhabdus sp.; identical to SEQ ID NO: 1382
  CDS (4364)..(5014)

SEQ ID NO: 1384 - DNA, 6863 bp, Xenorhabdus sp.; identical to SEQ ID NO: 1382
  CDS (3325)..(4095)

SEQ ID NO: 1385 - DNA, 6863 bp, Xenorhabdus sp.; identical to SEQ ID NO: 1382
  CDS (2186)..(3025)

SEQ ID NO: 1386 - DNA, 6863 bp, Xenorhabdus sp.; identical to SEQ ID NO: 1382
  CDS (747)..(2297)

SEQ ID NO: 1387 - DNA, 6250 bp, Xenorhabdus sp.
  CDS (1043)..(1579)
tttaaaaaattgagtcaaatagctgcacagaggcactaaaacggaaggcgcgacactgataaaacgagtataactgagcaaggtgggaaaatcgtgatgatgatatcgccaaatatgctccagataaaaatttttaaaatcacgataatgcgacagatgaaagaggatcaggatggtcatgatttcactgggatacatgtgaccttttctacgacgtaggcgatatcccttattgagacaaaactgttcccattgtggaatgaaaaaacgacaaaagtcatcgacatcgatgaaaatttcaactaagttgttcatagcctgttcctccccggagctgtttcgacttgcaccaaaacacggctccttgaacaggcttctcgtcaatttcttatccagaattggggttaattattcctgtagtcttaggttacacaagttggagttattatgtctttcgaggaaaagttaaatcaggtgaaagctatcactaatcttcatttacctcagatagaaaatcggaatgactcccgttggtataagaaactggggtggatgataactatctggttagcaagtgtcttaagcctggggatcgttgccacactgtttaaattattaatgtacagtgccgggatgagaacacattagtaaggtaggccgcttattatgcggcctatttttgagtgagaacagaacgttcaagcaaatcagtttccactgctccgccgttatcattcccaatgtgttcgttggtatttcgatgcgttgagtctacgtaattgatgtgatacctcccttagtgttagaaagaagggaagggccatcatgacacaatgcgggctgcggctggagtactaagtctggcttcttcttttaccgcaatcgattccttctggtatactccgcaaatattttgttctcatgttttcttatgtgtccgtcttcgtgcgactaactgtatatcacttggtgtatcaatattggtgatttatcacataattaaagatgggtttattgttttaaaacaaataggtatgtgaaattgaaacatattgtagaagtgatgatttccgagcaagaggttaaacaacgtattgctgaattagggcaacagattacagaacattatcgcaatagcgatcgtgaactggtattggttggcctgctgagaggatcgtttattttcatggcagatttgtgccgtgaaattcaggtttctcatgaagtggattttatgactgcatccagctacggcaatggaatggattctacccgcgatgtgaagatccttaaggatctggatgaagatattcgtggtaaagatgtgttaatcgttgaagatattatcgattccgggaatacactgaataaaatccgtgagattctgtctcttcgtgaaccaaattctctggcaatttgtacgttactgaacaaaccatcccgccgcgaagttgatgttccggttgagtggatcggttactcgattgaagacaaattcgtggtgggttatggcattgattatgctcagcgctatcgccatctgccttatatcggccatgttactctgctggaagagtaaatttttgcaataatgcaaacaggtaccggtgtagtaaataaatggcagcctttttgctgccatttatttttacgcgaacttgttactttttacgggccagcttagagatagcctgacggtaattaagctccagtttttcacggctgtctgcggtaatatccaaatcatgcagttcgccatctttcaaaccatatacccagccatgtatcatgaccttttgtccacgtttccacgcggattgcatgatggttgaatgaccaaggttataaacctgttcaatcacattcagctcacacaggcgattcagtcgatcattaggtggcagttcaccaagcattgagctgtgtttgtaccacaaatcacgaatatggagcagccagttattgattaaacctaattcagttccgtttactgctgcttcaataccaccgcatccgtaatgaccacagatgattatatgttcaacctgtaaaacatcgacagcatactgcacaacagataaacaatttaaatcggtgtgtataactagatttgcaacattccggtgaacgaaaagatcacccggtgcagcatcaatcagtttttcagcaggcacacggctatcagaacagcctatccatagaaagtgtggcttttgtgcttttgataattccttgaagaaatgaggattttcttcatttacagactctgaccactgcttgttccgggcaaacagctcttcaatttttctcatcatgactaatagcctggcaacatttttgagatagaatcatatacaacattaattgagaatttaatatttaattgagtaatgtttttgagttgatccctatcattgaaaagaagtgcagggaaaagaatggcataatctgtccttgcactcaaaaaatagcagaaaaataaaggtgttgtttacttatggcttatgcattggaattgacgcagcttacgaagacctataacggtggagtaaaagcgctgcgtgggattgatctgcgagtggaaaccggcgatttttacgcgctgttgggaccaaatggtgccgggaaatcaacgactatcggcattattagttctctggtcaataaaagcagcggtaaggttaatgtattcggttacgatattgatacggatttagtcaatgctaaacggcaactggggttagttccgcaggaatttaattttaacccatttgaaactgtgattcagattgtgctgaatcaggcgggatactacggcgtaccacgcaatgtggcacaaagcagggcggaaacctacctgtcacaactcgatctctggggcaaacgtaatgaacgggcaaatcgtctgtcagggggaatgaaacgccgcctgatgatcgcccgcgctttgatgcatcagccaaagttattaattctggatgaaccgactgcgggtgttgatatcgaactgcgccgctctatgtgggactttctgaagtctcttaatgagcaaggaaccacgattattctgacaactcactatctggaagaagcagaaatgctttgccgtaatattggcattattcaacatggtgaactggtggaaaataccagcatgaaagatctactcagccaacttgaggtagaaacatttttactcgatgtagcgcctgaaggaaatatgcctacgcttgaaggctatagctaccgcttggttgacacagctacgctagaagtagatgtgaaacgagggcagggactaaatgatgttttctcccaattaagtacgcagggtattcagattcacagtatgcgcaacaaggcgaatcgtttggaagagctatttgttgggttgacaaataatagccaaggagctcgctcatgatccaactttattgggtggcattgaaaaccatctggattaaggaaattactcgctttggtcgaatttgggtgcaaacactattgcctcctgtgattaccatgtctctctattttgttattttcggtaacttagtcggttcccgtattggtgaaatggggggattcacatatatgcagtttattgttcccgggctgattatgatgtctgtgatcactaactcatatgcaaatgtttcctcttctttctttagtggtaaattccagcgcagtattgaggaaattttggttgctcctgtaccgactcatgtgattattgccggatttatcggtggtggtgtagcccgtggtgtgtgtgtcggtattttggtgacgctggtttccctgtttttcgtgccattagagattcactcatggggaatggtggtaataactctgttagcaacatcaatcttatttgcattggctggattactgaatgccatttttgcgaaaacatttgatgatattagtatcattccaacgtttattctgactccgctgacctatttgggcggtgtcttttattctctgacgctgttgccggaattttggcagatggtctcgaagctaaacccaatcgtatatatgatcagtgggttccgttatggtttcctcggtattgcggatgtctctctggctatgacactgggtatgctgggcgtatttatacttgggttttacctactggcttggtatttaattgaatccggcagagggctgagaacttaaactagattacacaaatatgctgtcttgctgtgtttcacaacaaggcagcatagtaaatataaaccgattatctacttactgcctgcttaatatgaatcagtctctgatagctacaattgattcaatttctatctgcaaatcctgatgaattagatttgatatttctaccagagaacacgctggtaaacttccttcacagaagttaaataataaaggacggataagagggagctggttgatatccttgacgaagatcgtaaatttaatgagatcagatttgtgacatttttcttattcaataatggatgatatttgctggagaatagtcagagtctgtgcttcaacaccatgctgttgtgactctgtacccagtgcggtcagccctgaaatatacagcaagccttgatgttttaccgtatgtacataagggcctttcacttgtgggaggctggaatagtttattcgagtaaccatgagagactcctcatataatattagcagtgtagagtatttgaatgtatacacttcgtctttcaagttgcctctttgttggctgcgctcgctcaccccagtcacatagttatctatgctcctgggggtttactcccttgccgccgcgatgcaactcgaaatccattgggtatagttaaatcgtatcggtagtaaaaacctgaataacttctgttaagtcgagtgataaataatacttagtatggtcatattcaaaatgtttttttaacgcatccgggctagtgaatttttcccacatgataaatgtgtttgggttttcgtttgattggtgaatgaagaatatttcacattccggttctgacagtgttttttcttgtaagacttttaactctctgataacgacattaagatctgtattttctttagctctaatttctgctgtaacaaaataaccatttttatacatgcatgacatccttattcggggaagaatactggtatacctaagttgaatcgttatttcaaatgatttttatattttaataatatacctgagttacttttttaattggataatatattctttaatttctcaattgcagctaatggattatctaagttgataaaataagatgactgccatttttgggtttgaattgcctgtttagaattggggaaatcccagaaagggtatactcgaatagctcttttcccctctttcgttgcagaagaaaatacacctttcctgaacagaacatctgaatcaaatagaaaaataccttttttatcctctgtgaaagtggctatcaggcaaaaatcaatattatctatggcgtctaatggcattatttctgcattaggataaggtcttttccataatgtaacgaattgacctattttacgtggcgtgattttagcctgacgaaaaaggattaattttccattcagtatgaatcgcattgcttcataatcatggctttcattttctttgctgggtggggtattcaggcggaaaccagcagggagcaataattggctgtatacttcctgaaagctatctgggacattatttttatcgaaatcagatgatgacaatatagtattcctttattggttttgaggttatacacttcgcagggcgggattccactttgtctttaatttaatcaaagataagctgactgcggaattccccagaccatgtggctcttcggcgtttagccgcttgactatcctttatactggtattctgtttaatcacatttaacgcaattcggttaaaaagcgccatttgcgcagccccatcagggtctttgagtgagatgttatcttcccgaaaggccacatctaatacccaatgcagctcattttccaccgcccaatgtcttcttattgccttagctgcggtttctgcatctaacgggagagagctgacataccagcgtgagtcgcggtgggcaggctgacctttcgtgctgcgttcactgaccacttcaatcacactctgtattgaaggccactgttgctgaagctcttcaggcaatgccgcttgaatttgcatgacatggcgacattcttttcgtccatg

SEQ ID NO: 1388 - DNA, 6250 bp, Xenorhabdus sp.; identical to SEQ ID NO: 1387
  CDS (2498)..(3424)

SEQ ID NO: 1389 - DNA, 6250 bp, Xenorhabdus sp.; identical to SEQ ID NO: 1387
  CDS (3439)..(4191)

SEQ ID NO: 1390 - DNA, 6250 bp, Xenorhabdus sp.
  CDS (3939)..(4589)
catggacgaaaagaatgtcgccatgtcatgcaaattcaagcggcattgcctgaagagcttcagcaacagtggccttcaatacagagtgtgattgaagtggtcagtgaacgcagcacgaaaggtcagcctgcccaccgcgactcacgctggtatgtcagctctctcccgttagatgcagaaaccgcagctaaggcaataagaagacattgggcggtggaaaatgagctgcattgggtattagatgtggcctttcgggaagataacatctcactcaaagaccctgatggggctgcgcaaatggcgctttttaaccgaattgcgttaaatgtgattaaacagaataccagtataaaggatagtcaagcggctaaacgccgaagagccacatggtctggggaattccgcagtcagcttatctttgattaaattaaagacaaagtggaatcccgccctgcgaagtgtataacctcaaaaccaataaaggaatactatattgtcatcatctgatttcgataaaaataatgtcccagatagctttcaggaagtatacagccaattattgctccctgctggtttccgcctgaataccccacccagcaaagaaaatgaaagccatgattatgaagcaatgcgattcatactgaatggaaaattaatcctttttcgtcaggctaaaatcacgccacgtaaaataggtcaattcgttacattatggaaaagaccttatcctaatgcagaaataatgccattagacgccatagataatattgatttttgcctgatagccactttcacagaggataaaaaaggtatttttctatttgattcagatgttctgttcaggaaaggtgtattttcttctgcaacgaaagaggggaaaagagctattcgagtataccctttctgggatttccccaattctaaacaggcaattcaaacccaaaaatggcagtcatcttattttatcaacttagataatccattagctgcaattgagaaattaaagaatatattatccaattaaaaaagtaactcaggtatattattaaaatataaaaatcatttgaaataacgattcaacttaggtataccagtattcttccccgaataaggatgtcatgcatgtataaaaatggttattttgttacagcagaaattagagctaaagaaaatacagatcttaatgtcgttatcagagagttaaaagtcttacaagaaaaaacactgtcagaaccggaatgtgaaatattcttcattcaccaatcaaacgaaaacccaaacacatttatcatgtgggaaaaattcactagcccggatgcgttaaaaaaacattttgaatatgaccatactaagtattatttatcactcgacttaacagaagttattcaggtttttactaccgatacgatttaactatacccaatggatttcgagttgcatcgcggcggcaagggagtaaacccccaggagcatagataactatgtgactggggtgagcgagcgcagccaacaaagaggcaacttgaaagacgaagtgtatacattcaaatactctacactgctaatattatatgaggagtctctcatggttactcgaataaactattccagcctcccacaagtgaaaggcccttatgtacatacggtaaaacatcaaggcttgctgtatatttcagggctgaccgcactgggtacagagtcacaacagcatggtgttgaagcacagactctgactattctccagcaaatatcatccattattgaataagaaaaatgtcacaaatctgatctcattaaatttacgatcttcgtcaaggatatcaaccagctccctcttatccgtcctttattatttaacttctgtgaaggaagtttaccagcgtgttctctggtagaaatatcaaatctaattcatcaggatttgcagatagaaattgaatcaattgtagctatcagagactgattcatattaagcaggcagtaagtagataatcggtttatatttactatgctgccttgttgtgaaacacagcaagacagcatatttgtgtaatctagtttaagttctcagccctctgccggattcaattaaataccaagccagtaggtaaaacccaagtataaatacgcccagcatacccagtgtcatagccagagagacatccgcaataccgaggaaaccataacggaacccactgatcatatatacgattgggtttagcttcgagaccatctgccaaaattccggcaacagcgtcagagaataaaagacaccgcccaaataggtcagcggagtcagaataaacgttggaatgatactaatatcatcaaatgttttcgcaaaaatggcattcagtaatccagccaatgcaaataagattgatgttgctaacagagttattaccaccattccccatgagtgaatctctaatggcacgaaaaacagggaaaccagcgtcaccaaaataccgacacacacaccacgggctacaccaccaccgataaatccggcaataatcacatgagtcggtacaggagcaaccaaaatttcctcaatactgcgctggaatttaccactaaagaaagaagaggaaacatttgcatatgagttagtgatcacagacatcataatcagcccgggaacaataaactgcatatatgtgaatccccccatttcaccaatacgggaaccgactaagttaccgaaaataacaaaatagagagacatggtaatcacaggaggcaatagtgtttgcacccaaattcgaccaaagcgagtaatttccttaatccagatggttttcaatgccacccaataaagttggatcatgagcgagctccttggctattatttgtcaacccaacaaatagctcttccaaacgattcgccttgttgcgcatactgtgaatctgaataccctgcgtacttaattgggagaaaacatcatttagtccctgccctcgtttcacatctacttctagcgtagctgtgtcaaccaagcggtagctatagccttcaagcgtaggcatatttccttcaggcgctacatcgagtaaaaatgtttctacctcaagttggctgagtagatctttcatgctggtattttccaccagttcaccatgttgaataatgccaatattacggcaaagcatttctgcttcttccagatagtgagttgtcagaataatcgtggttccttgctcattaagagacttcagaaagtcccacatagagcggcgcagttcgatatcaacacccgcagtcggttcatccagaattaataactttggctgatgcatcaaagcgcgggcgatcatcaggcggcgtttcattccccctgacagacgatttgcccgttcattacgtttgccccagagatcgagttgtgacaggtaggtttccgccctgctttgtgccacattgcgtggtacgccgtagtatcccgcctgattcagcacaatctgaatcacagtttcaaatgggttaaaattaaattcctgcggaactaaccccagttgccgtttagcattgactaaatccgtatcaatatcgtaaccgaatacattaaccttaccgctgcttttattgaccagagaactaataatgccgatagtcgttgatttcccggcaccatttggtcccaacagcgcgtaaaaatcgccggtttccactcgcagatcaatcccacgcagcgcttttactccaccgttataggtcttcgtaagctgcgtcaattccaatgcataagccataagtaaacaacacctttatttttctgctattttttgagtgcaaggacagattatgccattcttttccctgcacttcttttcaatgatagggatcaactcaaaaacattactcaattaaatattaaattctcaattaatgttgtatatgattctatctcaaaaatgttgccaggctattagtcatgatgagaaaaattgaagagctgtttgcccggaacaagcagtggtcagagtctgtaaatgaagaaaatcctcatttcttcaaggaattatcaaaagcacaaaagccacactttctatggataggctgttctgatagccgtgtgcctgctgaaaaactgattgatgctgcaccgggtgatcttttcgttcaccggaatgttgcaaatctagttatacacaccgatttaaattgtttatctgttgtgcagtatgctgtcgatgttttacaggttgaacatataatcatctgtggtcattacggatgcggtggtattgaagcagcagtaaacggaactgaattaggtttaatcaataactggctgctccatattcgtgatttgtggtacaaacacagctcaatgcttggtgaactgccacctaatgatcgactgaatcgcctgtgtgagctgaatgtgattgaacaggtttataaccttggtcattcaaccatcatgcaatccgcgtggaaacgtggacaaaaggtcatgatacatggctgggtatatggtttgaaagatggcgaactgcatgatttggatattaccgcagacagccgtgaaaaactggagcttaattaccgtcaggctatctctaagctggcccgtaaaaagtaacaagttcgcgtaaaaataaatggcagcaaaaaggctgccatttatttactacaccggtacctgtttgcattattgcaaaaatttactcttccagcagagtaacatggccgatataaggcagatggcgatagcgctgagcataatcaatgccataacccaccacgaatttgtcttcaatcgagtaaccgatccactcaaccggaacatcaacttcgcggcgggatggtttgttcagtaacgtacaaattgccagagaatttggttcacgaagagacagaatctcacggattttattcagtgtattcccggaatcgataatatcttcaacgattaacacatctttaccacgaatatcttcatccagatccttaaggatcttcacatcgcgggtagaatccattccattgccgtagctggatgcagtcataaaatccacttcatgagaaacctgaatttcacggcacaaatctgccatgaaaataaacgatcctctcagcaggccaaccaataccagttcacgatcgctattgcgataatgttctgtaatctgttgccctaattcagcaatacgttgtttaacctcttgctcggaaatcatcacttctacaatatgtttcaatttcacatacctatttgttttaaaacaataaacccatctttaattatgtgataaatcaccaatattgatacaccaagtgatatacagttagtcgcacgaagacggacacataagaaaacatgagaacaaaatatttgcggagtataccagaaggaatcgattgcggtaaaagaagaagccagacttagtactccagccgcagcccgcattgtgtcatgatggcccttcccttctttctaacactaagggaggtatcacatcaattacgtagactcaacgcatcgaaataccaacgaacacattgggaatgataacggcggagcagtggaaactgatttgcttgaacgttctgttctcactcaaaaataggccgcataataagcggcctaccttactaatgtgttctcatcccggcactgtacattaataatttaaacagtgtggcaacgatccccaggcttaagacacttgctaaccagatagttatcatccaccccagtttcttataccaacgggagtcattccgattttctatctgaggtaaatgaagattagtgatagctttcacctgatttaacttttcctcgaaagacataataactccaacttgtgtaacctaagactacaggaataattaaccccaattctggataagaaattgacgagaagcctgttcaaggagccgtgttttggtgcaagtcgaaacagctccggggaggaacaggctatgaacaacttagttgaaattttcatcgatgtcgatgacttttgtcgttttttcattccacaatgggaacagttttgtctcaataagggatatcgcctacgtcgtagaaaaggtcacatgtatcccagtgaaatcatgaccatcctgatcctctttcatctgtcgcattatcgtgattttaaaaatttttatctggagcatatttggcgatatcatcatcacgattttcccaccttgctcagttatactcgttttatcagtgtcgcgccttccgttttagtgcctctgtgcagctatttgactcaattttttaaa

SEQ ID NO: 1391 - DNA, 6250 bp, Xenorhabdus sp.; identical to SEQ ID NO: 1390
  CDS (1622)..(1768)

SEQ ID NO: 1392 - DNA, 6250 bp, Xenorhabdus sp.; identical to SEQ ID NO: 1390
  CDS (1)..(426)

SEQ ID NO: 1393 - DNA, 8979 bp, Xenorhabdus sp.
  CDS (3)..(4031)
cctcgaattttcagagctcgacggaaggcagtgtcgatccgcgcacgggcctgtttaattatatgatgccggtggcgcatcttatcggcaataaccaactggggccggagctgaccctggcgctggcatacagcccgttgaattcagcggatatcggttttggcatcggtttttccctcgggctgactcactacgacagtgacacaaaaatgctgcagctctccaccggcgagcgctataaagtggatgaaacggataaggccgtgactttactccaatacaagcaggatgtggtgcggtttgaaaaaaacggggcggaggatgcgtatcaggttatccataaatccggtcaggtggagatcctctccgggcccaaaaatgcctttaacctgaaagttccggtgaagatcctgaatccgctggggcacagcctgcagctggagtgggattataccgccggcgccgtgccacacctgacggggatttacgatctggataaaaaacatcgggcgctgctgaccgtcaggacaataccgggggtggcgacccggctgaccgtctggcccggcatgtcggaaatgtatgaaattgaactggcgctgcataacggtcgggtgagtaccatcacgaatctgacggccgggcagacgttgatctggtcattggattatgacctgcactgccagtttttaaaccgggtgatggccccgaccggtttgctggaggcggtgacgtatacgcaggacggtcaccgttttccggctaaggggccggcgaccgccttgccgtatgtgacccgctacagccagtcatccggtcagggggacgaaaatgtccgcacgtatacttatacaaagaacaactttctcggcagcgggaccggaggcgactggagccgcaatcaggattacctctacggggtgctgtccgattatcagtacggttcaaccgaacgctgggacaacggacaggcggtccgggtgattagccggtgctacaataattaccatttgctgatttcagaaacggtacagcagaaccactgcatacgtcagcatgaaacggagtattacgcccaaatcgggaaggagtttgcgcaacagccgccccagtttcagctgccaaaatcggccacggttcgctttattgccggcaacggtcagcgggaggaggtgacccggacggagtttgatgcggccggcaaccccaccctgcagattgccccggacggcacccgcacggtgtgggtctattacccggccaaaggggaggtgacacggctggatgacgattgctacggctgtccggctgacccccacggatttgtccgttacgttaaatcgaaaacggtgacaccgggggtggcttcccccattggggcctatgacgatgcgccgctacatgaggtgatttaccgttatgattccctgcccacgctgccggggaccgcgaccaaagcggcggtggtgcgtacgcatcagtgtctgttccgggtggaccggcacaccggacagcgccagttgttgcacacgcatcagaccggctatgtcagccggcctcactcccgccactacgggcgggtagatagccttgcgcagacggtgtatgacgggcagaacgccggtcagggatatacccagcgacaggtttttcactatcagctggataaacagcacctgaaacaaaccacgcactggacgagtgagcatgacggtctgacggcttccagcgtgcaaatccactcctgcttcagccgtaaagtggggtttgagcaggaccatcagggctgtacggcgctgtatgagtatgatgcatttggccgcctgtctaagcagctgaataatgccgggacggcaggagcaacccaccgtagtatggcttatcgctattcccttagaggtaaactaatagcttacaaggatgtggctaggaaatggcaccggctgcggtttgatatactgggtcgtccggtagaggtagtggatgatgctgtgattgtgactctccgttatgactcggctggacgggcagacagctggacggtaaaggataaaacaatcggaaagcaattgactaccaccatcacctttgatgatttcagccgggaaatcggacggcagattgacagcgagacagatgtgctgaccctgagccagacttatactgtcgctggacagctggcgagccgcatcaccgattctaaacaggcaggacggttacgggaagagtattacacctatgatattgctcgctgctggctgacggattaccgctgttcggggctggaatgcccgcgggatgcgtacgggcagagcctgaatcgccagcagtttacctatgaccggctgggcaacctgctgacctgtctaaccactctggcggacggcagtcaggacatggctcacttcagttacgctaatccggccgacccttgccagctgacgaaaattacccataaccatccggcctatccggccacgattacgctgacttatgataaagccgggcggttggttatggatgaggcaaatcggatgctggcctatgacgggctgggacggctggcctccgtcacgcaggcggggagcacgcagacttacggttatgatgccagtagtttgctgatattacagcggcggggcaaggctgatacccgggagttgtactatcagggagcaaaccgggtggcagaaattcagcgggaaagcgggacagtaacacggttggtgcatgttcagggagtaccgacagccacagtcactgataacagcgtgcatttactggggacggacgaaccgggtagtgtgttgttgagtcaccagcagggcacagaatcgcgttttcgttataccccgtacgggcagcaggcggcggcggacagtgacccggatttgccgggctataacggggaacggcaggatccgcttggcggcggctaccatctgggcaacggctaccggacttataacccggtactgatgcggtttacggcgccggacagcctcagcccgtttgaggccggggggctgaacccgtatgcgtactgcctgggggatccgatcaatcggaccgatccgagtgggcacatgagtgtgggcagtattctgggaatagcattaggtctgtttggaatggcggcggagttggccgcggccattccaacgggaggggcttccctgacgctgagcggggcgattatcgcggggatcggttttttaggggccgcgaccgggattgccagtgccgcgacagaggacagtgatccgcaggcgtctgctgttttgggctggatttcaatgggattgggagcggccagtctgggcagtttggtgcttggtaaaatggttggtggattacggcaggcggaagcccagttacaaaatagttttagttccggtgcaagaaccgctgttgcagcgggagaaagtgagattcccagaacgatagaagcagttacagcagaaacaactatagctactgagacagctaacacaacaagggcaacagcgacagctgagacaactgccagaagcacattagagtcttttgatagagcaaatgcggcagggtgggtacaggaagtcatgagtaatgagcgtacaacagtgcagtttaactttcctcctcacgctcagatgacagaaatcatgaaacaagattatgacgtactacggcgcttgggttttacttatctggttgagggaggaggaataaggttaacaatggataacagtgtacttctggatgcgggagggagaacggtacaaagatttataaacattgaaagtagaacagtacgtgaattatatgcaccatttataaatgaaattaatccaagagcggtcaataccatcagtagatttcgctatgaagaaggtgttaatagactagtgtataatgttaatcggcatcaaggaatttttattgatccacgttttgacgattttttcctgggagtttcgaggtggaatatgcggtggagagaagcgaatcttcccggaatgcctgctgacttactgcgattgctataatgggtgatcagacagcgtatagtgattaatctatacgttgtctttttaaaaatcattactattaaattaattcaaagtaccgttttacaagttctcgcccaatctcaaatgatgcagtagcggctggcgagggagcattacaaacgtgtaatgaccggcgaccggttacaaagtgaaaatcatctactagcttaccctcaggcgtgactgcctgagcacggacacccgctggccccggagtaatgtcttcaggacgtaaatcgggaataagctgacgggcattttcagtaaatagctggtgtgagaatgagcggcgcatttctgcgattccttcactgaaataacgtgaagcaattttccagacacctttgtaagtcagtatttccgccatatcccgcaggttgcaatctgcccggcgatacccctcgcgtttaaatgccagtaccgcattggggcccacatcccgtttgccattatgcatacgggtgaaatgaacacctaaaaatgggaaatcaggattaggaacgggataaatcaagtgattgaccagatggtttttatcactattcagtacataatactcgccgcgaaatggcacgattttcataccagtatcgtagcctgccagttgagctattctgtcactctgtaagccggcacagttcaccagccattttgcctgataggtgcgttgttgggtttgaacttcgatagaatcactgtgttcccggatagtttgtacagattgttggcagtgaatatctccacctctgatctgaatgatttcagccagttttgctgcaatttccggataattaacgatcccggtatccggtaccagaatggcttcaagaccattgacataaggttcacgctcctttaaaagccgcctgtgatatccgattaacttgaagaccattttgcaaaccccgatgatagatattttcaagaaaaaaaagtcttttcatatgcggatggacacatatcattattactcacaagcgggttcaatagtgataagcctcgtggttcccaggcaaaaactgatatatcgtctggttcccttttttcgccaggttggctttcagactgccgggcgtatagtaaatacccgaatgaacaacattactgttatgcccgctttgatgcgtagccacatatttttctttatccagtaccagcaaacgtaaatgtgggtgctgttcctgtagtgcattggccgtaccaagcccgactaaccctgccccgatgataatcacatcatacattatgcggttccttccttattgctgttgttcggtattgcttatagcgcagcaagtgaataacaccagataacataatcagcgccattcccgccaaatcggttaatacgcccggcttaattaaaagaagagcagcaatcgtaaagaaaatcctttccagccagtgcgcttttatcatccagaaattggcagtggcaatagagagggaataaatgccaatcaatgcggttattaacatataaagaatagaaagcacacttaactcactgccctgcatcaatagcgccgggttatacaccagaataaaaggaataataaaaccgggcaaagccagccggacagcactccatgatgtctgcatgggatcagagcgagcgatactggcggctgtgtagctggcaagggcaactggaggggtgatattggataatgccccgaaccagaaaacaaagaaatgtgccgctaagggcagaacccctgctttaatgagaattggtgatacggtgacggcgacaacaatatataacgcagtggatggtaagcccatgctgagcacgatacagactaccattacaaccagcaggatcatccatagtgtgttatctgtcagggaaacaatgttgaaagcaagggtagagccgataccggtcatagtcacaacgcagataatgataccaatagcagcacaggcaacagtaacctggatggctccacgagcggcttcattcagggcattggctatttttttgggtgtcatccgtaccgaagtatccggcgtgatccagcttgcaacaataattgcaataatgccgaggaaaccggcataaatgggtgtttttcctgctaataatgtgccgattacgataaaaaggggtagtaacagtaacccacgcgctttcagtaccgctcttacctgtggaatactttctttactgatgcctttcaaaccctgttttttggcttccaaatcaatggcaataatcagggaagcataatagagcattgccggaataatagcggcaagtacaattgtggtgtaagagataccgagaaaacccgccatgataaaagcggctgctcccatgatagggggcataatcataccgccggttgatgctgccgcttcgacggctccggcaaagcgtggcgacagtccaatgcttttcatcagaggtatggtgaaagtccctgttgtcgctacattggcaactgcgctcccactgagtgagcctgtcagcgccgatgaaatgacagcaacctgtgcaggcccgcctctgcgacgtccggcgattgccagagccaaatcattgaacaatgctgtcgcaccactgacactcaaaaatgaaccaaacaggataaagacaatgatcgctgttgatgctgttgacagtgtgatcccgaaaatcccttcacccgtcataaacaaccggtataacagacgctcgatagaaaaccctgcatgcccgaaaatgccgataaaatattggccgaataaagcatacacaatagcgaaaacagataatcccggaatgaaataacccgttgttcttcttgccgcttcaagtaatagggcaatgccaacgatagccatcacataatctgtggtattgggaatactgtttctgacaacatgtaaatcgatataagtaaaatagaaataaccgtaactgatcagggtaagcagaatgacaagataatcccaaagattgagttttgctgtcgcctgctgtctggaaaccggaaaaagtataaagcccaacaccagaataccgccaagaaagatcacattacggtaaaattcctgtgtattagataacgcattagcgtagatggcataaagagaaatagcgatcgccagaagggtcgctatctgtttgtaaggactgattaaatggcgattaccggaaccggattccttatccagttcagcagtagacgatgttaatggcgcaatactcataatgattccttatgaaaacacataatcggacgaaaaagggcttacaatttgctcattactgaggctgagctgtggctgcatgaatttccggcgggataagctcatcaggaataggcagtccgatttcccggtaatatcggtaggctcccggatgcagcggaacggcaacgcctttaagggcattttccggggaaatatatttggccgcgctgtggatttgatgaacttctttcaggttctcaaacattgattttgttaattcataaacgattttttcatcaatctcacgggtggtcatcagaatattgggctgagcaatcgtgtgaacagttgcactttggcgggggtaagtttccggctgaataacaaaacgaaaccaggaattcgcgatagcattaatctgcttcaattgctgatcggtcacattcaggatacgggcagagacaccgctggcgtacatatccgtgaccgctgaggcgggaacccccgcaggtattgcgccaccatcaagacggcatcgcgcattgcggaaacggtatcactgtagccgagatattccgggctaatacttttcttgctaaggttgaccccttgcaaaataatcagtgtagattgctctgtgccactggcttgtgggccaacggaaaaacgggtgttggcgatgtcgtttaacgtaccctctttgattttatcgtccatcatcacaaagtgttcgacattaggccagagtaccgagatggaacggagatcctgataaggccggttttcgaaattacggacaccctgataggcttcaacagcaatcaaactttgtaaaataacaagctgcgcctcatttttctggagtaaatcaatattttcaattgacccagcggaagactggcctgtgacctgaatattttcatccttgagatgatggctccaaacattggcaagcccgacacctatcgggtaaaaggttcctcctgtggatgccgtggcaacggaaagaaatcgtttatcggcattcttcatttttccaataatagccatgaaaactaaggcaatagcagcgatgactgccagtagtgcttttgttcttttgggtgttaatatttttgtgactgacataatagggtttaccgaaaattgtgtaattgatgatgtggtgtttcatttatagttaacgtaagtatgaacttatctgtttttctttttgtaaatgactgcattatgctatgactatgagatagtttaatgagtcataaagaaggtaaaatataaatataattaccacaatcataaatctaatgcttttacggagctttattgtgaaagtttgaacggagtcacgtctttatcaatttgattaattgatgtctttattaatgcaaaataatatcagaagtgttcaatttaaataattcagtgaataataatgatgtatctatagttttacttatttgaatattattgacagtcagcacggcatggacatttttttagtgtcgactgatattttgatgattagagtgttcttttataaacaatgtatcattattttaatgattttctggttcagggtaatgtgatggaaaaacattaatcataaataataaattattgctgttttaatttttattaccgaatctttatctaagtgacataattttcactgtgcctaaatttattcttaaaatgaatgtcatgaagttaatttatctcattttctttggctatggat

SEQ ID NO: 1394 - DNA, 8979 bp, Xenorhabdus sp.
  CDS (7418)..(7582)
atccatagccaaagaaaatgagataaattaacttcatgacattcattttaagaataaatttaggcacagtgaaaattatgtcacttagataaagattcggtaataaaaattaaaacagcaataatttattatttatgattaatgtttttccatcacattaccctgaaccagaaaatcattaaaataatgatacattgtttataaaagaacactctaatcatcaaaatatcagtcgacactaaaaaaatgtccatgccgtgctgactgtcaataatattcaaataagtaaaactatagatacatcattattattcactgaattatttaaattgaacacttctgatattattttgcattaataaagacatcaattaatcaaattgataaagacgtgactccgttcaaactttcacaataaagctccgtaaaagcattagatttatgattgtggtaattatatttatattttaccttctttatgactcattaaactatctcatagtcatagcataatgcagtcatttacaaaaagaaaaacagataagttcatacttacgttaactataaatgaaacaccacatcatcaattacacaattttcggtaaaccctattatgtcagtcacaaaaatattaacacccaaaagaacaaaagcactactggcagtcatcgctgctattgccttagttttcatggctattattggaaaaatgaagaatgccgataaacgatttctttccgttgccacggcatccacaggaggaaccttttacccgataggtgtcgggcttgccaatgtttggagccatcatctcaaggatgaaaatattcaggtcacaggccagtcttccgctgggtcaattgaaaatattgatttactccagaaaaatgaggcgcagcttgttattttacaaagtttgattgctgttgaagcctatcagggtgtccgtaatttcgaaaaccggccttatcaggatctccgttccatctcggtactctggcctaatgtcgaacactttgtgatgatggacgataaaatcaaagagggtacgttaaacgacatcgccaacacccgtttttccgttggcccacaagccagtggcacagagcaatctacactgattattttgcaaggggtcaaccttagcaagaaaagtattagcccggaatatctcggctacagtgataccgtttccgcaatgcgcgatgccgtcttgatggtggcgcaatacctgcgggggttcccgcctcagcggtcacggatatgtacgccagcggtgtctctgcccgtatcctgaatgtgaccgatcagcaattgaagcagattaatgctatcgcgaattcctggtttcgttttgttattcagccggaaacttacccccgccaaagtgcaactgttcacacgattgctcagcccaatattctgatgaccacccgtgagattgatgaaaaaatcgtttatgaattaacaaaatcaatgtttgagaacctgaaagaagttcatcaaatccacagcgcggccaaatatatttccccggaaaatgcccttaaaggcgttgccgttccgctgcatccgggagcctaccgatattaccgggaaatcggactgcctattcctgatgagcttatcccgccggaaattcatgcagccacagctcagcctcagtaatgagcaaattgtaagccctttttcgtccgattatgtgttttcataaggaatcattatgagtattgcgccattaacatcgtctactgctgaactggataaggaatccggttccggtaatcgccatttaatcagtccttacaaacagatagcgacccttctggcgatcgctatttctctttatgccatctacgctaatgcgttatctaatacacaggaattttaccgtaatgtgatctttcttggcggtattctggtgttgggctttatactttttccggtttccagacagcaggcgacagcaaaactcaatctttgggattatcttgtcattctgcttaccctgatcagttacggttatttctattttacttatatcgatttacatgttgtcagaaacagtattcccaataccacagattatgtgatggctatcgttggcattgccctattacttgaagcggcaagaagaacaacgggttatttcattccgggattatctgttttcgctattgtgtatgctttattcggccaatattttatcggcattttcgggcatgcagggttttctatcgagcgtctgttataccggttgtttatgacgggtgaagggattttcgggatcacactgtcaacagcatcaacagcgatcattgtctttatcctgtttggttcatttttgagtgtcagtggtgcgacagcattgttcaatgatttggctctggcaatcgccggacgtcgcagaggcgggcctgcacaggttgctgtcatttcatcggcgctgacaggctcactcagtgggagcgcagttgccaatgtagcgacaacagggactttcaccatacctctgatgaaaagcattggactgtcgccacgctttgccggagccgtcgaagcggcagcatcaaccggcggtatgattatgccccctatcatgggagcagccgcttttatcatggcgggttttctcggtatctcttacaccacaattgtacttgccgctattattccggcaatgctctattatgcttccctgattattgccattgatttggaagccaaaaaacagggtttgaaaggcatcagtaaagaaagtattccacaggtaagagcggtactgaaagcgcgtgggttactgttactacccctttttatcgtaatcggcacattattagcaggaaaaacacccatttatgccggtttcctcggcattattgcaattattgttgcaagctggatcacgccggatacttcggtacggatgacacccaaaaaaatagccaatgccctgaatgaagccgctcgtggagccatccaggttactgttgcctgtgctgctattggtatcattatctgcgttgtgactatgaccggtatcggctctacccttgctttcaacattgtttccctgacagataacacactatggatgatcctgctggttgtaatggtagtctgtatcgtgctcagcatgggcttaccatccactgcgttatatattgttgtcgccgtcaccgtatcaccaattctcattaaagcaggggttctgcccttagcggcacatttctttgttttctggttcggggcattatccaatatcacccctccagttgcccttgccagctacacagccgccagtatcgctcgctctgatcccatgcagacatcatggagtgctgtccggctggctttgcccggttttattattccttttattctggtgtataacccggcgctattgatgcagggcagtgagttaagtgtgctttctattctttatatgttaataaccgcattgattggcatttattccctctctattgccactgccaatttctggatgataaaagcgcactggctggaaaggattttctttacgattgctgctcttcttttaattaagccgggcgtattaaccgatttggcgggaatggcgctgattatgttatctggtgttattcacttgctgcgctataagcaataccgaacaacagcaataaggaaggaaccgcataatgtatgatgtgattatcatcggggcagggttagtcgggcttggtacggccaatgcactacaggaacagcacccacatttacgtttgctggtactggataaagaaaaatatgtggctacgcatcaaagcgggcataacagtaatgttgttcattcgggtatttactatacgcccggcagtctgaaagccaacctggcgaaaaaagggaaccagacgatatatcagtttttgcctgggaaccacgaggcttatcactattgaacccgcttgtgagtaataatgatatgtgtccatccgcatatgaaaagacttttttttcttgaaaatatctatcatcggggtttgcaaaatggtcttcaagttaatcggatatcacaggcggcttttaaaggagcgtgaaccttatgtcaatggtcttgaagccattctggtaccggataccgggatcgttaattatccggaaattgcagcaaaactggctgaaatcattcagatcagaggtggagatattcactgccaacaatctgtacaaactatccgggaacacagtgattctatcgaagttcaaacccaacaacgcacctatcaggcaaaatggctggtgaactgtgccggcttacagagtgacagaatagctcaactggcaggctacgatactggtatgaaaatcgtgccatttcgcggcgagtattatgtactgaatagtgataaaaaccatctggtcaatcacttgatttatcccgttcctaatcctgatttcccatttttaggtgttcatttcacccgtatgcataatggcaaacgggatgtgggccccaatgcggtactggcatttaaacgcgaggggtatcgccgggcagattgcaacctgcgggatatggcggaaatactgacttacaaaggtgtctggaaaattgcttcacgttatttcagtgaaggaatcgcagaaatgcgccgctcattctcacaccagctatttactgaaaatgcccgtcagcttattcccgatttacgtcctgaagacattactccggggccagcgggtgtccgtgctcaggcagtcacgcctgagggtaagctagtagatgattttcactttgtaaccggtcgccggtcattacacgtttgtaatgctccctcgccagccgctactgcatcatttgagattgggcgagaacttgtaaaacggtactttgaattaatttaatagtaatgatttttaaaaagacaacgtatagattaatcactatacgctgtctgatcacccattatagcaatcgcagtaagtcagcaggcattccgggaagattcgcttctctccaccgcatattccacctcgaaactcccaggaaaaaatcgtcaaaacgtggatcaataaaaattccttgatgccgattaacattatacactagtctattaacaccttcttcatagcgaaatctactgatggtattgaccgctcttggattaatttcatttataaatggtgcatataattcacgtactgttctactttcaatgtttataaatctttgtaccgttctccctcccgcatccagaagtacactgttatccattgttaaccttattcctcctccctcaaccagataagtaaaacccaagcgccgtagtacgtcataatcttgtttcatgatttctgtcatctgagcgtgaggaggaaagttaaactgcactgttgtacgctcattactcatgacttcctgtacccaccctgccgcatttgctctatcaaaagactctaatgtgcttctggcagttgtctcagctgtcgctgttgcccttgttgtgttagctgtctcagtagctatagttgtttctgctgtaactgcttctatcgttctgggaatctcactttctcccgctgcaacagcggttcttgcaccggaactaaaactattttgtaactgggcttccgcctgccgtaatccaccaaccattttaccaagcaccaaactgcccagactggccgctcccaatcccattgaaatccagcccaaaacagcagacgcctgcggatcactgtcctctgtcgcggcactggcaatcccggtcgcggcccctaaaaaaccgatccccgcgataatcgccccgctcagcgtcagggaagcccctcccgttggaatggccgcggccaactccgccgccattccaaacagacctaatgctattcccagaatactgcccacactcatgtgcccactcggatcggtccgattgatcggatcccccaggcagtacgcatacgggttcagccccccggcctcaaacgggctgaggctgtccggcgccgtaaaccgcatcagtaccgggttataagtccggtagccgttgcccagatggtagccgccgccaagcggatcctgccgttccccgttatagcccggcaaatccgggtcactgtccgccgccgcctgctgcccgtacggggtataacgaaaacgcgattctgtgccctgctggtgactcaacaacacactacccggttcgtccgtccccagtaaatgcacgctgttatcagtgactgtggctgtcggtactccctgaacatgcaccaaccgtgttactgtcccgctttcccgctgaatttctgccacccggtttgctccctgatagtacaactcccgggtatcagccttgccccgccgctgtaatatcagcaaactactggcatcataaccgtaagtctgcgtgctccccgcctgcgtgacggaggccagccgtcccagcccgtcataggccagcatccgatttgcctcatccataaccaaccgcccggctttatcataagtcagcgtaatcgtggccggataggccggatggttatgggtaattttcgtcagctggcaagggtcggccggattagcgtaactgaagtgagccatgtcctgactgccgtccgccagagtggttagacaggtcagcaggttgcccagccggtcataggtaaactgctggcgattcaggctctgcccgtacgcatcccgcgggcattccagccccgaacagcggtaatccgtcagccagcagcgagcaatatcataggtgtaatactcttcccgtaaccgtcctgcctgtttagaatcggtgatgcggctcgccagctgtccagcgacagtataagtctggctcagggtcagcacatctgtctcgctgtcaatctgccgtccgatttcccggctgaaatcatcaaaggtgatggtggtagtcaattgctttccgattgttttatcctttaccgtccagctgtctgcccgtccagccgagtcataacggagagtcacaatcacagcatcatccactacctctaccggacgacccagtatatcaaaccgcagccggtgccatttcctagccacatccttgtaagctattagtttacctctaagggaatagcgataagccatactacggtgggttgctcctgccgtcccggcattattcagctgcttagacaggcggccaaatgcatcatactcatacagcgccgtacagccctgatggtcctgctcaaaccccactttacggctgaagcaggagtggatttgcacgctggaagccgtcagaccgtcatgctcactcgtccagtgcgtggtttgtttcaggtgctgtttatccagctgatagtgaaaaacctgtcgctgggtatatccctgaccggcgttctgcccgtcatacaccgtctgcgcaaggctatctacccgcccgtagtggcgggagtgaggccggctgacatagccggtctgatgcgtgtgcaacaactggcgctgtccggtgtgccggtccacccggaacagacactgatgcgtacgcaccaccgccgctttggtcgcggtccccggcagcgtgggcagggaatcataacggtaaatcacctcatgtagcggcgcatcgtcataggccccaatgggggaagccacccccggtgtcaccgttttcgatttaacgtaacggacaaatccgtgggggtcagccggacagccgtagcaatcgtcatccagccgtgtcacctcccctttggccgggtaatagacccacaccgtgcgggtgccgtccggggcaatctgcagggtggggttgccggccgcatcaaactccgtccgggtcacctcctcccgctgaccgttgccggcaataaagcgaaccgtggccgattttggcagctgaaactggggcggctgttgcgcaaactccttcccgatttgggcgtaatactccgtttcatgctgacgtatgcagtggttctgctgtaccgtttctgaaatcagcaaatggtaattattgtagcaccggctaatcacccggaccgcctgtccgttgtcccagcgttcggttgaaccgtactgataatcggacagcaccccgtagaggtaatcctgattgcggctccagtcgcctccggtcccgctgccgagaaagttgttctttgtataagtatacgtgcggacattttcgtccccctgaccggatgactggctgtagcgggtcacatacggcaaggcggtcgccggccccttagccggaaaacggtgaccgtcctgcgtatacgtcaccgcctccagcaaaccggtcggggccatcacccggtttaaaaactggcagtgcaggtcataatccaatgaccagatcaacgtctgcccggccgtcagattcgtgatggtactcacccgaccgttatgcagcgccagttcaatttcatacatttccgacatgccgggccagacggtcagccgggtcgccacccccggtattgtcctgacggtcagcagcgcccgatgttttttatccagatcgtaaatccccgtcaggtgtggcacggcgccggcggtataatcccactccagctgcaggctgtgccccagcggattcaggatcttcaccggaactttcaggttaaaggcatttttgggcccggagaggatctccacctgaccggatttatggataacctgatacgcatcctccgccccgtttttttcaaaccgcaccacatcctgcttgtattggagtaaagtcacggccttatccgtttcatccactttatagcgctcgccggtggagagctgcagcatttttgtgtcactgtcgtagtgagtcagcccgagggaaaaaccgatgccaaaaccgatatccgctgaattcaacgggctgtatgccagcgccagggtcagctccggccccagttggttattgccgataagatgcgccaccggcatcatataattaaacaggcccgtgcgcggatcgacactgccttccgtcgagctctgaaaattcgagg

SEQ ID NO: 1395 - DNA, 8979 bp, Xenorhabdus sp.; identical to SEQ ID NO: 1394
  CDS (4066)..(4887)

SEQ ID NO: 1396 - DNA, 8979 bp, Xenorhabdus sp.; identical to SEQ ID NO: 1394
  CDS (3690)..(3941)

SEQ ID NO: 1397 - DNA, 8979 bp, Xenorhabdus sp.; identical to SEQ ID NO: 1394
  CDS (1724)..(3688)

SEQ ID NO: 1398 - DNA, 8979 bp, Xenorhabdus sp.; identical to SEQ ID NO: 1394
  CDS (1264)..(1668)

SEQ ID NO: 1399 - DNA, 8979 bp, Xenorhabdus sp.; identical to SEQ ID NO: 1394
  CDS (692)..(1297)

SEQ ID NO: 1400 - DNA, 5098 bp, Xenorhabdus sp.
  CDS (29)..(400)
agtagttgacatttagcggagcactaaaatgatccaagaacagactatgctgaacgtggccgacaactccggtgcacgtcgcgtaatgtgtatcaaggttctaggtggctcgcaccgtcgatacgcacatgtcggtgatatcatcaagatcaccatcaaggaagcgattcctcgtggtaaagtcaaaaaaggtgatgtcctgaaagcggtagtggtgcgcaccaagaagggtgttcgtcgcccggacggttctgtcattcgcttcgatagcaacgcttgcgtattgttgaacaacaatagtgagcaggttatcggtacgcgtatttttgggccggtaactcgtgaacttcgtaatgaaaagttcatgaaaattatctctctggcacctgaagtactctaaggagcaggcaatggcagcgaaaatccgtcgtgatgaccaaattatcgtgctgactggtaaagacaaaggtaagcgcggtaaagtaaaacaggttctttcttctggtaaaattatcgttgaaggtatcaatctggttaaaaaacatcagaagccagttccggctctgaaccaaccaggtggcatcgttgaaaaagaagcagcaattcaggtttctaacgttgcaatctttaatgcagaaaccggcaaggctgaccgtgtaggttttagattcgaagacggcaaaaaagtacgtttcttcaaatctaacaacgaaactatcaagtaatttggagtatacgatggcgaaactgcatgattactacaaagacgaggtagtccagaaactgatgagtcagtttggttaccattctgtcatgcaagtccctcgggtcgagaagatcaccctgaacatgggtgttggtgaagcaatcgctgacaagaaactgctggacaatgcagcagctgatctggcagcaatttctggtcaaaaaccactgatcaccaaagcacgcaagtcagttgcaggcttcaaaatccgtcagggctatccaatcggctgtaaagtaaccctgcgtggcgaacgcatgtgggagttctttgagcgcctgatttctattgctgtaccacgtattcgtgacttccgtggtttgtccgctaagtcatttgatggtcgcggtaactacagcatgggtgttcgtgagcaaatcatcttccctgaaatcgattacgataaagtggatcgtgtacgtggtttggatattaccatcaccactactgcgaaatctgatgatgaaggccgcgcactgttggctgcgtttaacttcccgttccgcaagtaaggcagggtattcatggctaagcaatcaatgaaagcacgtgatgtaaaacgtgcgaaattagctgagaaattcttcgcaaaacgcgttgaactgaaagcgatcatctctgatgtaaacgcatctgatgaagaccgttggaatgctgttctcaagctgcaaacactgccacgtgattccagcccttgccgtcagcgtaaccgctgccgtcaaactgggcgtccgcatgcatttttgcggaagtttgggttgagccgtattaaagtccgtgaagccgctatgcgcggtgaaatcccgggccttaaaaaggctagctggtaattgtcaccaattgaatcacgggagtaaagacagatgagcatgcaagatccgatcgcggatatgctgacccgtatccgtaacggtcaggccgcgaataaagttgcggtcaccatgccttcctccaagctgaaagtggcaattgccaaagtgctgaaggaagaaggttatattgaagattttaaaatcgaaggcgacaccaagccagaactggaagttactctgaagtacttccaaggtaaggctgttgtagaaagcatccagcgtgtaagccgcccaagtctgcgcatctataagaaaaaagatgagctgccacaagttatggctggtttgggtatcgctgttatttctacctctaaaggtgtaatgactgatcgtgcagctcgccaggctggtctgggtggcgagattctctgctacgtagcttaattcgggaggaaagaatgtctcgtgttgcaaaagcacccgtcgtcattcctgccggcgtagaggttaaactcaacggtcaggttatttcgattaagggtaaaaacggcgaattgagtcgtgaaatccacagcgcagttgaagttacacatgcagatagccagctgactttcgctccacgcgaaggttttgcagatgcttgggcacaggcgggtacaactcgttctctgctgaatgcaatggttatcggtgttaacgaaggcttcactaagaagctccaactggtaggtgttggttaccgtgcagcagttaaaggcaatactgttagtttgtctttaggcttctcgcatccggttgaacatcaactgcctgcaggcattactgcggaatgcccatcacaaactgaaatcgtactgaaaggtgctgataagcaggtgattggtcaggttgcggcagatctgcgtgcctatcgtcgtcctgagccatacaaaggcaagggtgttcgttacgccgatgaaatcgtgcgtaccaaagaggctaagaagaagtaaggtaacactatggataagaaagcagctcgtatccgtcgtgcgacccgcgcacgccgcaagctccaggaactgggtgcaactcgcctggtggtacaccgtacccctcgccatatttatgcgcaggttatcgcaccaaatggttctgaaactctggtggcagcttctacaacagaaaaagctatcagtgaacaactgaaattcactggaaacaaagaagccgcagcagtagttggtaaaattgttgctgaacgtgctctggaaaaaggtatcaaaaacgtatcctttgaccgttctggtttccaatatcatggtagagtccaggcactggcagatgctgcccgtgaagctggccttcagttctaaggtagaggtgtaagatggctcacatcgaaaaacaagctggcgaactgcaggaaaagctgatcgcggtaaaccgcgtatctaaaaccgttaaaggtggccgtattttcagctttacagcactgactgtagttggtgatggtaacggtcgcgttggttttggctacggcaaagcacgcgaagttccggcagcgatccagaaagcgatggaaaaagcacgtcgcaatatgaaaaccgtcgcacttaacagcggcaccctgcaccacccagtgaaaggcgcacacaccggttcccgcgtgttcatgcagcctgctcatgaaggtacaggtatcatcgcaggtggtgcgatgcgtgcggttctggaagtagctggagttcgtaacgtactggctaaaacctatggttccactaacccaatcaatgtggttcgtgcaaccctggatgctttagacagcatgaagtctccagaaatggtcgcggctaagcgtggcaaatccgtcgaagaaattctggggtaatgaccatggctaagactatcaagattacacaggtccgcagttcaatcggtcgtttgcctaagcataaggcaactctgactggtttaggtctgcgtcgcattggtcatactgttgaacgcgaagatacaccagcggttcgcggtatggtcaacttggtttcctatatggttaaagttgaggagtaacagatgcgcttaaatactctgtctccggctgaaggtgccaagcacgcacctaaacgtgtaggtcgtggtatcggttctggtctgggtaaaactggcggccgtggtcacaaaggtcagaaatctcgttctggcggtggcgtacgtcgtggtttcgaaggcggccagatgcctctgtaccgtcgtctgccaaaatttggctttacttcacgtaaggcaatgattacagccgaaatccgtctgtctgattttgctcgtgttgaaggcgatgttatcgatctgaatgcactgaaagctgctaacattgttggccctcaaattgagttcgcgaaagttatgctttctggcgaagtcaatcgcgcagtaactgtgcgtggcttgcgtgttactaaaggcgcccgtgctgcaattgaagctgctggcggtaaaattgaggaataagtaacagatggctaaacaaccaggattagattttcaaagtgctaaaggcggattaggtgagttaaaacgcagacttttgtttgttattggagctctgattgttttccgtattggctcttttattccaatccctggtattgatgccactgtgcttgccaaattgctcgaacagcaaagaggcaccatcattgaaatgttcaacatgttctctggtggtgctttaagccgtgcttctatctttgcactgggtataatgccgtatatttctgcatctattattatccagttgctaactgtggttaacccccgtttagcagagattaagaaggaaggggaagctggtcgtcgtaagatcagtcagtacacccgttatggcacattagtgctggcaatattccagtcaataggtattgcaactgggttgccgaatatgcctggaatgcaagggctggttattaatccaggttttgcgttctatttcacggctgttgtaagtttggtcacaggaactatgttcttgatgtggctaggtgagcagattactgaacgaggtatcggcaatggtatttcaatcataatctttgctggtatcgttgcgggccttccgcctgcaattggtcacaccatcgagcaagctcggcaaggcgatctgcacttcctcctgttgctgttggttgcagtcttagtgtttgcagtaactttcttcgttgttttcatggagcgtggtcaacgtcgtatcgttgttaactatgccaagcgtcaacaaggtcgtagagtttttgcggcacaaagtacacatttaccgttgaaagtgaatatggctggggttatccctgcaatttttgcttccagtattattttgttccctggtactatagcctcttggtttggtagcggagcaaactggaattggttgacaactatttctatgtatttgcagccaggtcaaccgctttatgtgttattgtatgcatctgcaatcatcttcttctgtttcttctatacggctttggtgttctttagagca

SEQ ID NO: 1401 - DNA, 5098 bp, Xenorhabdus sp.; identical to SEQ ID NO: 1400
  CDS (411)..(725)

SEQ ID NO: 1402 - DNA, 5098 bp, Xenorhabdus sp.; identical to SEQ ID NO: 1400
  CDS (739)..(1278)

SEQ ID NO: 1403 - DNA, 5098 bp, Xenorhabdus sp.; identical to SEQ ID NO: 1400
  CDS (1291)..(1596)

SEQ ID NO: 1404 - DNA, 5098 bp, Xenorhabdus sp.; identical to SEQ ID NO: 1400
  CDS (1630)..(2022)

SEQ ID NO: 1405 - DNA, 5098 bp, Xenorhabdus sp.; identical to SEQ ID NO: 1400
  CDS (2037)..(2570)

SEQ ID NO: 1406 - DNA, 5098 bp, Xenorhabdus sp.; identical to SEQ ID NO: 1400
  CDS (2580)..(2933)

SEQ ID NO: 1407 - DNA, 5098 bp, Xenorhabdus sp.; identical to SEQ ID NO: 1400
  CDS (2948)..(3448)

SEQ ID NO: 1408 - DNA, 5098 bp, Xenorhabdus sp.; identical to SEQ ID NO: 1400
  CDS (3448)..(3633)

SEQ ID NO: 1409 - DNA, 5098 bp, Xenorhabdus sp.; identical to SEQ ID NO: 1400
  CDS (3637)..(4071)

SEQ ID NO: 1410 - DNA, 5098 bp, Xenorhabdus sp.; identical to SEQ ID NO: 1400
  CDS (4079)..(5098)

SEQ ID NO: 1411 - DNA, 6865 bp, Xenorhabdus sp.; identical to SEQ ID NO: 456
  CDS (4790)..(6190)

SEQ ID NO: 1412 - DNA, 6865 bp, Xenorhabdus sp.; identical to SEQ ID NO: 456
  CDS (3681)..(4778)

SEQ ID NO: 1413 - DNA, 6865 bp, Xenorhabdus sp.; identical to SEQ ID NO: 456
  CDS (1808)..(3655)

SEQ ID NO: 1414 - DNA, 6865 bp, Xenorhabdus sp.; identical to SEQ ID NO: 456
  CDS (3)..(1682)

SEQ ID NO: 1415 - DNA, 6350 bp, Xenorhabdus sp.; identical to SEQ ID NO: 130
  CDS (4016)..(4789)

SEQ ID NO: 1416 - DNA, 6350 bp, Xenorhabdus sp.; identical to SEQ ID NO: 130
  CDS (3418)..(3969)

SEQ ID NO: 1417 - DNA, 6350 bp, Xenorhabdus sp.; identical to SEQ ID NO: 130
  CDS (2004)..(2693)

SEQ ID NO: 1418 - DNA, 6350 bp, Xenorhabdus sp.; identical to SEQ ID NO: 130
  CDS (1)..(1929)

SEQ ID NO: 1419 - DNA, 8311 bp, Xenorhabdus sp.; identical to SEQ ID NO: 326
  CDS (7879)..(8310)

SEQ ID NO: 1420 - DNA, 6114 bp, Xenorhabdus sp.; identical to SEQ ID NO: 384
  CDS (329)..(748)

SEQ ID NO: 1421 - DNA, 6114 bp, Xenorhabdus sp.; identical to SEQ ID NO: 384
  CDS (835)..(1692)

SEQ ID NO: 1422 - DNA, 6114 bp, Xenorhabdus sp.; identical to SEQ ID NO: 384
  CDS (6005)..(6112)

SEQ ID NO: 1423 - DNA, 6114 bp, Xenorhabdus sp.
  CDS (2534)..(3631)
gaggaaaggcgatgatagccagaatgcaaagaggcaaggcagcccggaatttgcacggcaccgggaataaccactagggaaactggttcccgttgggatatgcccagcactgcttctggtttgtatccaccgcactgggggatacggctaacaatcaggttggtattctgattgaaggagaactgcggatagcggtgctggaacaggctatcaatacgctaatccagtcacatatttccctgcgcacggaaatactggattacgcaccaatgcagcggctttgtcagatgcaggagtttgatctgcccttgttggatttgtcagcttatgatgccgataagcaggaacaacgggtgattgaacatagccaaaaatgcctgcatacgccatttaatttcaaatcgcctccccatctgcgggcacagattttccgattggcagaatcaaaacatttattgtttttatgttttcctcacattgtggcggatggcggggccatacacctgtttgagcaacagctatggcggctttatgaacagggatgccacggaaaaaaactccagttaggtgtatcggatcagatgcaaattgatgaatgggtcgtttatgaacgggaaacccatcatcaacatggtcagcaagatttggctttctggcggcagcatctgaagggatatccttatgcgcgttttccggctcgctatctcaaccagaatactctgaccgatcacgagttttacctgccatttcctgaaaatagctatgacttgctggatacgctggctaaacagcaaaaagcaacattgcagatggtttttctgacactggttgctgaggtgatttatacaatgaccgggcagtcccgtttctcgctgaattcagtgctggaaggcagggagcagcccggaagtgaaacattgatggcacccatgctgcgtgttatgccggtgcctgtcaatctggacagcctaaaggatagaacaggaaaaaatgaggcgacgacaattactttattggaacaggtcagggaaaagattttatcggcctatgatcacatggaatgcccgtggagtttgccggttggtgtgctggctgaacagcgctggcatcgcagccccggtatttattctctggcaatccgtgcaggtagctggctatacagcaaggtattccggcgtgcccggctctacccgcattttttggctgactttttgtttatggaacccagaccaccgcaatctatcattcgccgagccagacgcagcgtagaaatttcacaaccaacgataaacattaatatattacaggatgtattcaaatctgagacgtcgggtagcaggctggatgggttacgcctgagcagctactggaaaagtgaacatcgggaacatcaggcgctgcccggtcaggccatttctacccaatgggaaaatgactctatcaatatctacgtcacactctctgaagatagcaaaccaatcatgcaaattaactgctgctgttttaatcaggcagggatggcctattttaccggattgctgaaggaaaaactatcttctctctcccaacttatcactgaatgagatacagagaatggctattcagaaacaagaagagaaagtgattgagtttaatcaggtcaggaaacattacaaagattatcaggcgttgaaaggcatttctctggacgtttatcgtggtgagttcattggtctgcttggcccgaatggtgcgggaaaaacgacactggttgaaatactggaagggctaaaaaaagcagattcaggctctgtcagggtattgggaaaaacatggcagcatgatgcaccttatctgcgccggcgtctcagcggagtcttacaggaaacgttatttatcaacaaactcagagtaaaagaagtgcttactctgttcggtagtttctatggctgttcacgtcaccgggtgcaggaagtgatggaactggttgaattaagcgaaaaacaccggacttatgtggaagggttatcaggaggccagcgccagcggctggctctgggtgttgccattatgaatgaaccggaaatcctgatactggatgagccgacaacagggcttgatccgcgtttcccgcatgatacatgggacattctgcgcaaactcaaccgggaaaagaaatccactatgctgctgacaacgcattatatggaggaagctgagtatttatgtgatcggatttgtatcatgaataaaggggaaattattgcacagggtggcatggatgaattactgaaaaaatactgtaacggcgatctgattgagctgacgacccggttccctgaacgtttgcaagaactgagcctacataatcgggtatcaagttatgaatacgatgaatcaaaaaacaggatccgtatgataattgacgattcagccagctttgtgactgagctttttgaatgtgccaaaaaagccggtaccgatatcaatgaactggtgatcagaaagaaaacgctggatgatttgttcatggtactggcagggagacgcttccatgaatagtgcactgatcaacctgatgaaaacacaattcaggcaatatatccgtgagccggaaattctgttctggtcatttggttttccgcttttgctggtctggctattagggctttcgttttcatcacaggatattcccgaaaggtatatcggcattgttctgccagcagaagttgcggaacaacaaaagatcaaacaatggggagagcagtttacagcgcatgaacacaccatctccggcattatcaatcaggatgaaatcaaacgaaataatctggtaaaggtcaaatatcatattaaatattatcctgaccgtgaggcggtgatcctcgggttgaaacggggtgatattcagatgttcattgaacagaatgcacagggaaaacagattcactatctcgatccacaggatggtgatgccctgctgacttactatttgctcaatcagcaagagggaaaaccaacagataaaaatcttttcattctggaaacaccggggctgcgttatctggattttctgataccggggttactggcgatggcaataatggaaacctgtttaattgctgtcggctgggcattggcagaaaaacgcctcgcgcgggtcacccgtcagatgtgtatcacgccaatgcgtaagaccacctttctgatggcgcatattctggcctgtcttatcatcaactttgttgaaatactgattatttatcagtttgctaagatctattttgatatagaaatacagggttcgttttacgccttcctgcttttactctttgccgggaatatctgtttttctggtgtggcagtgctggtagcatcccgggcacgcaaggctcagactgcgaatggcttactggaagtttcgattctgatacaggttttgttatcggggatctttttcagctataaacactttccacagtggatggtcaacatcgttgaatatctgccgttaaccattctggctgataatatgcgtaaagtatttattgaaggcggggaattattacaggttgtacccgcatctattgcactggttgtcattggtgtcatgacttttatattaggaatgcgaattttccgctggtattaatcataaccacccgtataacgggtggtttgctcttgccctataagggcttgttaccgactgcgcctaaatgacgctgctttctcttcgttcaagctaagtgtctttgctgctttggcctaccccttgaaggggtctacatgctctttactactcaatttatccgagattaaatccgacttttcttgctctctgatatacttttgaattgtcgcttcatttagccctaccgtactgacatagaacccttccgcccaaaactttctgttgccaaatttatattttaaattggcgtgtctatcaaagatcatcaacgaacttttacccttcaaatatcccataaagcttgaaacgcttagctttggtggaatactcaccaacatatgaacatgatctggcatgagatgaccttcgattatttccacacctttatacttacaaaggtctctgaggatctctcccacacttgaacgaatattattaaaaatcactttccgtctatatttcggcgaaaagacgatatggtatttacacagccactttgtatgcgctgagctttgtgctttaatgcccataaacacctttccttatttgagttacgaatattagcttgaacatctatatcgtaacggaaaggtgtttttcttggtataacctttgaactccacccgcaaagcgggtggttttatgtttaagacgctaacgcgacttaaactggctaaagccataaataaaaagggcgtataaatacgccctccaaaatcaatacataaatacaatcaatataattattattacttcacttcttttattttattaatcgctttttcatcgaaaatataatgcattccacagaactcacattccatgtcaattttgccatctttatgcagaatatcttgcagatcctcttctggtaaagttgccagagtatcggcacagcgttgatgagaacagccacaacggaattcaacctgctgaggttcatacagggtgacatcttcttcatggtaaagacgatacagaatctctttgatatccagtgtaaacagttcttcacctttgatggttgtcgtgagctgaaccagatggtcaagcatatcaacatcaccggtttgcgcgctcggcaagctctgcaataacataccacccgccgccattttgccatcctgtacacctgtgcggatgaacaagctggttggtaactgttctgactgcctgaagtaagcatccagacattccgccagcgtctctccttccagcgctacaaccccctgatagcgctcaccttctgttggcgtaactgtaatgaccatataaccattaccaaccatatcacgcaggctgctttcagcactgatatcaccatcaatacgcgcagtaccacgcatttgttgctggttattaccattgataaccgccagcttaactggcccgtcgccctgaatttgtacggtaatatcgccgttgaatttcagggtcgcggtcaacaggctggttgcgaccaacaattcacccagtaactgctgtacaggttgaggaaaatcgtgattttccaacatccgctggtaagtctcactgacagtaacaagttcacccctgacagaatgactttcaaataaaaagcggtgtaattggtcatgcttgatcataaatctctctcatttcactgaggcggttattccctttatcgttcaagccgccgctttgctggcagcacgaagcaactcgaatttagttaggaatgtcccgactcatttaattttgtattcttgaatttaatcagtgtacgccgctctttcttgtccgggcgacgatcaggatgtggcatcgttagagcattcattttacgggctaacgccattttttcccgtttaataatgctttcttccgtttcctgataaagctgctgggcttctgtagcaccacgcctttggctgctgagggccagaacaatgactgttctctcatcactaccctgacgcagtttaatgacagcattcaactcaaccagtttactcggctttccacgctgaccattataatggacttttcctccatcaatcatgtcacgcgcagtggaacgggttttataaaaacgggctgcccacagccacttatcaaggcgaacagcttgatcgttgtctgaatcaggcatgattgttctctctgattgttctgtttcaatattaacgggtaatgtgtaataacaatacctgatcggagatgacaaaaaacaggttcagggtagcatagcccaccgagttatcgctaactcattggtggttgtttcacattgaagcaactatcgtagtgctgttttatccgcagcaaacgctgcctgtttttttgttttttctggataaccagtatcccattgactatcagcgtcgccataattaccgccagaaaaaggcagctacccagataacgaatcagtgttatagaatcaggctcgatattcagtgtcccttagagcacaggca

SEQ ID NO: 1424 - DNA, 6114 bp, Xenorhabdus sp.; identical to SEQ ID NO: 1423
  CDS (1594)..(2541)

SEQ ID NO: 1425 - DNA, 6114 bp, Xenorhabdus sp.; identical to SEQ ID NO: 1423
  CDS (90)..(1583)

SEQ ID NO: 1426 - DNA, 541 bp, Xenorhabdus sp.
  CDS (121)..(540)
ttttaattaacactgggactgcttgaataattcagtaactataacatgcttattatatttaagaatatcgtatccttggagttgttccatggaacttaaccttgctgagtctgaatatcgatgtcacaatcgccaattgagctaaaaggcagtaattttacgctttcggtcgttcatttgcatgatgaccagccggatatcattcaaaaggccatacaggaaaaattggagcaagcgcccgaattcctgaaaaatgctccagttgttatcaatatatcccatctccctgctggtgcagaccttcttgctctacatcgtgtggttgaatctagcgggctacgtattgttggcatcagcggctgccaggatgaagaacagcggaaaattgtgttggaatcggaactccctttattaaaagaagggaaaagccagaaaattcgtactgaagaaaataagccacctgaacctattttcaaaaaaactcgtataattaatacgcctgttcgttcaggacaaagaatttatgctccgaatagtattt

SEQ ID NO: 1427 - DNA, 7693 bp, Xenorhabdus sp.
  CDS (67)..(1602)
ggggatattctggcgcagtaaccggggcaaccgcagcaaccgcagcaaccgcagcaaccgcagcaaagcctgttccatccatttttggtgcgtaatgatcaaccattacctaaaccaactacaccgatgccttctcttgatcttctggcagctccgccagcagaagaagaacctgtcgacatgttcgctctggaacagacttcacgtttaattgaatcccgcctgaacgattatcgggttaaagctgatgttgtcgggttttcgcctggccctgtgattacccggttcgagctggacctggctcccggagttaaagcttcgcgtatttccaatttatcccgtgatcttgctcgttcactttctgctgtagctgtcaggattgtagaggttataccgggactgccttacgtcggtctggaattacctaataaaaaacgtcagaccgtttatttgcgagaagtattggattgtgaaaaattccgtgataacccctctcctttaaccatcgttttagggaaagatatcggggggcagcctgttgtggctgatttagggaagatgccgcacctactggttgcagggacgaccggctcgggtaaatctgtgggggttaatgcgatgatcctcagcatcctgtataaagcaaaacccgaagatgttcgctttatcatgatcgacccgaaaatgcttgaactgtctgtttatgaaggcatacctcatctgttgactgaagtcgttacagatatgaaagatgctgctaacgcattgcgttggtgtgttaatgagatggaacgccgttataaactgatgtcagctttaggtgtacgcaatattgccggttataacgataagatcaaacaggctgagcaaatgggtcgtcctattcctgatccattctggaaacccggtgacagtatggatgtggaacatcctgttctgaaaaaagagccttatatcgttgtgatggtcgatgagtttgccgacctaatgatgacggtagggaaaaaagtagaagaattgattgcccgtctggcccagaaagcaagggcggcaggaatccatctggtactggcaacacagcgtccttctgttgacattattacaggtctgattaaggctaatattcctacgcgaattgcattcactgtttctagcaaaattgattcccgtactattcttgatcaggggggggcagaatcactgcttggtatgggggatatgctttatttagcgccaaattcatctattcctgtacgtgttcacggggctttcgtgcgtgatcaggaagttcatgaagttgttaatgactggaaggcacgtggtcgccctcaatatattgatagtattattaaagggggtgaggatggcgaaggcggtttgggattggatagtgatgaagagttggatcctctgttcgatcaggcggtagaatttgtgattgaaaaacgtcgggtgtctatttccggagtacaacgccaattccgcattggctataaccgggcagcccgtatcgtagaacagatggaagctcagcaaattgtcagtacgccgggtcataatggtaatcgtgaggttttagctcctccgccacacgaacactgataataatatgaattgaaggtactcacacatgaaaaaactgatgttgattggctgtctgatgatgggattgagcgtgagttctgcatgggctgatgctgcacacgatttgcaggaacgtttgagtaaggtaaatagctttcatgcaaattttacccagacagttaccagtaatgatggctcagcgattcaaaatggtgaaggtcaactttgggttaaacgccctaatttgtttaactggcatatgacatcacctgatgaaagtactttgatttctgacggtaagacattgtggttttataatccctttgtcgaacaagttacggccaattggctgaaagatgctacggggaatacgccatttatgttgattgcccgtaatgattcagctgattggaaacaatacaaagtgacccaaaatggtaatcattttgagttgacacctaagagtgctagcaggaatcttaagtatttttcaatcacagtgacaccagatggcactattcagaaatttactgctgttgaacaagatggacagaaaagtgcttatcagttgaaaggacagcagaacacgagtgtagatgcgtcaaaatttaaattcactctgccagaaggtgtgacactggacgatcaacgccagtgaggtttaattgaacaatctttctcttgatttttcacagaatgaatttcagccattggccgcaaaaatgcggccaatcacgttagatcactatattggtcagcaacatttattagcggaaggtaaacctctaccgagagctattcgtgcgggtcaactccattctatgattttatggggtccacccggcacgggaaagaccacattagctgaaattattggttattatgcgcaggcagatatagaacgtatttctgcagtgacttctggtatcaaagagatccgggagtccatcgaaaaagcacggcaaaatcgcaatgcaggtcgtagaacaattctatttgttgatgaagttcaccgatttaataaaatccagcaagatgcatttctgccacatattgaagatggcacaattacatttattggtgctacaaccgaaaatccctcctttgaattaaattcagctctgttatcacgggcacgagtctatttactgaaatccctttcgccagcagaaatagaacaagtgctgactcaggccataaatgataaagaacgtggtcttggcggacaaaatattgtgttgccggaagatacccggcagatactcgcagagctggtagccggtgatgcgcgccgttcactgaatctgctggaaatgatgtcagatatggcagaaattgatgcgaaaggccagcggactctgacaactgaacttctcaaagaagtcagtggggaaagaagtgcacgctttgataataaaggtgacagatattacgatttaatatcggccttacataaatcaatccgcggttcagcaccagatgctgcactttattggtatgcgcggatcattactgccggcggtgatccactttatgttgcccgacgtttactggcgatagcttctgaagatgttggtaatgcagatcctcgtgggatgcaggtagccattgctgcatgggattgtttcacgcgtgtcggagctgcagaaggagagcgggccattgcgcaggcgattgtttatcttgcctgtgcccctaaaagcaatgctgtttatactgcatttaaagcggctatggccgatgctcaggagaagcctgattatgatgtcccggctcatttgcgtaatgccccaacgaagctgatgaaagaaatgggatatggtgaagcataccgttatgcgcatgatgagcctaatgcttatgccgccggagagatttattttccgcctgagatgcaaaagacaacttattaccatccgactaacagaggattggaaggtaaaatcggtgaaaaattaaactggctaatggcacaggatcaaaatagtccaataaaacgctatcgttaatgtggctgatacggtaatgttggtatgttaaaaaacccctatcagtctgcttagtccagactgattttattactgttttaccaataacttttttctcaataacaaacaagcacaggaatagcatgctcgatccaaatatgctgcgtaatgagctagacgcagtcgccgaaaaactggctcgcaggggttatacccttgatgtggagacggtgcgtaaacaagaagagcgccgtaaagttttacaagttgaaactgaaaccctgcaagcagaacgtaattcccgatcgaaatctattggtgcagcgaaagcccgtggtgaggatattgaaccactgcgtcaggaagtaaaccaattgggagaaaagctggatacagcaaaagcggaattggaagcattacaggttgagatccgtgatcttgcactgagtatgccgaacattcctgatgattcttctcctgatggtaaagatgacagcgataacgtagagatcagccgttggggtgagccgcatcagtataattttgaagtgaaagatcacgtatcattgggtgaattgactgatggtcttgattttgcggcagcagtgaaattaaccggtgcgcgttttgtggtaatgaaaggtcagattgcccgtttgcaccgtgcattggcgcagtttatgctggatttgcatactgaacagcatggttatctggaaacctatgttccttatctggttaatcatgacactctgtttggcacaggtcagctgcctaaatttggtgaagatttattccacactaaagcgctggaagaagaatctggtagtaactatgcgctgatcccgactgcggaagtaccggtgactaacttagtgcgtggtgaaattctggatgagaaagatcttcctttgagaatgacagcacatacaccttgcttccgatctgaagcgggttcttatggtcgtgatactcgtggcctgatccgaatgcaccagtttgataaaatcgagctggttcagattgtccatcctgagaaatcaatggaagcactggaagaactgacgggacatgcggaaaaagtattgcagttactgaacctgccgtaccgtaagatgttgttgtgtaccggagatatgggcgcaggcgcgagaaaaacttacgatttggaagtttggttaccggctcaaaatacttatcgtgaaatttcatcttgctctaacacatgggattatcaggctcgccgtatgcaagctcgtttccgcagtaaagatgataagaaaacccagctggtacacacactgaatggctcaggtctggctgttggtcgaactctggttgcagtgatggaaaattatcagcaggaagatggccgaattgaagttccggcagtattacgtccttatatgaatggactggaatatattggttaataactgattattctaagtaataaaaaagcgcctagtgaggcgcttttttatttaatgacatatacgtttttagttggagaaaaataataaacactgaaatagcgcttattatagctattgaaaggaaaaactttagacaattaaatctgattgtgtttgtttttcttcctgtgcataaaaaatgctgcggtacgttgtataataaacaataaggctcatgggcaaggtgataatgaagcctaaaagtaaggggatcgctgatgcaaacatcataatacccatgagtaagaaaaacagaaaaccaccaaataaatttttctttacagcactcagactcattgacactgcgtcaccaaatttcagattattgataataatcagtgcaggggcaaaccagataaacgcaagagcaataatggcgaaaacacaaaacacaagacacgcccacataaatgaaggaatagcctgaatcaatagtaatgggtctggatttacctcttgagaggctaaaataaaatcgatcataccaaagcctgcaataaaaatagcagcaatgattccaagtgcacagatgcctaaataaagagcaccaacagcaaccagtgaacctaatttttctttaaatccgtaaaagagtaaatctatcttaaagtcccctgtagtcctctgtttttcagcagcaacgataacaccagcaacaagtaccggaccaaataaacccactaaaaaattaataaatggaataaaattcaatactgaaataatggcgaaatagactaatgtaaacagtatccactgtaatggatttgctttaaacattttccaggcatcgccaatccattcagttgcagcaccagcacctacagcctgaccttcacgaatgaaaatttctttttctttagttagggaaatattatcttccccagagttgagttcgatatcttgattattcatttttttcgctttatttgattgaatgataatttccaaattaaatattaactaaatccatcctggaagatttcgggataagttaggtagaattgttccatgaaagccattaatcaacaagggttaatttatttccgattaaaggattatcattctatttttcatttatattgaggaataagattatttaatattttaggtttaatgccctttatattacagtgggtatttactatataagttatttaacatcagtactatttcaagataatttcacatgaaactagtagttaggtaatcatataatatactttttcatttaaaatttatttaattttcagattaaatgtaattaaaacacctttatgatcagatggccatactccttttggtgttacaaatttatcatccgaagattctttaaccctttggcttttaactatgctactggaagggccgacaatgaacgcatctttcaccagtaactgtggggtaggatagtaaaaaatataatcaatccgatcacgttcatctgcttttggtgaccaggtaagcttattgattgcgacatctggattatttgctacccaagtaaaaccggggtatttaaccggatcagggtatttagcgcggtaggtatcaagatagccagcttcggctaataatttggtacttgtccaaggaacgatagatccttgattctattggtttttaattccacgtcgcttgcgacgcataaaattaagctgaacgatgcgaagcgggtgatttcgtactaataccccgctgcttgcggcggggacgtttatttagtaaataacctgatggccatagctcatcagaatctcttttactctttccatcgtctctttcgacggtggttttacgtcttccagcttatattcttcacccatagcaatccatttatgtttacccagttcatgatagggaagtaactcaattttttcgatattcttcatatccttggtgaactctcccagcatatggacagatttgtcatcatctgaccatccgggaacaacgacataacggacccacgttttttgattgcgttttgccagataacgggcaaattcgagtgttctatgattggaaacaccaaccagctcccgatgaatatcatcgttaaggtgtttaagatccagcatgactaaatcagtatcatccagtagctcatcaatcaccggctcatagcggcggacaaagccattagtgtctaaacaggtatggatcccctcggcgtggcaagccctgaaccagtcacgaacgaattcagcctgaaggattgcttccccaccagaagctgtcactccgcctccggaagcattcataaaatgacgataagttgtcgcttcttttataagttcttcgactgttaccgctttaccagtgtgagtgtcccatgtatcgcgattatggcaataaaggcaacgcatcaggcaaccctgaaaaaatacaataaaacgaatacccgggccatcaacggttccgcaggattcaaaagagtggatacggccaagtacgggcatgggaagatctctccaaaaactgacaggataataaaggccccggttgcaaaggggccttgaagtgtaagctgtttcatttcatcaaaattgtcttgttaaaacaatgacatttttgaggtaatacgcagcaggatgtttacattgtctgggtaaatgtacgggtaataacatcctgttgctgttcttt

SEQ ID NO: 1428 - DNA, 7693 bp, Xenorhabdus sp.; identical to SEQ ID NO: 1427
  CDS (1631)..(2242)

SEQ ID NO: 1429 - DNA, 7693 bp, Xenorhabdus sp.; identical to SEQ ID NO: 1427
  CDS (2250)..(3593)

SEQ ID NO: 1430 - DNA, 7693 bp, Xenorhabdus sp.; identical to SEQ ID NO: 1427
  CDS (3716)..(5005)

SEQ ID NO: 1431 - DNA, 7693 bp, Xenorhabdus sp.
  CDS (2164)..(2556)
aaagaacagcaacaggatgttattacccgtacatttacccagacaatgtaaacatcctgctgcgtattacctcaaaaatgtcattgttttaacaagacaattttgatgaaatgaaacagcttacacttcaaggcccctttgcaaccggggcctttattatcctgtcagtttttggagagatcttcccatgcccgtacttggccgtatccactcttttgaatcctgcggaaccgttgatggcccgggtattcgttttattgtattttttcagggttgcctgatgcgttgcctttattgccataatcgcgatacatgggacactcacactggtaaagcggtaacagtcgaagaacttataaaagaagcgacaacttatcgtcattttatgaatgcttccggaggcggagtgacagcttctggtggggaagcaatccttcaggctgaattcgttcgtgactggttcagggcttgccacgccgaggggatccatacctgtttagacactaatggctttgtccgccgctatgagccggtgattgatgagctactggatgatactgatttagtcatgctggatcttaaacaccttaacgatgatattcatcgggagctggttggtgtttccaatcatagaacactcgaatttgcccgttatctggcaaaacgcaatcaaaaaacgtgggtccgttatgtcgttgttcccggatggtcagatgatgacaaatctgtccatatgctgggagagttcaccaaggatatgaagaatatcgaaaaaattgagttacttccctatcatgaactgggtaaacataaatggattgctatgggtgaagaatataagctggaagacgtaaaaccaccgtcgaaagagacgatggaaagagtaaaagagattctgatgagctatggccatcaggttatttactaaataaacgtccccgccgcaagcagcggggtattagtacgaaatcacccgcttcgcatcgttcagcttaattttatgcgtcgcaagcgacgtggaattaaaaaccaatagaatcaaggatctatcgttccttggacaagtaccaaattattagccgaagctggctatcttgatacctaccgcgctaaataccctgatccggttaaataccccggttttacttgggtagcaaataatccagatgtcgcaatcaataagcttacctggtcaccaaaagcagatgaacgtgatcggattgattatattttttactatcctaccccacagttactggtgaaagatgcgttcattgtcggcccttccagtagcatagttaaaagccaaagggttaaagaatcttcggatgataaatttgtaacaccaaaaggagtatggccatctgatcataaaggtgttttaattacatttaatctgaaaattaaataaattttaaatgaaaaagtatattatatgattacctaactactagtttcatgtgaaattatcttgaaatagtactgatgttaaataacttatatagtaaatacccactgtaatataaagggcattaaacctaaaatattaaataatcttattcctcaatataaatgaaaaatagaatgataatcctttaatcggaaataaattaacccttgttgattaatggctttcatggaacaattctacctaacttatcccgaaatcttccaggatggatttagttaatatttaatttggaaattatcattcaatcaaataaagcgaaaaaaatgaataatcaagatatcgaactcaactctggggaagataatatttccctaactaaagaaaaagaaattttcattcgtgaaggtcaggctgtaggtgctggtgctgcaactgaatggattggcgatgcctggaaaatgtttaaagcaaatccattacagtggatactgtttacattagtctatttcgccattatttcagtattgaattttattccatttattaattttttagtgggtttatttggtccggtacttgttgctggtgttatcgttgctgctgaaaaacagaggactacaggggactttaagatagatttactcttttacggatttaaagaaaaattaggttcactggttgctgttggtgctctttatttaggcatctgtgcacttggaatcattgctgctatttttattgcaggctttggtatgatcgattttattttagcctctcaagaggtaaatccagacccattactattgattcaggctattccttcatttatgtgggcgtgtcttgtgttttgtgttttcgccattattgctcttgcgtttatctggtttgcccctgcactgattattatcaataatctgaaatttggtgacgcagtgtcaatgagtctgagtgctgtaaagaaaaatttatttggtggttttctgtttttcttactcatgggtattatgatgtttgcatcagcgatccccttacttttaggcttcattatcaccttgcccatgagccttattgtttattatacaacgtaccgcagcattttttatgcacaggaagaaaaacaaacacaatcagatttaattgtctaaagtttttcctttcaatagctataataagcgctatttcagtgtttattatttttctccaactaaaaacgtatatgtcattaaataaaaaagcgcctcactaggcgcttttttattacttagaataatcagttattaaccaatatattccagtccattcatataaggacgtaatactgccggaacttcaattcggccatcttcctgctgataattttccatcactgcaaccagagttcgaccaacagccagacctgagccattcagtgtgtgtaccagctgggttttcttatcatctttactgcggaaacgagcttgcatacggcgagcctgataatcccatgtgttagagcaagatgaaatttcacgataagtattttgagccggtaaccaaacttccaaatcgtaagtttttctcgcgcctgcgcccatatctccggtacacaacaacatcttacggtacggcaggttcagtaactgcaatactttttccgcatgtcccgtcagttcttccagtgcttccattgatttctcaggatggacaatctgaaccagctcgattttatcaaactggtgcattcggatcaggccacgagtatcacgaccataagaacccgcttcagatcggaagcaaggtgtatgtgctgtcattctcaaaggaagatctttctcatccagaatttcaccacgcactaagttagtcaccggtacttccgcagtcgggatcagcgcatagttactaccagattcttcttccagcgctttagtgtggaataaatcttcaccaaatttaggcagctgacctgtgccaaacagagtgtcatgattaaccagataaggaacataggtttccagataaccatgctgttcagtatgcaaatccagcataaactgcgccaatgcacggtgcaaacgggcaatctgacctttcattaccacaaaacgcgcaccggttaatttcactgctgccgcaaaatcaagaccatcagtcaattcacccaatgatacgtgatctttcacttcaaaattatactgatgcggctcaccccaacggctgatctctacgttatcgctgtcatctttaccatcaggagaagaatcatcaggaatgttcggcatactcagtgcaagatcacggatctcaacctgtaatgcttccaattccgcttttgctgtatccagcttttctcccaattggtttacttcctgacgcagtggttcaatatcctcaccacgggctttcgctgcaccaatagatttcgatcgggaattacgttctgcttgcagggtttcagtttcaacttgtaaaactttacggcgctcttcttgtttacgcaccgtctccacatcaagggtataacccctgcgagccagtttttcggcgactgcgtctagctcattacgcagcatatttggatcgagcatgctattcctgtgcttgtttgttattgagaaaaaagttattggtaaaacagtaataaaatcagtctggactaagcagactgataggggttttttaacataccaacattaccgtatcagccacattaacgatagcgttttattggactattttgatcctgtgccattagccagtttaatttttcaccgattttaccttccaatcctctgttagtcggatggtaataagttgtcttttgcatctcaggcggaaaataaatctctccggcggcataagcattaggctcatcatgcgcataacggtatgcttcaccatatcccatttctttcatcagcttcgttggggcattacgcaaatgagccgggacatcataatcaggcttctcctgagcatcggccatagccgctttaaatgcagtataaacagcattgcttttaggggcacaggcaagataaacaatcgcctgcgcaatggcccgctctccttctgcagctccgacacgcgtgaaacaatcccatgcagcaatggctacctgcatcccacgaggatctgcattaccaacatcttcagaagctatcgccagtaaacgtcgggcaacataaagtggatcaccgccggcagtaatgatccgcgcataccaataaagtgcagcatctggtgctgaaccgcggattgatttatgtaaggccgatattaaatcgtaatatctgtcacctttattatcaaagcgtgcacttctttccccactgacttctttgagaagttcagttgtcagagtccgctggcctttcgcatcaatttctgccatatctgacatcatttccagcagattcagtgaacggcgcgcatcaccggctaccagctctgcgagtatctgccgggtatcttccggcaacacaatattttgtccgccaagaccacgttctttatcatttatggcctgagtcagcacttgttctatttctgctggcgaaagggatttcagtaaatagactcgtgcccgtgataacagagctgaatttaattcaaaggagggattttcggttgtagcaccaataaatgtaattgtgccatcttcaatatgtggcagaaatgcatcttgctggattttattaaatcggtgaacttcatcaacaaatagaattgttctacgacctgcattgcgattttgccgtgctttttcgatggactcccggatctctttgataccagaagtcactgcagaaatacgttctatatctgcctgcgcataataaccaataatttcagctaatgtggtctttcccgtgccgggtggaccccataaaatcatagaatggagttgacccgcacgaatagctctcggtagaggtttaccttccgctaataaatgttgctgaccaatatagtgatctaacgtgattggccgcatttttgcggccaatggctgaaattcattctgtgaaaaatcaagagaaagattgttcaattaaacctcactggcgttgatcgtccagtgtcacaccttctggcagagtgaatttaaattttgacgcatctacactcgtgttctgctgtcctttcaactgataagcacttttctgtccatcttgttcaacagcagtaaatttctgaatagtgccatctggtgtcactgtgattgaaaaatacttaagattcctgctagcactcttaggtgtcaactcaaaatgattaccattttgggtcactttgtattgtttccaatcagctgaatcattacgggcaatcaacataaatggcgtattccccgtagcatctttcagccaattggccgtaacttgttcgacaaagggattataaaaccacaatgtcttaccgtcagaaatcaaagtactttcatcaggtgatgtcatatgccagttaaacaaattagggcgtttaacccaaagttgaccttcaccattttgaatcgctgagccatcattactggtaactgtctgggtaaaatttgcatgaaagctatttaccttactcaaacgttcctgcaaatcgtgtgcagcatcagcccatgcagaactcacgctcaatcccatcatcagacagccaatcaacatcagttttttcatgtgtgagtaccttcaattcatattattatcagtgttcgtgtggcggaggagctaaaacctcacgattaccattatgacccggcgtactgacaatttgctgagcttccatctgttctacgatacgggctgcccggttatagccaatgcggaattggcgttgtactccggaaatagacacccgacgtttttcaatcacaaattctaccgcctgatcgaacagaggatccaactcttcatcactatccaatcccaaaccgccttcgccatcctcaccccctttaataatactatcaatatattgagggcgaccacgtgccttccagtcattaacaacttcatgaacttcctgatcacgcacgaaagccccgtgaacacgtacaggaatagatgaatttggcgctaaataaagcatatcccccataccaagcagtgattctgcccccccctgatcaagaatagtacgggaatcaattttgctagaaacagtgaatgcaattcgcgtaggaatattagccttaatcagacctgtaataatgtcaacagaaggacgctgtgttgccagtaccagatggattcctgccgcccttgctttctgggccagacgggcaatcaattcttctacttttttccctaccgtcatcattaggtcggcaaactcatcgaccatcacaacgatataaggctcttttttcagaacaggatgttccacatccatactgtcaccgggtttccagaatggatcaggaataggacgacccatttgctcagcctgtttgatcttatcgttataaccggcaatattgcgtacacctaaagctgacatcagtttataacggcgttccatctcattaacacaccaacgcaatgcgttagcagcatctttcatatctgtaacgacttcagtcaacagatgaggtatgccttcataaacagacagttcaagcattttcgggtcgatcatgataaagcgaacatcttcgggttttgctttatacaggatgctgaggatcatcgcattaacccccacagatttacccgagccggtcgtccctgcaaccagtaggtgcggcatcttccctaaatcagccacaacaggctgccccccgatatctttccctaaaacgatggttaaaggagaggggttatcacggaatttttcacaatccaatacttctcgcaaataaacggtctgacgttttttattaggtaattccagaccgacgtaaggcagtcccggtataacctctacaatcctgacagctacagcagaaagtgaacgagcaagatcacgggataaattggaaatacgcgaagctttaactccgggagccaggtccagctcgaaccgggtaatcacagggccaggcgaaaacccgacaacatcagctttaacccgataatcgttcaggcgggattcaattaaacgtgaagtctgttccagagcgaacatgtcgacaggttcttcttctgctggcggagctgccagaagatcaagagaaggcatcggtgtagttggtttaggtaatggttgatcattacgcaccaaaaatggatggaacaggctttgctgcggttgctgcggttgctgcggttgctgcggttgccccggttactgcgccagaatatcccc

SEQ ID NO: 1432 - DNA, 7693 bp, Xenorhabdus sp.; identical to SEQ ID NO: 1431
  CDS (188)..(928)

SEQ ID NO: 1433 - DNA, 8706 bp, Xenorhabdus sp.
  CDS (62)..(664)
taaagttccttatgctgtaacccgtttccacaaacacctacagaatttttaggagtcaattatggttttagtaacccgccaagcccctgattttacagcttctgcggttctcggtaacggcgaaatcgttaataacttcaacctgaaaaaacacctgaatggtcgtccagctgttatcttcttctggccaatggacttcactttcgtttgtccttctgagctgattgctttcgaccatcgttatgaagaattccaaaaacgtggttttgaagttattggcgtttctttcgactctgagttcgttcacaacgcatggcgtaaaactccaatcagcgaaggcggcattggcgaagttaaatacccaatggttgctgacatcaaacgtgacatcatgaaagcatacggcattgagcattcagaagcgggtgttgctctgcgtggttctttcctgatcgataaaaacggcgttgttcgtcatcaggttgttaacgacttgccactgggccgtaacattgacgaaatgctgcgtatggttgacgcgctgcaattccacgaagaacacggcgaagtttgccctgcacagtgggcaaaaggccaggaaggtatgggcgcttctcctgaaggcgtagcaaaatacctgactaaaaatgctgacaaactgtaatcttcgtcagtattcaatcctttaatagcatcacattgttaatggattttataaaccagccgcattgtcggctggttttttcttatccactgtctttcaggctgcctctttattagttgcactcacaccccacaatcacatagtttgtttacttaccgcacgaaataacttcagatttgaagtatgcaaatgaagattcattctgaaatattccgaattattgactgacacatagaaaatcatctttcaaaaatcctgagcttccgataatgttacattacaaataattaacataaccttataaccttttgggttttcccctacagcccaaaaatcaggaggaaaatatgtccaaaacatggaaaattccgttcatcgtcgcctcactattcgtctcatcctctctttacgcagccactggacttgcagttgaagccaagcagggcatggttgtcagtgcgcaacatctggcatcacaggtgggtgttgatattctcaaaatgggcggtaacgctattgatgccgctgttgctgtaggctatgcagaagcagtcgtcaatccctgctgcggtaatattggtggtggtggtttcatgaccattcatctggcagatggtacagataaatttattaatttccgtgaaacagcacctgcggcagccagtgccgatatgtatctggacaaagacggcaatgttatcaaaggggccagcctgtatggatactacgctgctggtgtaccgggaacagttatggggctggataccgcgctgcaaaaatacggtacattaacccgcgaacaagtaatggctccggccattaagctggcgcgtgaaggttataccctgacccgtggtgataccgatattatggataccacagtcaaacgttttgctcaggatccggaagctgcccgaatttttctgcgtaaagatggcactccattccagcccggagacaaattaattcagactgatttggccaacacgctggaaatgattgccaaacaagggccagatgttttctatcatggcaaaattcctcaaatcattgaagaaacctcaaagaaatcaggtgggattatcacagcagctgattttgccaattatactattaccgaaacaacgcccgttacctgtagctatcgcggatataaatttatctctgcgcctccacccagttccggcggggtcacactgtgtgaaatactgaacattgttgaaggctatgatctgaaatcgatggggttcaactcagccgcctatattcacaccctgactgaagccatgcgccatgcttacatagatagaaacacttacctcggtgatcctgcatttattaaaaacccgcttgaacgcttgttaagcaaaagttatgcagaatctatccgtaaagagatccagccaaacaaagcgacaccatccaaactggtgcaaccgggtattggtccgcatgaaaaaccggaaacaacgcattattctgtggtagataaagatggtaacgcggtatcgacaacttataccattaatgggcgctttggcgctgtcgttattgcaccgggaaccggctttttcctcaatgatgaaatggatgatttcaccacgaaaattggcgcgaagaacatgtatggtctagttcagggagcaaccaattccattgcccccggtaagcgcccactatcatcaatgagcccgacattagtgaccaaagataataaaatctttctggttttaggttctccgggtggttcaagaattatctccattactttacaggccgcgctgaacatcattgactttgatatgccgccacaagaagccgtaaacagcccacgtattcatcaccaatggctgccagatgaagtctattatgagcagcgtggtctttcgaaagataccttaaatctgctggaaaaaatgggctataaaatggtggagcaaactccatggggtgcaactgaattaatcatgataggtttgccgggtgcagccggagtttctccggtcaactcatcaggcaatgactctgctgtttcaggcaaagttcgcgaaggatatatctatggcgctaatgatgtacggcgaccagccggtgcagccatcggctattaagaacaataccttcagctaaaaaacacaaatcataaccacccgtataacgggtggtttgctcttgccctataagggcttgttaccgactgcgcctaaatgacgctgctttctcttcgttcaagctaagtgtctttgctgctttggcctaccccttgaaggggtctacatgctctttactactcaatttatccgagattaaatccgacttttcttgctctctgatatatttttgaattgtcgcttcatttagccctaccgtactgacatagaacccttccgcccaaaactttctgttgccaaatttatattttaaattggcgtgtctatcaaagatcatcaacgaacttttacccttcaaatatcccataaagcttgaaacgcttagctttggtggaatactcaccaacatatgaacatgatctggcatgagatgaccttcgattatttccacacctttatacttacaaaggtctctgaggatctctcccacacttgaacgaatattattaaaaatcactttccgtctatatttcggcgaaaaagacgatatggtatttacacagccactttgtatgcgctgagctttgtgctttaatgcccataaacacctttccttatttgagttacgaatattagcttgaacatctatatcgtaacggaaaggtgtttttcttggtataacctttgaactccacccgcaaagcgggtggttttatgtttaagacgctaacgcgacttaaactggctaaagccataaaagcaggatctgaccgctaacgcggccagatttaataacattttgttattcaaattcattccatgagcgcccatctcgggtgatcatcgcaatagaggcaaccggtccccaggttcctgcctgataaggttttggaggttcgttatccgccgcccatgcttccataatggaatcaacccatttccaggcttcttccacttcatcccgacggacgaacagtgcctgaataccgcgcattgcttccagcaataatcgctcataagcatcagcaaggtgggtttgattgaatgtttcagagaagctcaaatcaagttttgttgtctgtaaacggtgcttgtgctccagccccggagctttattcagcacttcaatatcaataccttcatccggttgtaaacggatagtcagcttattttggggtaactgctggtaggaaccagcaaacagatttaatgcaggctctttaaaataaactacaacctcagagcatttcgccggtaagcgtttacccgttctcagatagaaaggcacacccgaccaacgccagtcatcaatatcgacacgaaccgaaacaaaagattccgttttgctggccttgtttgccccttcttcttccagataacccggaacctttttaccatgcacaaatccggcggtatattgcccgcgaactgttttttcccgtacattagtatggtcaatccggcgtaatgaacgaagcactttaactttttcatcacgaatacgatctgccgacaaatcagacggaggtgacatagcaatcatggtcaggatttgcagcaaatgattctggatcatatcccgcatctgaccggcctgatcgaaatatccccagcgcccttcgataccaacctcttcagcaactgtaatttgcacatggtctatcgtgcgatgatcccagttattaacaaacaaagagttagcaaaacgtaacgccagcaggttcagtacggtttctttacccagataatggtcgatgcggtaaatctgattttcactaaaatattttgctacttcatcattgatagcacgagaagaggcaagatctgtacccaatggtttctccatcacgacacgattgggttctttattcaatcccgcaacacccaacccatggcagacagagccaaaggtgtttggaggcatagcaaagtaatgaatggcaggtaatttatcctgattgagaattttcgccagtcgggagaaatgttccgtctcgttgacatccagattacaaaattccagacgcgaactgagtttcttccataattccgggtccagtttttcggacataaatgttgttaatgcttcttcaaccaactttatataggcttttttatcccagtcagcacgaccaaccccgataatacgggtatccggatggatataacccgctttctccagctgataaagggaaggcattaatttccggcgtgctaagtctccttttgccccaaaaatcaccaaatcacaagcctgagctgtagacgtcaccgccatgttgcatctcctcaattacgggatattgtaatttttttacagaaattgcagataatgtactcttttggttatatgcagtaaatacttcattcctcgatcatggtggcctgcatgaatcttactacctgactcattgtgtataaatttttacatttcatcttgtattatgaatgatatttgcagcgaaaagtggtaatcaggtgaaaatttactacgaataagaagtaatcttaccaagttgaaagttagatgtttgtcatattttcatgaaaaatatcaagttattgacttttacctctgccagctttcaataacaagtagtatattttcacgaaaattacatagatttcccctgttaatgaaatcgttaaaaccgaggtttaactgcgtcttatgaacacactggaacggctccaaaatagccttgatgttttgagtaagtctgagaaaaaggttgcgcaggtcattctcgattcacccaatactgccattcattcaagtatcgctactctggcaaaaatggcgaatgtcagtgaacctacggttaatcgtttttgccgtcgcttgaataccaaaggctttcctgattttaaactgcatttggcacaaagtctggcgaatggcactccttatgtaaatcgcaatgtggaagaaagtgacagcgtcacctcttataccaataaaatttttgaatcggtgatggctaatctggaaacagtcaagagtaatctggatatcacaaccattaaccgtgctgttgaccttctgacacaggcaagaaaactctctttttttggtctgggcgcttctgctgctgtcgcacacgatgccatgaacaaatttttccgctttaacattcccgtcagctattttgatgatgtcgttatgcagcgaatgagctgcatcaacagtactgaaggtgacgttgtcgtgctgatttctcatacaggacggactaaaaatctggtagaactggccagacttgcccgtgaaaatgacgcaacagtaattgctatcacttcaacagattcactgctggcacgggaagccactctctctattctgctggatgttcccgaagataccgatatttatatgccaatggtttcccggattgctcagcttaccatcattgatgtgctggcaacgggttttacattgcgcagaggttcaaaattcagagataacttgaagaaagtcaaggaagcattacgcaattcgcggtttgataagcacgactaaagcataaaaatagactgtgtttttgttcactatttatcaactctccagcctgatagcataatggaaagtttatccccgtcaatatcatgcatattacacatatttcggggttgataatcaaaaaagttgtatggttatctcacggtaatcaagcatccatactttacaggtcaacggagtaatacatgtccagacggctcagaagaactaaaatcgtcactacacttggcccagctacagatcgtgacaacaatttagagaaagtgatcaatgcgggagccaatgttgtccgccttaatttttctcatggtaccgcagaagatcatatcctgcgcgcaaacaaagtacgggaaatcgcagctcggctgggttgccatgtcgctatccttggtgatctacaaggccctaaaatacgtatatcgacgtttaaagaagggaaaatattcctcaatatcggggataaattcctgcttgatgccaatttaggcaaaggagaaggcgataaagaaaaagtcgggattgattacaaaggactgccatcagatgttacaaccggcaatattctgttgctggatgatggacgagttcaattaaaagtacttgatgtgcagggcatgaaagtatttacagaagtgactgtaggcggcccgctttccaataacaaaggcattaataaacagggtggcggcttatctgccgaagcactgacagaaaaagacaaagaagacatcatcactgctgcgaaaatcggcgttgattatctcgcggtctctttcccccgctctggtgaagatctgaattatgcccgccggttggctcgggacgctggctgcgaaacacaaattgtagccaaagtagaacgagctgaagcggtcagcagtgatgagattatcgatgaaattattctggcatctgatgtagtcatggtagcccgtggcgatttgggtgttgaaatcggcgaccctgaattagttggagttcagaaaaaacttattcgtcgtgcccgtcaactgaatcgtgtcgtaatcacagcgactcagatgatggaatcgatgattaccaacccaatgccaacacgggcggaagtgatggatgttgccaatgccgtccttgatggtactgatgcggttatgctatctgcggaaacagcagcgggtcaatatccagcggaaactgttgcggcaatggctcaagtctgcctgggcgcagaaaaaatgccggggatcaatgcatccaagcatcggatggatatcacatttgacagtattgaagaagctatctcaatgtctgccatgtatgcagccaatcatctgaaaggggtcaaggccattatcgccatgaccgaatcaggtcgtacagcacgtatgatgtcacgtatcagctccggtctgcctattttctctatgtcacgccatgaatcaacgctgaaccgtgccggattataccgtggtgtgacaccggtttattgtagcagccacattgatggtattgccgcggcgagtgaagcaatcagccgtctgcgtgacagaggttacttagcctctggcgatttggtgctggtcactcagggggatcagatgggaactatcggcagtaccaatacttgccgagtgcttgaagtcgaataacgcaaatacttattctgcgcgatctcaaaaacgcgcagaataacaaaataatattaattctgttcagcgactaatatcgcctgtgtatccggttccagtgccttaaatatatgctcctgatctgccggataacagatgtaatcgccttcacttaattcttccggggcttctgttagccccaccaaagcccgtcctttcgtgacaataatatgttctaccgaaccggctggatgcggatctgaaaggcgatctgctcccggctgagtcatcagcaaatagatatcacgacgggcgcccggtggacaggttgccaataaagttgcctgatagtttgcctgttcagccgtgactttagttccttcaccacgtcgaatcacttgcgttttattactttgaggttccagcaaacgggcaaaaggaatatttaatgccacacacaatgcccaaagcgtttcaagactgggattcccatttcctgcttccagctgtgaaagtgtagatttggcaatacctgcgcgccgcgctacttccgtcagtgaaagaccgcttcgtgcacgttcacgaactaaactcttcgcaattatgctgattggctgtgtcattattgctgctcctttgttcattataatgaacaaaatgttcatcttgacctgcgttttaataatgttcattataatgtaattttgttcgatatgggtaaatgtatatgttcacacaccatttttcctgtttgtcaggagagataaaaaaagcaatatttctggtttatctgctttagagcac

SEQ ID NO: 1434 - DNA, 8706 bp, Xenorhabdus sp.; identical to SEQ ID NO: 1433
  CDS (1000)..(2775)

SEQ ID NO: 1435 - DNA, 8706 bp, Xenorhabdus sp.; identical to SEQ ID NO: 1433
  CDS (5447)..(6295)

SEQ ID NO: 1436 - DNA, 8706 bp, Xenorhabdus sp.; identical to SEQ ID NO: 1433
  CDS (6481)..(7923)

SEQ ID NO: 1437 - DNA, 8706 bp, Xenorhabdus sp.
  CDS (5442)..(5786)
gtgctctaaagcagataaaccagaaatattgctttttttatctctcctgacaaacaggaaaaatggtgtgtgaacatatacatttacccatatcgaacaaaattacattataatgaacattattaaaacgcaggtcaagatgaacattttgttcattataatgaacaaaggagcagcaataatgacacagccaatcagcataattgcgaagagtttagttcgtgaacgtgcacgaagcggtctttcactgacggaagtagcgcggcgcgcaggtattgccaaatctacactttcacagctggaagcaggaaatgggaatcccagtcttgaaacgctttgggcattgtgtgtggcattaaatattccttttgcccgtttgctggaacctcaaagtaataaaacgcaagtgattcgacgtggtgaaggaactaaagtcacggctgaacaggcaaactatcaggcaactttattggcaacctgtccaccgggcgcccgtcgtgatatctatttgctgatgactcagccgggagcagatcgcctttcagatccgcatccagccggttcggtagaacatattattgtcacgaaaggacgggctttggtggggctaacagaagccccggaagaattaagtgaaggcgattacatctgttatccggcagatcaggagcatatatttaaggcactggaaccggatacacaggcgatattagtcgctgaacagaattaatattattttgttattctgcgcgtttttgagatcgcgcagaataagtatttgcgttattcgacttcaagcactcggcaagtattggtactgccgatagttcccatctgatccccctgagtgaccagcaccaaatcgccagaggctaagtaacctctgtcacgcagacggctgattgcttcactcgccgcggcaataccatcaatgtggctgctacaataaaccggtgtcacaccacggtataatccggcacggttcagcgttgattcatggcgtgacatagagaaaataggcagaccggagctgatacgtgacatcatacgtgctgtacgacctgattcggtcatggcgataatggccttgacccctttcagatgattggctgcatacatggcagacattgagatagcttcttcaatactgtcaaatgtgatatccatccgatgcttggatgcattgatccccggcattttttctgcgcccaggcagacttgagccattgccgcaacagtttccgctggatattgacccgctgctgtttccgcagatagcataaccgcatcagtaccatcaaggacggcattggcaacatccatcacttccgcccgtgttggcattgggttggtaatcatcgattccatcatctgagtcgctgtgattacgacacgattcagttgacgggcacgacgaataagttttttctgaactccaactaattcagggtcgccgatttcaacacccaaatcgccacgggctaccatgactacatcagatgccagaataatttcatcgataatctcatcactgctgaccgcttcagctcgttctactttggctacaatttgtgtttcgcagccagcgtcccgagccaaccggcgggcataattcagatcttcaccagagcgggggaaagagaccgcgagataatcaacgccgattttcgcagcagtgatgatgtcttctttgtctttttctgtcagtgcttcggcagataagccgccaccctgtttattaatgcctttgttattggaaagcgggccgcctacagtcacttctgtaaatactttcatgccctgcacatcaagtacttttaattgaactcgtccatcatccagcaacagaatattgccggttgtaacatctgatggcagtcctttgtaatcaatcccgactttttctttatcgccttctcctttgcctaaattggcatcaagcaggaatttatccccgatattgaggaatattttcccttctttaaacgtcgatatacgtattttagggccttgtagatcaccaaggatagcgacatggcaacccagccgagctgcgatttcccgtactttgtttgcgcgcaggatatgatcttctgcggtaccatgagaaaaattaaggcggacaacattggctcccgcattgatcactttctctaaattgttgtcacgatctgtagctgggccaagtgtagtgacgattttagttcttctgagccgtctggacatgtattactccgttgacctgtaaagtatggatgcttgattaccgtgagataaccatacaacttttttgattatcaaccccgaaatatgtgtaatatgcatgatattgacggggataaactttccattatgctatcaggctggagagttgataaatagtgaacaaaaacacagtctatttttatgctttagtcgtgcttatcaaaccgcgaattgcgtaatgcttccttgactttcttcaagttatctctgaattttgaacctctgcgcaatgtaaaacccgttgccagcacatcaatgatggtaagctgagcaatccgggaaaccattggcatataaatatcggtatcttcgggaacatccagcagaatagagagagtggcttcccgtgccagcagtgaatctgttgaagtgatagcaattactgttgcgtcattttcacgggcaagtctggccagttctaccagatttttagtccgtcctgtatgagaaatcagcacgacaacgtcaccttcagtactgttgatgcagctcattcgctgcataacgacatcatcaaaatagctgacgggaatgttaaagcggaaaaatttgttcatggcatcgtgtgcgacagcagcagaagcgcccagaccaaaaaaagagagttttcttgcctgtgtcagaaggtcaacagcacggttaatggttgtgatatccagattactcttgactgtttccagattagccatcaccgattcaaaaattttattggtataagaggtgacgctgtcactttcttccacattgcgatttacataaggagtgccattcgccagactttgtgccaaatgcagtttaaaatcaggaaagcctttggtattcaagcgacggcaaaaacgattaaccgtaggttcactgacattcgccatttttgccagagtagcgatacttgaatgaatggcagtattgggtgaatcgagaatgacctgcgcaacctttttctcagacttactcaaaacatcaaggctattttggagccgttccagtgtgttcataagacgcagttaaacctcggttttaacgatttcattaacaggggaaatctatgtaattttcgtgaaaatatactacttgttattgaaagctggcagaggtaaaagtcaataacttgatatttttcatgaaaatatgacaaacatctaactttcaacttggtaagattacttcttattcgtagtaaattttcacctgattaccacttttcgctgcaaatatcattcataatacaagatgaaatgtaaaaatttatacacaatgagtcaggtagtaagattcatgcaggccaccatgatcgaggaatgaagtatttactgcatataaccaaaagagtacattatctgcaatttctgtaaaaaaattacaatatcccgtaattgaggagatgcaacatggcggtgacgtctacagctcaggcttgtgatttggtgatttttggggcaaaaggagacttagcacgccggaaattaatgccttccctttatcagctggagaaagcgggttatatccatccggatacccgtattatcggggttggtcgtgctgactgggataaaaaagcctatataaagttggttgaagaagcattaacaacatttatgtccgaaaaactggacccggaattatggaagaaactcagttcgcgtctggaattttgtaatctggatgtcaacgagacggaacatttctcccgactggcgaaaattctcaatcaggataaattacctgccattcattactttgctatgcctccaaacacctttggctctgtctgccatgggttgggtgttgcgggattgaataaagaacccaatcgtgtcgtgatggagaaaccattgggtacagatcttgcctcttctcgtgctatcaatgatgaagtagcaaaatattttagtgaaaatcagatttaccgcatcgaccattatctgggtaaagaaaccgtactgaacctgctggcgttacgttttgctaactctttgtttgttaataactgggatcatcgcacgatagaccatgtgcaaattacagttgctgaagaggttggtatcgaagggcgctggggatatttcgatcaggccggtcagatgcgggatatgatccagaatcatttgctgcaaatcctgaccatgattgctatgtcacctccgtctgatttgtcggcagatcgtattcgtgatgaaaaagttaaagtgcttcgttcattacgccggattgaccatactaatgtacgggaaaaaacagttcgcgggcaatataccgccggatttgtgcatggtaaaaaggttccgggttatctggaagaagaaggggcaaacaaggccagcaaaacggaatcttttgtttcggttcgtgtcgatattgatgactggcgttggtcgggtgtgcctttctatctgagaacgggtaaacgcttaccggcgaaatgctctgaggttgtagtttattttaaagagcctgcattaaatctgtttgctggttcctaccagcagttaccccaaaataagctgactatccgtttacaaccggatgaaggtattgatattgaagtgctgaataaagctccggggctggagcacaagcaccgtttacagacaacaaaacttgatttgagcttctctgaaacattcaatcaaacccaccttgctgatgcttatgagcgattattgctggaagcaatgcgcggtattcaggcactgttcgtccgtcgggatgaagtggaagaagcctggaaatgggttgattccattatggaagcatgggcggcggataacgaacctccaaaaccttatcaggcaggaacctggggaccggttgcctctattgcgatgatcacccgagatgggcgctcatggaatgaatttgaataacaaaatgttattaaatctggccgcgttagcggtcagatcctgcttttatggctttagccagtttaagtcgcgttagcgtcttaaacataaaaccacccgctttgcgggtggagttcaaaggttataccaagaaaaacacctttccgttacgatatagatgttcaagctaatattcgtaactcaaataaggaaaggtgtttatgggcattaaagcacaaagctcagcgcatacaaagtggctgtgtaaataccatatcgtctttttcgccgaaatatagacggaaagtgatttttaataatattcgttcaagtgtgggagagatcctcagagacctttgtaagtataaaggtgtggaaataatcgaaggtcatctcatgccagatcatgttcatatgttggtgagtattccaccaaagctaagcgtttcaagctttatgggatatttgaagggtaaaagttcgttgatgatctttgatagacacgccaatttaaaatataaatttggcaacagaaagttttgggcggaagggttctatgtcagtacggtagggctaaatgaagcgacaattcaaaaatatatcagagagcaagaaaagtcggatttaatctcggataaattgagtagtaaagagcatgtagaccccttcaaggggtaggccaaagcagcaaagacacttagcttgaacgaagagaaagcagcgtcatttaggcgcagtcggtaacaagcccttatagggcaagagcaaaccacccgttatacgggtggttatgatttgtgttttttagctgaaggtattgttcttaatagccgatggctgcaccggctggtcgccgtacatcattagcgccatagatatatccttcgcgaactttgcctgaaacagcagagtcattgcctgatgagttgaccggagaaactccggctgcacccggcaaacctatcatgattaattcagttgcaccccatggagtttgctccaccattttatagcccattttttccagcagatttaaggtatctttcgaaagaccacgctgctcataatagacttcatctggcagccattggtgatgaatacgtgggctgtttacggcttcttgtggcggcatatcaaagtcaatgatgttcagcgcggcctgtaaagtaatggagataattcttgaaccacccggagaacctaaaaccagaaagattttattatctttggtcactaatgtcgggctcattgatgatagtgggcgcttaccgggggcaatggaattggttgctccctgaactagaccatacatgttcttcgcgccaattttcgtggtgaaatcatccatttcatcattgaggaaaaagccggttcccggtgcaataacgacagcgccaaagcgcccattaatggtataagttgtcgataccgcgttaccatctttatctaccacagaataatgcgttgtttccggtttttcatgcggaccaatacccggttgcaccagtttggatggtgtcgctttgtttggctggatctctttacggatagattctgcataacttttgcttaacaagcgttcaagcgggtttttaataaatgcaggatcaccgaggtaagtgtttctatctatgtaagcatggcgcatggcttcagtcagggtgtgaatataggcggctgagttgaaccccatcgatttcagatcatagccttcaacaatgttcagtatttcacacagtgtgaccccgccggaactgggtggaggcgcagagataaatttatatccgcgatagctacaggtaacgggcgttgtttcggtaatagtataattggcaaaatcagctgctgtgataatcccacctgatttctttgaggtttcttcaatgatttgaggaattttgccatgatagaaaacatctggcccttgtttggcaatcatttccagcgtgttggccaaatcagtctgaattaatttgtctccgggctggaatggagtgccatctttacgcagaaaaattcgggcagcttccggatcctgagcaaaacgtttgactgtggtatccataatatcggtatcaccacgggtcagggtataaccttcacgcgccagcttaatggccggagccattacttgttcgcgggttaatgtaccgtatttttgcagcgcggtatccagccccataactgttcccggtacaccagcagcgtagtatccatacaggctggcccctttgataacattgccgtctttgtccagatacatatcggcactggctgccgcaggtgctgtttcacggaaattaataaatttatctgtaccatctgccagatgaatggtcatgaaaccaccaccaccaatattaccgcagcagggattgacgactgcttctgcatagcctacagcaacagcggcatcaatagcgttaccgcccattttgagaatatcaacacccacctgtgatgccagatgttgcgcactgacaaccatgccctgcttggcttcaactgcaagtccagtggctgcgtaaagagaggatgagacgaatagtgaggcgacgatgaacggaattttccatgttttggacatattttcctcctgatttttgggctgtaggggaaaacccaaaaggttataaggttatgttaattatttgtaatgtaacattatcggaagctcaggatttttgaaagatgattttctatgtgtcagtcaataattcggaatatttcagaatgaatcttcatttgcatacttcaaatctgaagttatttcgtgcggtaagtaaacaaactatgtgattgtggggtgtgagtgcaactaataaagaggcagcctgaaagacagtggataagaaaaaaccagccgacaatgcggctggtttataaaatccattaacaatgtgatgctattaaaggattgaatactgacgaagattacagtttgtcagcatttttagtcaggtattttgctacgccttcaggagaagcgcccataccttcctggccttttgcccactgtgcagggcaaacttcgccgtgttcttcgtggaattgcagcgcgtcaaccatacgcagcatttcgtcaatgttacggcccagtggcaagtcgttaacaacctgatgacgaacaacgccgtttttatcgatcaggaaagaaccacgcagagcaacacccgcttctgaatgctcaatgccgtatgctttcatgatgtcacgtttgatgtcagcaaccattgggtatttaacttcgccaatgccgccttcgctgattggagttttacgccatgcgttgtgaacgaactcagagtcgaaagaaacgccaataacttcaaaaccacgtttttggaattcttcataacgatggtcgaaagcaatcagctcagaaggacaaacgaaagtgaagtccattggccagaagaagataacagctggacgaccattcaggtgttttttcaggttgaagttattaacgatttcgccgttaccgagaaccgcagaagctgtaaaatcaggggcttggcgggttactaaaaccataattgactcctaaaaattctgtaggtgtttgtggaaacgggttacagcataaggaacttta

SEQ ID NO: 1438 - DNA, 8706 bp, Xenorhabdus sp.; identical to SEQ ID NO: 1437
  CDS (3654)..(5129)

SEQ ID NO: 1439 - DNA, 8706 bp, Xenorhabdus sp.; identical to SEQ ID NO: 1437
  CDS (407)..(730)

SEQ ID NO: 1440 - DNA, 29792 bp, Xenorhabdus sp.
  CDS (16848)..(18347)
tcaaccaatgtccctttgcaggttcctgtcagcgtttttccatcaatcgcgatgagacttttgccccccgtaacccggcgctggttgatccagccataaaaggcttcgaccaatgcgtcttgatctatcattttgataatattagccacacagtgacgacgaggaatgccgtgagtaaatgaggtatattgtttaagccactctatttgtaactcaccaaattcttgaatcgatttccagccagaagcgccacataacacagcagaaaaggccaaaaaaatgacatccatcaattcatgttttttattgatgtcagaacgtgggtcatctatttttctgataaaattaaaaatattcattattaagcacactgtttatggaatagcgtgatcttaacgttttaaggagagaaatgcttataaaagtccgtatattgacttttatttgacctaaataaccttatgaaaaatgtgagatctcgccctgctacggtatccataaaagtaagaaggtcagagaatggttgttgaataaccccaccgtgacgcttctatttctgccggtctactcgccttggttaaacaaaatagaacggttatggcaatcactccatgaaacggtgacacgtaatcattgttgccaatttatgtggcagcttattcgtaatgtgaaaatttttttgaaaaaagcctcgttaacgacttggaaagaaatgagaaatatcagagtctcatcattatgacaaactatttagattttattaatttgaatttgattaaccaagttaattaataacaagttaacaaaaatgaattaattatctagaaatatcaatattcccatcaataatagataaatatgggctgtaagttgctaccctatctgtatttattctatccattattatcggagaacgaccaaaaacttcagtttctaaacgaaataatcggccgcctttgtatttaactaattcaaagtcttgccattgaggaattgttctgattgtatatttttgactatcactcagttcagcaaaactcattgaattaaaaaatattctaggattactatcttcagccatcgcccattcatcccatgcaggtttactcattttccataatttatctagatccttatgtgcaagtgtattgataatatcctgatagaaatttttaattgttgggagatcattttctgttatccgttatcgagacaaaactgctcccactgagggatgaaaagacgacaaaaatcgtcgacatcgcagaaaatttccactaacttgttcatggcctgttcctcctcggagtggtttctggtttttcaccaaaattttgcttctggaacaggccttttgtcaatttcttattcagaattcgggttaattaaccatatcaaaataaagcaattacacaaatctatgtacaagctcttatcaataaattactacctcccgcgttcttaccgtaacctgctatctgcttacccagaattattttcgtgctaatgttctggacagagtatctactattgttcttgtcgtttgatcgatttcataattaagaaaatttcccactttaatcttattaagattagttattcgcagtgtctcagggatcaaatttaaagtaatggtattattttcttcatcaagttcgttgatagttaaactacatccatgcagtccgataaaacctttcaggaaaaaatatttgatattgccctgaggaatccggataaccagccgataagtttctccagttgctgtaaattcgactacttcgaccatgccttctatatgcccgtaaagactatgcccaccgttttctttattcatctggtgcgaacgttcgatattgacctgatcgccaatagaaagaaattttaatgttgtggtatcagaggtaaagtcagaaatatcaaaatacactctgtcaccctcaaattgagtgacagttaagcatgtaccatcaatcgcaacactggcgccaatagcaacaccgttaaaaaaattattacgattactaatcaccagtgaactaactccatgattttttttcaaaaataaaacctgttctttcccttgtacgataccagtatacattattattaccctctcttctgaagcaagaatagtccggttgaataagaaactttatgttcattagaaagatatttatcatagagtatctgataaaaatcgttgactgcactttcttgatctaatttggaaaattgctgatatataacagaaccacttcccaaatgccaatccttgaaatcatcataattagaaaaatcaattgactcttcaatacgataactttttagtatattaaagtatttagtgaaattcttaaatttctcattgtcaaatcgataatcatcgaagactacagaaggcgaaacaggagaatatttatttcttacaacttctaatacctttccttgaatatctttttcaccacagaaaaaatcaaagtcaaatgcgcatgataagaataaataaccatttggtttcaaatagttaaaaatcttatctaatacttcctgctctcttggtataaaccagtgtaaacaggctgcgcaaacaattacatcatataacttcatttcatgattttcataattcaggaaatcatcaactacaaagttaattttttcatcatcgtgacttttacgagcgaagtctaccatatcagacgaaatatcgattcccagataattacttatgtcacttttttttattaaatttaatgagttacccgtaccgcagccaatatctaaaatatcacctttaatttcagaaaatcctaacagtaattccaaacactttaactgtaatcttttggacgtacgctgatatccttctggtttaaaccatacattttccattattcacccttaaatatattattgaagtaacccataatgaccatgaccaagtgctaaacctaatttttttctaacatcaacaggcttagctggtgttatttcaaattcatcagctaatctaataattctttttataagttctttatttgacgccaaaattgtttttttcttatcataccaaatattatcttccagaccaattcgaacaccatatcctgaagctaatgctaatgatgtagcttgagattgataactacccaatccagcaaatgagcatataacattattgggaatatttgataatatagcagatatattagaaaaactactttgagcacctgcaatattaccaagaagcacattggcataaatattatttggtagtaatcctttttttgttaaaaaactaatatagtttgccataccagtgtcaaaaacttcaatttctggtgaaattagtttttttttcatctcggtagctagaaattgaatagtctcaggagaattaacacttgcctgattaatgaaatttaaagaagacaatgttaaacttcccatatcaggtttaagatctccctctaattctaacggtaatgctctttggttaacatcagagacattcctaccacttaacgaaacacaaataataatatctttattgtattttctaatctcagaaattattcttccgtaagcttcatcagatactattggtttttctgttacttgatctctggcatgaatatgtgccattgatgctccatactctgctgcctgtaatacatcatcaactatttcatttacagaaatagggacgtttttattaattttttttgtgggtatcattcctgttggagcaacatttaatacaaaactccccataaacttcctcacttaatatttattgtatgaaatttctttttgactttgctttccaagtattttttattttctttggtgacatatactcctgttggaataattctatttacttttatattattagataataaacaatcaattttttctggattatttgtaattaaatcaactgtattaacattcaacgcttttagcatcagtactgcatcatcaaatttcctcaggtcatcttcataccccaacatttcatttgcagtgaaggtatcaatacctttactttgtaaatcataagcatcaatctttggatataaaccgatccccctcccttcttgtcttaaatatataataagcccgttacctttatcatcaattttctttatggcttcttgtaactgagatccacaatcacatcgatgtgaaccgaaaacatctccggttaaacattcagaatggattcttattaagacaggtgattcagtttttaactcacctatactaattgcaaaatgttcatcttctaatccagaaaaagtaataaatctagtttctttggatgtattatcaatgggtataataacatttttccttactttaatgtttttcattaattactccataaatatttaacaagaaaaacctctatttcttcttttaataatccaacacatgtataaatactctttaaacgtaacatatcaatacttttcccattattcttagagtggcagtcaatcatgccaataaaaacttttttgaatctattattaattatattatctacacatggtggtgtctttccataatagcaacatggctccaacgtaatatagatgttacattcatgcaataaaattgagttttctacattctcaattgcgataatctctgcatgcttacctccatattcttgggtaaatccttttccaacaatgacattattatatgttattattgctccaacaggtggatttggtaaacaccttggtaaggcttttatagactcatgtaatgccattcgcataaaaaactcatctgtatttatcaatcacgtagccttacttttaataaaaaaagaatgaatgagaggaacaagaagtaaagaacaaattaataatatataaacatgtaaatacataaagccatttttattaaaatctatcaaagcaaataacattgcaggtatagactgaccaagcatagcatttaactgcatcactgaattatttaatatattagctttatataaaatttctttttttaatccataaaaagctattgatgaatagcctaaaaattgaaatgatctagctacaccatgtataaaacacaagaagtaaacacatgtagagtcactgtatacccccttgtttataaaacataaaatagaaaaaaaacaaaaagatgatgatgtaaaaaaatacaattttatatttttaatttttgtcagaatattagcagccactggttttgctaaaatattacctataaagataaagataatacaaacactactcattaatggagtgtaatcaaaagtcgtcattaatgataaaactaaaaaaactggaaagcagtaaatagcaactctaaaaaagcttccataaataatattaattctaaaaaaattatttgacagtaaacttgaatcaaataatttattttttttgattaatgtgagatagaaagacaaaaataaaataacaatagaaaataaagagagagtcatatagccagtagttgcaagagagaaaaagtaaaaaacagaaaaaaccaagcaaaaccaactcaaatatgataaaaaatcaatcttgtcattactacttaaaataacttcattatttgataaccattttaaagataatacaagaacaaaaaaagagcacaataaaacaaaataaaatatatatctccaattatagtattgggttaaatatccaccaattacaggtgcgataacaggagcaaaaagagctggccatactaaataagtcattacaacgggaatgttctctttttttgttttatttagtaccaatgttctgcctatcggtacaaccaaagcactcccaaacccttgcaacatcctacttatagataaaaaataaatattattacttatgctacatagaaaagaagcaacaaagaaaatcatcattcctatgataaattttttctttgctcctgttttagaaaataaatttatactcaaaggagtaaatatagctaaagagaaaacaaatgatgctagcgaaatagttgttatttctataggagttttaaattcattagatatatctattaaaaccggagtgaaaatagttgcgtcaagcacctctaaaaaaaatgcagaagatacaatgaatatatccattttattattaataactttattcatattaataacccaacgctacgccttgcccccttggatcagacacagagaaaagcaaaccattttttttattaataccagccaattgaacaacacctaatttattactatgtccttctgtacttataaataaaccgccagcatccttactttctgttaaataagttattttttttgtttttgcatggtatcctatattagcaaacctaggttcaattactgcattatatggttcaaatttttcagaaattattttatttattacaaatgataatgtttgggattgtacaggcccaccggctgttcctatcacaaaattcatatcatctgattcgacaataatacaattattcgtatgtttaacaggagaattgcttttaaaagtttctttactactagtttcgttaaaagcataacatctattagataacaagatacctgtattttctatttcaaaaagtgctcctaatggtgtgaaaatagaattagttataccgattaaatcaccatatttatttactccggcgagaaaaatggtatgactctgtttatgtctaatatccttctcatctaaaaaatctttttcagccatatcaaataataattcagcgaacttttttatttcatctgcataattctcagaattatattttataatatctgctgtgtcttctatataaggtgtaagcttacaaattttctcataatctatttttttattcttctcagcaaatatttcataaattttaaggaataaaaataattctttccaagggctatttgagccatgacaaaaaacttcactatccatgaattttattttctttatttcactaacattaggtcgataatttaaaaaatcagattcatcatataaatttacatcatagttagataattgattatagactgaatcacctaactctcctgtgtaacaatcaataaatcctgcctgagaaattcttttcattgtattaataaatgactgagatatctgttgttcgccacagaataaaccttcccattcagtcatttttgttgcttgtgaaaactctaatttagctttatcaaacaatactttaaaattaggtaatttaataaatcctttatgaaaatcatctttaattaatgatcctataatactcaccaaatcaatatccccttccttgaccagacgatcaaaagcatagggagctccataaaccatggtactataaacacctcttcttggaactgaattaaaccccttatcttcataagatgctctattttgatatttaccagtttttcctgtcccattgataaccgatatttttcctttatgtttattgattataatagcatcccctccaataccacaaagatgtggcaaattaaaaaatagagacattaaaatttttatagcaccactatataaataaaagtttttttcatttcctgtcaaatattcatttatacccaatagagttgatttatagtgaggagatgaaaaacaaatagagttaccaaatgctacatttgacacgaatccacctctaaatttaataataaatatattgccatgataatcattatatattaaacaacgctcccttgaaaaaaagtgattaaaatcacaataaaaaaaatgcatattgattaatttaaattaaaataatcacagtttttattttgatttaaagtgcttgacataaatctatagctaagtaaacattgaatttaacattcatctaataataaaaaacaggtgccattatgttatttgtttttgataaacataaaataaaaaacatataccgtttatatttaaatatagttaatttttgtaagttattacttgatgattttaaaaaaaattcaacttcaatatgcttattattgacaccattattttttttcacaaatcatgcccacgcaaataaatttgttaattttcaatcaattgataccagcctttactttcagctcgaaaacaaagtcgcgcctgagcaaaccctctctcccatccttgaagcctttggcgattacaaaataggcgatatgtatatctacagtatctggcaaaattcactgcaaaatagctataaaggagataaaagcacttattactataaatttgtccccagactcagtgccagcaaaatgacaggctatgacttttcctatggcccattgaaagatgttttgtttgcccagtgggttgccaaaaccaaaaacacaaagtatgactattttcccggtatcagtcttgactggcaagttgcgggattcagctggttgcgtaccattttttatcttgaaaataatgccaaaggcaactgggatgatcaacgcatccatatcgactatggaattcctttcagtaatcagttaggtgattttcgcatcgtaggcacattcgattacacgttgggaaaacgcgataatccagagatgttcgatttcaagccagaattacactatgacttaggaaaacaattaggctatcagtccggtcatctgtggacaggttttgtcgttaatccgatcaaaaataaatacaaaataaaggatacgccttactttcgcacaaaccaattgagctatggcgtgtttattcgatacagctttttctgataaatacttaaaataataccgtttttaatggttcatatccttgatggggtcataatgtccactcaacacgacaaattcggacgtacttatcagtggtttttactgatacttttaggcatggtttattttctatccacagcaacaacctttacgtcattgggtgttgtcctgcccagtatgattaatgaactgggctggagttggactgatgccggtttaggcttcacattgcttggcctgacctgcggattatccagtttcctgccaaccgtgtttattcgcaggatcggtgttcggttcacactatttatcggtctgcttatttttctggctggcttctacaatttctatcacacacataccattgcgtcatatttcattggaacagctttaatcggtatcgggtttacctttctggcaaccgtgcccggcacctatgttatttcacgattatatgaaaaacagtctctggcttttggcttctattttacgattggaggactgggtggcgtgattggcccgtggatctattttctggcaacccgggtctggggaacgtggcgaatgcactggatgatctctgccattgtgctcactatttttgttatcctgactattctcactcttcaggaaggggacagggaaattgcccacgctaagactgttaaccaaaagaacaacagcgaaaattcatccaatatctatcgtacccaacagttttggacagcccggcaggcactacggacatggcagttttatgttattgctgccacctatacggcttttttgtggtgtggtattacggttaacagctttgcagtcgcccatattattgaaaatggtttcagtgaagccattgccgctggattgctgagttccatggctttcatcaatgcattttcaaggttggccggaggggctgccggggaatggcttgaaccgaaaaaattactgcttggcagtctgacggtcattattcttggcttaattgccctaagtattgcctcttcatggccatttctgattgcgtttacgctgttcgtcggtatgggatatggtatgactttcctcgcttccagtgtattgctcgccaattattttggtcgtaatccctatctggagctattctcgattatgaatctgatttctactctggcttgtttggcacctttctttgccggcgccattaaagattattccggtagttttacatgggctttcctcatcctagcttttcctgtgtttattgtgttggtcgtcacactgatgatgaaaccgcccagccaaaaaatgagagaccattcagtcgaaactgaatagggttatcggtgcacaaataaggaaatagtgatgtcaaaaaaagaattcggtgtattcctgccgattgctaaaggcgggtggattatctccaaaaacacaccaccactggatgcgtcttataaacaaaaccgtgaggctgctatttttgccgatcaaatcggccttgattttattatgtccatgggaaaatggcgaggttttggcggtgaaacggatcactggggaagttcacttgaatctgtcaccatgatggctggcattgcggaggtgacacaccgtgccaaactgattgccacaattcatgctggtctgcacaatcctgcggtcaccgccaaaatgatcgccacattggatcatatcagtcaggggcgtgcggggctgaatattgtctccggttcattccgcgatgagtttgaacaaatgggagaatgggacagcaagctggatcacgatcagcgttacgccatgactgaagagtggacgcttctgataaaacggttatggcgagaaaaacaggttgatcatcagggaacatatttcaacctgaaacagtgtgtttcagaacctaaacccctttcacgtcctcgcccttatttagtttgtgccgggcaatccgaatgtggtctgcgtttcagtgtgcgccatactgatgtctgttttatcggtggcaaagatgaagcagaaacacgcaagatcagcttaacggctaagcgcatcgcctcagaatacaacaccacaaccaaaacattctgcatgtgtacaattatttgtgctgaaaatgatgcttatgccgatacccttgctcaattttaccagcagggattggatgtgggggcggtcagaaacatgatgcacagttttggtgttgatacggatggaaaaaataatgcgatggtagaaagatcgcaaaatgcgttcatgacgcataccgccatcggctcacctgaaacttgctacaggcaactgtcagaactgctacgtacctgcgaactggatggcgtgatgttaatatttcctgagtatattaaaggactgagaatatttgctgatcagattttgcctaaattaaaggctgaatttagctgattcgatgagtttcgttctgggatttatgtcctgaagcatgggaagccagagcttcccattattagcaaatctcagcttcgtttaaagatatagcagaatcaatataatttgacgcattctacatgctccataaataactcatcaacggaacaccttttttctcttcttatcgcttttactccggcccatttgtgttcgatggggttcaggtctgggctacaaagtgtgtcgtaaaagctcatgttatccattaagatcggtgctcttccttcaggtaccgatcttttatgaccttattcattcgaaaactggaaccgtctgctcatactaaacgtcaatttgtcaaagcgcggcattacctgtattggatggctctcttccccttggggattatctcaagcaaatgggagaacgcagtgcatttagtgtcgcggagattctggatgaacaagactgggtagctttcgagcgccattatggttcaacaggcagggtcccttaactacaattatcatcgcactcatcaagggaaaatatgttgtggtcgcacaccaatagagacattattggcaggaaaatcaatttgggctgaaaaaaaatctgacccgaatttaatctggcaggcactgaagcaaagtgggtgactgtcatatatggacgtcccgtaatattcaacttttttagtgactcagtgtatggctaatttcggttcacggtcatatatccggcgtctggtaatcatttaaatttgctgcgccatggtgaagtccgaaccttgcctcctcatcagatcgacggattaaaaatcctcgacagtttcaggttgttgcaaggccggataaccgtttagctcatcaactgtagggaacctctaaaaacttttcacagccacaaaattgagtaaaatgtaggcacagtacctctctgcaaggtagcgccatcatgataccgcctcgttctgctttaaaaaaagacaaacaggcatccgaatatcaccgtcgaaaaatcgatgaattaggtgatccgctgcttgttcttgataaatatgttgatttctcggcactggctgacaccctagaccgtatcgtcccacgtattatttcccccaaagggggacgcccgccattcccgacggaggtgatggttcgcatcattatcctgaaacatttccataatctttccgatgaaaaaatggaatatcaattgcttgaccgaatgagctggcaacgtttttgtcgcttgaccgatgtcattaatattccagaccgtaacacgatttggtgtttcgaaaaacggattgggcaggaaggtgccagagcgttatttgaagaggcgaagcatcagctgtcagcacagggattcattcccaaaggagggcaaatcattgatgccacgttgatccccgtgcctaagcagcccaataaaaaggaagaaaatgaacaaatccgtcagggcaaaaccccggataactggacagtaaacaaacgatgccagaaagacaccgaggcaacctggacgaaaaagcacggtaagcgttattttggctataaacttacccttaatgtcgatacaaaatataaagtgatccgccacatcgcgacaggaaccgcggctgtccatgatagccagttttttgaagctgttttggacaggtcaaatacccgtcgggacatttatgcggataaagggtatgccagccagaagcgtgaacgtgtgctgaaggagcagggctatcgtgtgcatattcagagaaaagcggcacgtaataagcccttatcacactgccaaaaaggccgaaataagaaaatagcgaaaactcgggcacgcgtagaacatatctttggctcactctctcagatgggtgaaaaaattattcggacgataggccagctgcgagccaattttgcgatgacgatgaaggcaacctgctatgatttgcaacgtttggtttatttcggaaaatcgggtattcatgctttttaatttcgagatgtgatgaaaaagtgatgcgtttgtttttttcccctgaacaagcaagaaaaagtcatacacaataaggtcagttattggtgagttcaaaattgatcttattttttgtattgagagtttttagaggttccctaaaatacaaaatttaatgatggatggtagagctagaaataataacgtaaacccaagaaatcttatggttatttctggtgatggagaagtacaaggaaggaactataatattactgagatgcagtgtgccattttattaaatggtcttaaaagattagataatgaaaatgaaaatcgacgtttaaatgccattattcttaactattaccttagaaagagtggaatctgtaatattcttagggtagatgaaaatgttgatcagagagtatattggcgttgtgttattgatttcaattgtgaaattaaaaatgaacaagcacaaataatatcgaaccatttctcagagagatatcgaataccttttgaaaagctcgatagacctttaaataataacccgctttaccaacctcatcgagttgatagaaataaatattatagtcatttcgaaagacttaatagtatgaattatagccttccaggtgctgagaattttttcaatcgaacaatggcatttccccatcaagtgttacttcagccgaaggattggatagttgattttgcaaaagaaataaataaggttgtacatcaatgtcaaattggtttgtaattcctcatcatgcacagagtaagcgagataatgattatttgattgaaaccttactctcaatacatgctcagtcaatcccagattggtgtgttgtaatagtagatgataattcaagtttctatgatttattgaatattagaatacaagatttttttccaaaaaatgtaattgataatagatttcattttatagttaacgagaatgaaaagggagtgtcgtcagcaagaaatcttggtgtaaagtatgcacataaacaaaatgctaatttcattttatttcaagatgatgatgatattgcacatccatatcgtatagaaaaaacgttatgtgctgcaaaacaaattaatcaatcagacttaattattagtaccacttttagtggaattgatgaaaaaggtaattcggtttctctagaaaattttaggagtgatatgctcgatgttgctgttcagcatagtcggtatattccagaaggaaataataaatatcttgatatgataagacactgtggctacatattcccaacgtcaggaacgacggttaatgttgacttagcgcttagatgtccattccctgatttttcagtttcggaagatcatgtcacttggatgaatatggttgcagaaggagcatttattaaagtactagaagacattccttttaaatatagatttaaaggagattctgaacatcgtcctgaaacctttttgaaagaaaaatataaaaatgatattgaagggtttataatatcaatgaattcatatattgaaaaatttggttcttattttaatattaatgaagtaattgaagagtttctgaataggttaaataattgcttatcattacaagaaaattacactctatcagataagcataattttaaagcctctttttttgaaataaagagtaaaatcaaggagtaagtaacttatgactctgagtataattatcccttcttataacaaaaaagaaagcctgatgtctttgttagctttactaaacaagcaaagtgcggacttcagtgatttcgaagtaatagttgtagatgatggttctagcgatgagacttgtctcgctgttactaagctagattataactataaaattaaatatatatatgtgcctgacgaaggttttcgcgtagcccgagcgagaaatattggagctaaaaatgcacaaggggaactactggcttttgttgatgctgatgtgcttttgccaagctatttcgttcaaagtgtgatcaaattccatagctataatccacaatcagtttcgattggatatgtatacggtctttactctgaaaataagtgggatttaaaagttgatctagatgatgtagatagcacaattaggaaaatgaaagaacaaggtattggcaaagatattcgccaaaattcatacgagaaattcaactataaattatgctctatgcctgcaccctgggtttttttatggggaacaatattcagtgtagaaaaagaactttttgaaaaggtggggtgttttgatgaacattttacatcatggggtggtgaagatattgatcttggtttccgacttcacaaagctaattataaatttcatttatttgaagggatagagggagtgcacttatctcatccagaaaacgatgaaataaattataagacaaacttagaaaataaaaaatatatttctgaaaaatacaatgatgaaatgacggatttgcttataaaagaagagaatatatttaaattaaatgatttgataattttaaaaaacgctgaagaaaaggatgtttaatatggttaatattgctattgctggtattgggaattgttgttcgtctctttatcaagggattaattatcatttagatagtgatccaataattaatgacttgggtatttcaatcaaagatatcaatgtgaaagcagcatatgatgttgattgtagaaaagttggtttaccaatatcaaaagcaatttttacaaagcctaattgtgcaagaatattctgtactgatttaccagaaggtccgatcgttgaaaaaattgaagtttttgatggcgtgtctccgtatatgagtaatcaacctgaagatcgaggatttcgtgtttctagcactcaaaaaccaattgacttgatttccagccttaaaaaaaacgaaatagatatactgataaactatttacctgttggctctcaaaaggctaccgagtaccttgctgaatgttgcttggaatctggtgtttcgttgcttaattgcattccagttttcatcgcatctgatcctgaatgggacagaaaattctatgataaggggatccctatcataggtgatgatatgaagagtcatttaggtgcatcaatattgtcacaagtatatcaggaattagctctctcaaggaatttaactgttgactatcaccagcaaattaatattggaggaaatactgatttcaataatatgatggttcaagaaagattaacatccaaaaaaatatcaaaagagaacgttattagaagtcaaaatgaaattgccggtgtggaagttcacgaggattctatttttgctggaccatcaacttatattccttatttgaaagataacaaggttgcacacatacgcctggaacttaccggatttggaggaagtaaagtcgaaattgatactaaattatcggtacaagattctgaaaattcagctggtgttgtgattgatgctatacgttatttaaaaattgctagagatatgggattaaaaggcgccttaaaaggtccttcagcatggactcaaaagacccctcctgtgcagttaaaaatagaagacgcaatttctgagtgtcaaaagttgattgcctttgaagtaccaaaatacatgttttaagtttgaggggaactatgaataagccaatttatgttttaggttctggactatctcatgatggatcagcatgcttaatgaagaatggtaagattatcgttggaattgaaaaagagaggcttactaagattaagcatgatggatttaatgataacgatgccataaggtattgcttaaatgcagccggaatcacttttaaggatgtagatttatttgttgagaaatacacagtaaatgaaaaacataagcccgatgacattatcaaacgccgaggtagaattatacctgagtatctccccgttgttaggattagtcaccatattgcgcacgcatatagcgcagttggcacctctccattttcagagtctgccgtgattgtatgcgatggtatgggagggagtattgacagttgtttagatcacgacataagcctagttcctagtgaaataggaaaattatctaaatcggattatatcgactattttgaaaaggagagctactataagttttttaataataatgtggtaacagtatttaaagattactcaaaatttaatcttaatgatctagataaatacaaaattgctccttatgatatcgaacattccattggtgggctatatggaggggctagtaaatttgtattcggtaaagatttcaacgaaggaaaattaatgggtttggcaccatatggtaaaagtggcagattccctgaagaattatttttgattgaggatgctagggtaaaaataaattatgatctaattgaggatttaggaataaaaaatacaaatattaaggatgattttcagtattgtgctgatttggctaaatgggtacaagaacaaactgagaaagctttattttatatacttaattcataccataaaatgtatgcttcagataacttatgttatgcaggtggattagcactaaatgcagtagctaatggtaaaataataaagaatacaccattcaaaaatgtttatattcaaccagccgctggcgataatggcctcgccattggcgcatgttattatgggtggatgaaagtattaaataaagaaaaaatcctatttaatgggaatccatattttgggataaaatacgatgaatctaaatctagtttacgaaaatacttgaatgataattatgcaataactaagccggataatttggacgaagttgtcgcaaaacatattagtaagggaaaggtagttggatgttttagaaatggatctgaatttggacctagagcattagggaacaggagcatattagctgatccgagaagaaaagagatgctcgattatatcaatattgaaattaagaatcgtgaagaatttcgtccattcgcgccttccattttaaaggatagatatttagacttctttaggcctggcaatgaagatagcgattatatgatcaaggtttcacaagtgatacctgaaaaatcagagcaaattagtgctgtagtacatgttgatggaagtgcccgtgtccaaacagtgactagagaattaaacagagattactataatcttattaatagttttacaaacttacaggtatcccaatcctgctgaatccttcttccaatggcaaggatactcccattgtagaaactcccgaagatgctattaatttctataaggaaagcaaactggattttttaattataaataactatctaatttataggaaataaagaagtatgctaatggatgaaaggtttttacatgccaagcaagttattgcaaatgcaggaagtattttactagaaatgttcaacaatctcacatttacatgtaaatataaaaaagaaagagatgtgctcactagcgctgatctgattgtagatgaatatttaaaaaaatccatttcaaatatatttcctagtgatactattttttctgaagaatcttccgtttatggtattgcagatacgagcgaatatacctggattattgatccaattgatggaactcatagtttttccacaggtgtgtttggatggtgtatatctattgctgcctttaagaaaggcagcatattatttggtttgatttatgatccaattcgtaaagaatgttttagtgcttaccatggacaaggtgcttttttaaactccacaagattattggcaaaatctcatcagttcttagagcatgatcctgtaccctacttagcttttggtacgtcttatcgtgatgacaagagaaaaatttcaaaagtgttaacaacattactcgagtctggctatttgccctatagaaatggtagtgcagctctctgtatgtcatatgttgctgcaaatcgcttgcttgctttctttgagctaaatttgtatcaatgggatgtcgcagcaggatatattatattaaaggaggctggctttcaggtacattacttatttaatgatataaacactgctcaaacattgatatgtggtaatcatgacattgtaaaaataattgaaaatgagatattttaggttaatttattatgattattagcgttatcattccttgttataacaacacaactcaattgttatcaactatatcatctttagataatcaagcattaaaaaataaatttgaattggaggtgataatagttgacgacggctcaaatgaacccataaatataaaaagtattaattgcatgcatgaagtaattattgtctctcaaagggatgagggatttcgagtttcattagctagaaacagaggagcaaggattgctagtggtgaaattttactatttgttgattgtggaatatatttagaaaaaaatgctgtattgagtattattgaatcttctttgtatgataaacgttgtgtatccctaggaaatatttatgggattactaactgtaataaccacaaggaaataattcttagagatattgaaagttatggaattgaaggtgcattagagctatatatcttaaattctactttccctgatcccagagtttattatctttcatattatgatatggatatgcagaaattgcgtgcaccatgggtgtattgttggggaggggtaatagctatacacgcatctctcttcgacgcaatatctggatttgatgagtcatttaaatcttggggaggtgaggatatagagttgggtattagactaatgaaagagggggcgatatttagtttcgtttccaaatcagtttcaatacatactcctcaaccagaaaacattgttagtaaaagtaaatctaactttaatgcctttgaatatatacactctaagcatttattagatgaaacatacctattattacaatatgaatattggggaattgaagaaatacttcgtcaacgatcagttttgaggcgaatcaaatgacatttcgtgtaaccactgatacttatagaataattaagcttgctttacctattatggctcaatctatattgtttacttcgatgtcaattatcgacacaataatggttggatatataggtacagaagagttagctggaatgggactggcaactagcattatgttggtttttttaagtgtagtctattcttcttcaaattcagtatctgttatcgttgctcaaaataagcactttaaaaacactctaaaattgattgtgactaatggacttgtacttagtcttactttgtcattttttattttttctattataaaactatttaacgaagatattatattgcttttttggggagaggaagattacgcttataaagcaatagactatctcaatattatttcatatacaattttggcatccgctattattcaagtttatataggtcttctcaatgcacttggtgacacatttttgacgtttttgatatctgcgagtggtgtagtttcaaatattttcttcagctattttttggtttttggtatagctgacatggatggatacggaattattggcgccgcattgggttcagttctttcaaagttagtagaaatagggataatcttattttttctattaaaaaagtataatggattgtaccttgattttgataagtttaattataagtgtaaatcctttagagaattgctgaggataggaggtgcgcaagctataaatgccttactgtgggcggcgagtataaacctatacactttaataattgcttttcaaggcaaagagttagtagcttcgtctgcagtgatctcttcaattacaaatctagcccatattgcttattggggtattgcaatcgctgcggggattgtaataagtgaagcgtcaggtaaaaaggaatatgaaagagctacaactatatcacgtttgtgtataatattgagtttggtattcgctttactactcgcagccctgctctatctgctaaatggttttattttatctttttatcctgaattatcacaaaggtctattgactttgttgatgctgcttattctattgtattatttactattgttatcagatcactttctacggtaaatatcgtcggtactctcaggagtggaggagacaaccgctttatcattactatagatgtagtagcagcatggttctttggtatacctctgtgctatctaatacttttccatacagatttacctttgtttttggcctttgctgccccaatggtggaagacatggtaaaagcggttctatcaacttttcgcgtaattggaaaaaaatggcagagaactattaatgtattttgaccttgtttagtagttatgtgtatagctgcgacttgatctgaagctatcttacggtagggtacgattaaatttgacggtcggctactcaatgtaaactacatcacattctccttaatgcgagagaagaactttattttcaatttactcattctagttatgtaaaaatagatttccaatgtaattcagccagcgacaccaacacacaatggggcaaaagagagttagttgtaccaaataagacttgatctgacactattgatgatctgagcgaaacctaatcagataaccgaatttgtgccagatatagtcatccacatcctaggatttacactgtgaggtgattcagggtacgtgtcaaactcaatgtactgactttgttcatgacttccccatcaaccgtttcagacaatcaataatttatcgtctgtcgaaaaacagacggccgataagactatgttatccacgactgagtgaagcaacacgccggatgtcacattggacaaattgccaacataatcatccccaacccgctcagccttaagataaacatcgcccctttgataggtataaaacgatgacaagtcgatattctttaatgaaccattagccatgatcaccaaaggtactctctcatagtttattgcacctacaccaacctcaaatttaaacaatcccaagttttcaaatttttgtctgatatttgacgattcaggggcaaggtagaatgattttgtaccatgatagacggtggttgatatcatcgtagtattcttttcaacatctgacacgacagctggctgaagcaatatatacatgtcaaaaccacaacactcccagtcttccgccagctcctgcatatacttatgcatcaggtctatattcgtcgtagggcctaaccgaataattagtttcttaatcgatttttcatcactaggatcttttgacagttgatcatgagccttctttatcttgtctttgatatttctctgttcattgtaatgttgtctggccataataaatacgatatcagatggataaaccaaacccttattctcatattcattcaaagggttgaagttgatactgatgcgaccatcaaataaggtataaatgccgtacttatcaatcttaaatacaataaagaaacaaattatctttgcctgatactccgtcaaaaaatcatgttcgagtataatgttcaatctgcccgaaatttttttacgcttaagaaaatttttgaaggttgttcgaatatgttcacattgcttgttaaagcatttctcatgtatagagatatcaaaatttttaacagaaaccttatattgatatccggtattgaaatcaatggtgtaatcatacaaaggatgagacttagtgcatggcgcgatcttaccaaattctgtagacaaggagccaatgagtatgatttcagtcagcaatccgtgagagttgttaatatttttctttatttctctggcgctcgtttcgagccactgtcggttattctcacttaatttcagaatggatttacccaaggaatacaactctgaagtagagatggtatcccttctgtcccataaaatctggagtcgatgtccatcttgtttctcaagccaactggctgaaaacaaatcctctacagcctgtattgcaccgatgattcgatctggatcagatgttttggctaagtgatcaatagcccgttgatacttattgctcatatgctatccctcaataaaccccgtgttagtaagtgaatttttattttttatatcgctgatattggtccttttgaaaaataaatgctttcccgtcttctgttcttagggcatctaaaaagtagtctcgtaagggtgtattggcttagccatgaccaagaccgttgtaacatcgtctgcgaacaggcggtgctacaaaggacatcttgtcccgtattcgacccctatttttcaccgaatttcacggtcactttttttcaaatttttcgcaaccttgaaacggtttttcgtcaattcaaaatcagcatcagaaacaacatgacgatgaacacgagaagagtttggttgcagctcgccgttctcaattgcaaccatctcttttacaccacttagcaactgttgaaacaaatctgctctcataattttctcaactcatggacaatctaacttcaaaaaaagggggcatttctttttgaaacgttttcgaatcaaaatttcttcgcgctggaaagactcattctgacattgcgaaaacacttcattacgttgaaataattcatcctgagacaacaaagagttaacctcacgttgcaagaatgaacgataaaaatcctcaaaatttcctgtataaagctcgccgaaaagaaaacgcgccacagcctcagcaccaccattttccgcaagttctaacacagtagcgcgattacgtgacttaatctgtagtagttcagatttgatctcacagccatccactttaatccaatgcctgtcagactaaatctgaactgctacaacgaagcgaaatacttactggcactcaaagatcgaaagtcgcctttgcttaaagaataaaaatcttatcgaatgtctcaggtgtaaagcgaactttggaaaattttaagtccccacaactcaacaattaatagactgccagtgtaatgagttacaagctagctgagaaactttcaccttcaacgataatagctaagcgaaatatttctgagtgttgtagctatgttccatctattgcattccctccaattgagagtaggctttttgtattaacaaaaatcataaacttccactggaatgactgtaaatctaccattatgattgcatttagcatagggtcagtaagggatcatgaggcagcttatactcttttataacatgatctttttctggtgaacttattataagaaaggtaaaagtgatgggtgataattcgagtaaagaagatgtggtgaaacaattggcatcagaatttaaacttgataagttttctcgaattcgctcagataagtcgacgaaacagataataaaggacatctatgatgcagttatttatatcaagaatgataaagaatatgaagaaaaaagaaatgaatgggatgtagtaagagctctcaactggcttgcaattgctgcaatagtaattttcttcttttcggtcagtaaaaggggaaactctgattttttagaggggatgaagttatatgcgtacattctttcagttattctttctgctatctggattggcgtcaatatcgaaagaactcatttattcagggaactttggaagtttggtataacaaaactaattatatcacttttttttacggcccttgttgttttttctactgcgacggcatcatcaattatcaacgatatattcggtatagatgcatcattttttccgtttacgaggagcttattaactgcgtatatattctttagatatgcatctcaacttgtatatctccttatatttgctgcgctcttgaacctatttccaataggttcttattttaaataccgttcagatgaaaaaaacaactttgattttccttggcaatcactagtatttattattttgacgctggtgttcagttattttacatggggatggagcggcagtaattttgacagcgacactttaaattataaagtttatcttcttgctcatcaacttgattttaacgacaacaacctatgtgaaaaccttaggggcgaaaaaactagtgtaatttttttagggcaaaatcaggctcaaattcttgttgactacaatactgtaaaaccagatagtatttttagctttgttgatggttacaccatacatggaatagaaaataaaaatcttaaagtaatgtcttgcgattattgactgatggtaatgcccttaatacattatttattcggtgctccgtaaaagcttgacctttaggtcggggaggatatcaatgttagtaataccttcttgccatcagatagccttttatatcgcaaaggtggtaagtctgcttttcgctcatagccgaccgtcagatttaatcatgccctacgaataggataacgtcaggtcaagtcgcagctaatacacattatgtcgttatctaaattccttatccagaattcaggttaaaaataggttaccgatgtaattcagctaaatagcttttcaaaatgataggcgaatcaaagaaactcagtcctatttttgcgaactttttaatcgcaaaaccaaaaaaacacaaaaaggaaggactgagttatggccatcgtaccaccaattccgcgcaatgagcggcgtcaaatgagaaaaattgtccaaaaaacggcagataaaaactatgctcgccggattatggcgatactcttgctacatcaaggtgcatctgtgtctcaagtcgccaaaacactttgcaccgtgcattcctctgtgtggcggtggattgatcgctttaaggcacttggatgggccggattgtatcctttatccgcgggtcgccaccctcggtggaatttaacgccacttttgcccgttctgttttatttgttggaacattcacctcagcaatttggtcatattcgttctcgttggagcctctctttttttatctttcaaatcaaaaaattatttaatatcaaactgtcaatcagcacactttaccgatttttctgtaaaaatcgcattgtatggcgacgagcagccccgacattacaggtgcctgaccctgaatatgatgagaaaatgaggctcattaccaaagcgttatctctggcctcagagaaacatcccgtggtttatgaagatgaggttgatattcactttaatcctaaaatcggcgctgactggtattttaaaggacaacaaaagcggattatcaccccgggacaaaatcaaaaatactacattgcgggcactcttgacgttcaaacaaagcacgttctctatacgggaagttcaaagaaaaattcactcttatttattaaaatgctggaagtcttaaaaagatattatcagggtgtgaaaacgctgaccgtgattttggataattattgcattcataaaagccgggcagttcagcgttggttggctcaaaaccccaccattatcctcttattcctgcccgtctactcgccttggttgaacaaaatagaatacttatggcacacgttacatgaaacagtcacacgtaaccattgttgtcggtatatgtggcaactgctcagtaatgtgaaaaaattcttgaaaaaatctgcaaatagactctttcagagaaagtaaatcgagtgtctcactattatgaaaagttatttagcgacaccaacacacaatggggcagaaatgagttaggggcgttgttttaacccaagtagtttggattaaaaagttgcaaaatttgaattaataaaaacaaggtttctctgtcagcatgatttttgtcttgcaagcaggatgcattcatatagctaactatattagcaattaccgcttctacaccggcgaatatcaacaaatggaaattaataaagttttatgatgatgaaaacaatgtatagaaaattatacaattataattaatttaaaaataatttggtttgggtgattttattattaatttgattgattaatgttttatttatatatcttatatgggagatggtaattcataattcccatcatattaataatattgtattttctgcaaagactaaaagtcaatgtgtaggaataccactattttatttggagtaatatacatgccagaattaacaaatatcactttagcaccatctaaattactcactataagccactcattcaatgcataccctaatggcaatatttacataggcaaaatagataccgatccggctagaccagagaaccagattcaggtttatcttgagcgtgaggatggaacgcatgtccctgtatcacaaccactgatcatcaatccggccgggtatcctgtttataacggacagatttccaaatttgttactgcgcaagaccattcaatggcggtgcatgactcttacggggcgcagcaattctatgatcctaatgtactgaaatacgatcctgagcagtttagtgaaaaactgaaagataacggtggagataaattagtcggatcatcgttcagtggttcagtttacagtgattacagtttaggtatttttaaacgagcaggtaattttagggaaggttcggtagtaaaatccaaatttgacgcgcttttactgaatggtaagtattatgcttactgtctggatgtggaacacgttgttactgaaaaggaaaatattcagactaactgggtgtgtgttggtctgctcaacgggtattcagtgaatgatattcgtaattttggggcaaaagcagatttagtcgagaaaggtattaatgctacagattgtagtggtgcatgggagttatgctatctgttttgcaagcattacggctacgcaatggtattgccagatgctcctatctatgtaactaagtcgtgtaaggttggtaatttaaatatcatatcacaatcaggaaaagcagggtttgccgatccctattatggacgaagagaagataaaacaaatttcattgatggaagtaaatcagccaattggacgtatttttataactatgaccaaggactaaataaaacatggtttgatatgtcttcaattgctacagggtgtttagtgtgttcagataaagacatttcgattcttgtaaagaaatacgatgaagaatttaagctcagcggtatcggcgttcttggaaatcatcgggcaaagaatcaaataggtattgattcaggtgttcctgaaggatatgaaggagttagatctgatcttagtaacatttctgtagttggatgcggaagtcatggcatattatttagggctggttttgaaatatcgtcgcctagcggtttaaatctttacgcaaataatgggtatggtttatacattgacgctcatgataaaatagattcaccagtagaatacttaacattcaatagaataaaagctgacaacaataggttgggagggctgggattcaaacatgttagggtaatggtggtgtttgatgatgtgataggaaacaattcaggtcagtacgattgcccatccgtgatagatccgctattggggtactggagaaagataacgccatctatttatgatgacagagcagcgctagttaaaatagaaaacggagcattgaaccatgtaggtgactacggatctatacataatctcacttttagaaatataaaaggagagcaggttgttaacttaatatccgttaataataaaataggcgatcggggagttataacaaagttgactttggataatatacacgccgtagagtcaagtaaacttaatagtgatttaaagggatgtgtatctttaatagattgcttgtatcttgatgatgtacaagcccataatatctatacaacaaacaatatagttaagttagagattgataatgtaagatatattaaaaatgagacaggctctacaaatataaatattgaaacagtaaaacagaaagctctctttaaaaagccagggacagtaatcgtcagtggttcgacaacaaatcagcaattagttaatttcacagttcaaggtatcaataacacacctgaaaacagtgtaagacctacaaataattacagaatcacagcaattagctctgataaagtagcttatgttgatatttttctatgtaaaattaacgggtcatataagtctagagtggttagtgataatgcgggagatgtaatcacatttacagcaacggatagtaacggtaacatatctgcaaccatagaaccacagtgctcttattatctaacctggttataagttcttagttagtattgggtaaaagcgagcttaaaaaccggtaagcgattttggtattgctatggagtgaaaggcatagagccgcggataaccgtggccctagacaggtaaaaccacttctccaaaattttgacataggtttcttcaaagcaccatgctaatctcaccctaaaagtgacgatcatggaaaggattcatacgccactccttcgggaaaaatggtagccttaactactactatcggctatttgtaatagtgccgttctgacatccgtcctcctaaatcacaatatttgcggtcagattacggggcacaccgttctgatccgctacgatacctgttaatacattggtaatatccaccgcgttggccatattctgtaccaaatattcatag

SEQ ID NO: 1441 - DNA, 29792 bp, Xenorhabdus sp.; identical to SEQ ID NO: 1440
  CDS (27275)..(27613)

SEQ ID NO: 1442 - DNA, 29792 bp, Xenorhabdus sp.; identical to SEQ ID NO: 111
  CDS (25411)..(25998)

SEQ ID NO: 1443 - DNA, 29792 bp, Xenorhabdus sp.; identical to SEQ ID NO: 1440
  CDS (18620)..(19186)

SEQ ID NO: 1444 - DNA, 29792 bp, Xenorhabdus sp.; identical to SEQ ID NO: 111
  CDS (23654)..(24862)

SEQ ID NO: 1445 - DNA, 29792 bp, Xenorhabdus sp.; identical to SEQ ID NO: 111
  CDS (24989)..(25402)

SEQ ID NO: 1446 - DNA, 29792 bp, Xenorhabdus sp.; identical to SEQ ID NO: 111
  CDS (22138)..(23613)

SEQ ID NO: 1447 - DNA, 29792 bp, Xenorhabdus sp.; identical to SEQ ID NO: 1440
  CDS (20190)..(21476)

SEQ ID NO: 1448 - DNA, 29792 bp, Xenorhabdus sp.; identical to SEQ ID NO: 111
  CDS (5822)..(6142)

SEQ ID NO: 1449 - DNA, 29792 bp, Xenorhabdus sp.; identical to SEQ ID NO: 111
  CDS (6155)..(6343)

SEQ ID NO: 1450 - DNA, 29792 bp, Xenorhabdus sp.; identical to SEQ ID NO: 111
  CDS (6572)..(7891)

SEQ ID NO: 1451 - DNA, 29792 bp, Xenorhabdus sp.; identical to SEQ ID NO: 111
  CDS (26022)..(26879)

SEQ ID NO: 1452 - DNA, 29792 bp, Xenorhabdus sp.; identical to SEQ ID NO: 111
  CDS (27096)..(27683)

SEQ ID NO: 1453 - DNA, 29792 bp, Xenorhabdus sp.; identical to SEQ ID NO: 111
  CDS (29461)..(29790)

SEQ ID NO: 1454 - DNA, 29792 bp, Xenorhabdus sp.; identical to SEQ ID NO: 1440
  CDS (15712)..(16794)

SEQ ID NO: 1455 - DNA, 29792 bp, Xenorhabdus sp.; identical to SEQ ID NO: 1440
  CDS (14850)..(15707)

SEQ ID NO: 1456 - DNA, 29792 bp, Xenorhabdus sp.; identical to SEQ ID NO: 1440
  CDS (12332)..(13174)

SEQ ID NO: 1457 - DNA, 29792 bp, Xenorhabdus sp.; identical to SEQ ID NO: 1440
  CDS (10133)..(11191)

SEQ ID NO: 1458 - DNA, 29792 bp, Xenorhabdus sp.; identical to SEQ ID NO: 1440
  CDS (8963)..(10105)

SEQ ID NO: 1459 - DNA, 29792 bp, Xenorhabdus sp.; identical to SEQ ID NO: 1440
  CDS (8312)..(8785)

SEQ ID NO: 1460 - DNA, 594 bp, Xenorhabdus sp.
  CDS (10)..(567)
tgctctaaaaacgcatcctgtacaactaactgccttgctccactggctaaagttatcaacgataaatttggcatcgttgaaggtttgatgacaactgttcacgcaacaacagctactcagaaaactgttgacggcccttctgcaaaagactggcgtggtggccgtggtgcggcacaaaacatcatcccatcttctaccggtgctgcaaaagcagtaggtaaagttattcctgaactgaacggcaaactgactggtatgtctttccgtgtacctactcctaacgtttctgttgttgacctgactgcacgtctggaaaaaccagcaacttataaagaaatctgtgaagcaatcaaagaagctgctgaaggcgaactgaaaggcattctgggttacaccgaagatgacgttgtatccaccgatttcaacggcgaaaaactgacttctgtcttcgacgcaaaagcaggtatcgctctgaacgataactttgtaaaactggtttcttggtatgacaacgaaacaagttactcaaacaaagttctggatctggtcgcacacatttctaaataattgaacctatctaccttataaatttca

SEQ ID NO: 1461 - DNA, 27693 bp, Xenorhabdus sp.
  CDS (877)..(1428)
ggcgggttggcggtccttaattcatggccttaacacttgttccatgcccaccgattgccagtactccgccaagagttaaatcaccgggtgccggagttgcagtaaaaccaactccttgctcttccatttttgtcatgagtgtttccattaatacaccagcctgcgcagtgacaatggcatactcaggaagatgcttaatacttacttgattaaagtgctgggtaagatccatgagcatgacttgatgattattttgttcctgagctgaaatgatcaaaggcgaccagttatgtgactctcccaccactctcagtttataattttttttccacgcccaattaacaactaaaataatttctttgtctgatttagggatacagcatggaatatgattcgaataaatttcttctgaccagttaataaattctctatatatcaattttacgtctttagggaaatcagttaatgtcaggtttgtttttttattcttgttttctttatttaatttgtttggatttttgttttttatgttcattatgttattaccttgtaggatataaataaaataactattttgaatccatgtttataatgtggataacaagaggtgttattttttccattaatactattttgttttaatttatgacttattagagatggctttattcatcccctggctataaattcaggccaggtacacggcataatattacttgaagggagatgattctctttcctgttataaatagtgtagaacctgataccattattttatggaagtgatgacaccatttttagttgttattttgctgaaaaccgtataggaatacgcagaatatgagtaacagacagaaaaatggaagaaacaaacatatgaccttcaatgtgacagaagcacttgctgattttacccgacgctatgttgaattgtggcaggaggaaaccggattaccaccagcgagtagtgaattatatggtgtaccgtccccctgtatcgaacgtacaggagatgaggtggtgcactggcttccgaagccttttactccagcggataaactcagtaaggtagaaaacgcactggatatctgtttgcagaattctattcacgactactatgtcactcagttagcgggcgacatgtctgccagttttgatggattgagcttcagcttgattcaggtatggagtgaggatgattttgtccggctacaggaaaatctgataggccatcttgtgacacaaaagcgcctgaaactctcaccgacggtatttattggtacaacggattctgatatggggctgatttctgtatgtaatctgacaggtcaggtcatacttgagcaatttggcagtaaggaacgaaccgtattatctgctgatttagccgctttcctttctgctgctacccctgtgatatcttcataggtgcagatatcagtttacttttttgtatgaggtggtgcactggcttccgaagccttttactccagcggataaactcagtaaggtagaaaacgcactggatatctgtttgcagaattctattcacgactactatgtcactcagttagcgggcgacatgtctgccagttttgatggattgagcttcagcttgattcaggtatggagtgaggatgattttgtccggctacaggaaaatctgataggccatcttgtgacacaaaagcgcctgaaactctcaccgacggtatttattggtacaacggattctgatatggggctgatttctgtatgtaatctgacaggtcaggtcatacttgagcaatttggcagtaaggaacgaaccgtattatctgctgatttagccgctttcctttctgctgctacccctgtgatatcttcataggtgcagatatcagtttacttttttgtaagacatatctcacatgtgatgtgagatatgtctcttaatcatcgtatcaatacctctgataaatattatttttattttatatcaataatatgcaaattattatcaagatatctttttggtgaaatgcttttcctgacaattcaggtagcttgtttcaagctactgaatcgacgattattttgttgttccgctaggaatcacagcgacaaaattattaaggaatgatgtcatcaggaaggtgactcaaggatgattcggttcgggcaggactgccagatactatcaatataatgatcttttaaggaataacagacagggaagtactttgtcagggaatgcgcaggaagcgaccaatttagccggattgctatgataatcaaataagaggggagatactgtctcccctcttattttgttttgtggcattttatgctgtcacatatttttcgctgagatcgaacaatgatactcttacgatttaatgacgcaatggcagttcctgctattgggattacagtcaggataagataagaatcatgagtatcgagaaacaaattctccacaaattacagctcattgaagccacgatgaaaaccgttggcttatggcagagttacccgcccaaaccagaagcgtacgaaagcacagagcctttctctattgatacgatggcggcggaagaatggctccaatgggtattaattcccagaatgagtgcgctgattgagcaaaaagccagcttaccaacatcatttgcaatcgctccctattttgaagaagtctataaagaagagacagaacgttatttaccgttgcttaagcatttgcgtgaactggacagcctgtttacatcggatgatctggcagggaatggttgataatgctggatattatctatcaggatgaacacatcgttgcagtaaataagccggcgggctggttagttcatcgtagttggctggcgcgtcatgaaaccgtctttgttatgcagacactgcgtgaccagattggtcagcatgtttttcctgttcatcggctggacaggccaacatccggcgttttgctgatggggctgtcgagtgatgtggcccgaacactctcccggcaattcgaacatcagcaggtgcaaaaaacgtatcatgcagttgtgcgtggttatgtcgaaggagaggagattatcgactacgcattaatggaagagttggataaaattgcggataaattcgctgatacggacagggaagcgcaatccgccattactcattatcgcgcactggcgaaaattgagtgtccggttgaaatagggcgttatccgacatcacgtttcagcttattggaactgaaacctaaaaccgggcgtaagcaccagctacgacgacatatgtcacatatccgtcatcccattatcggggataccacacacggggatttgcgtcagaatcgaggagttgctaaatattatcagacaggcagattaatgctgcatgcaagtcaccttcaactcaggcatccggtaaccggccaggagttgttattgaccgcccgttgggattcttcatggcagcatttgcttgaacaatttggctggcaaggccttgtaccggaactggaatgttcacatccggttgcttgtgaattacagccgacagaatagccgcctgaaaaaataaacgttcaccacttatacctaatgataatgaatttcgaattgcatcgcggcggcaagggagtgaacccccagaagcatagataatgtgactggggtgaacgagcgagccaacaaagaggcagcttgaaagacgaagggtatacgaataaaagcagtatcaaacagaatgaagggatcatatctatggcaaagattggtattttcgttggtacagtttatggcaatgcattggccgttgccgaagaagcgcagcaaattcttgagcagcaggggcatgaggctgaagtatttgaagaggcaactttggagcaatggcaggaatacttacagcaggtagtactggttgtgacatccacaaccggacagggggatttgcctgataatatccagccgctttatgcggaattgaatgatcaactgggttatcagcctgatttacgttacggccttattgcgctgggtgacagcagttatgacactttctgtggaggaggtcatatctttgatgcgctgctacaagagcaaggcgctaagcggatcggtgaaattctgcagattgatgctctcgaggtagttgagccggaagtttttgctcagggctgggttgaggagtggggaaatttattataggcgctcccgctcataccgttggttataccgcttataccctttatctctttgctgccagaaaagggataagcggtgtatgacacagctgatatcattacttgcgggtcagtttttctaaatctgcttctatttctgcgatcttattggcaacgacatgctcaaggtgacgtaagtcgtcgaggattttgtgtttcaaatccacttctgcctgttcacgtttacaaatttgatccagttcttccagcacataacgcaggttggtgttgatctctttaacttctttgtaaccttgccctgcattatcgtcagagacagttttgagctggcgtgggtatttgaatttaacgcttttggcaaagaactcacccctatctttgcgaaaataaatcttaagaatgtcgttattcgcttcctgacggaggctatagcgatcaatatcttcagggtgagtaatccctaaactcttcaagttatcgtacatagcgcgtcacctagtcacctaaatgaaatggaaaatattaagaaaacagcggatttattatccatttcgagtttgttgaaagtcaatcaatagtgactattaagaaaatataaagtttatgcaataaggaaataattttttaatttcaatggattatgtgtttttcttttgtggcagataaatttaactacatgtatggtattttttggtcatgtatttaaggcgttgatctccctcaaacataatatttacgttcaatgaaagtgccaatgattttgtcatgcattttaggtaactttgaataacccaatgttttacggttcaggtgcttaattcggtgatgaagaacaacgccttaaatacatgacctagtgcatggggctggctaaagctaataccctgactcttcaattaaatataggtggaattctaacttaattgtttggtttttatgataaccagatatttatttaaaataatataaatcctccatgcagcctgcaaaagcaggcttttctctgccaatcttgtaaaaaaatttgctcatcacacagaagaataaacagaaaatcccttacatccccgccggagtcactaccaactgccctgccacgccacgatcggcccattctaatatctggctgtaatacataaacgggtagtgttcataggatggctgcatcatattgaccaacagctcggttctgccatccacccagacggtatctttccagccataatcctgcggctccggttgtactccgttgtgcttgataactttgaatctggccccttcgatatgaaaaggctgtggaatcgatgttgttactatccagcgttcccatgctccctgatggctggtcatgtcggttcggttggggttcagtaatgccccattgatgccctgtgtttcatcccctaaaacaatttgtcggttgcgaattgaagaatcaatgccagtcgtatcggtcacaagctgagaaggtagttcttctgtgaccaaaggtagcaaccctcctgatttaatcgtcagaacatttgttgagcgcaatttactggatggttcaaacagccctttcagacgatcgatcatgccggcagattctcccgctgtgataacaacactgtctgctttcgacatatcaatcagcacctcacggcgttctcccggtgccagtgaaagcgtctgaaccgccaccggtgctggcaataacccctgatcagtcgcaatcatatagaaaggccggccatcactgagctgtaattggaaacggcgggcattggcggcatttaacagacgcagcctaatccaccctttggcaacttcgataaacgggttttccaccccgttaataaccagtgtatccccaaggaatccctgactggcggaagccttgtcatagcggggcgtaccaaaattatccaatcgtttgtcctgcaaaataaccggaaaatcatcaacgccataatgtctgggtaaaggcaggcgatgagtattttcgtcttccaccagccacattcctgctaatcctgcataaacctgttccgccattcggtgtggtgtattagcgtgataccaacatgttgctgctggctgatcaatcggaatgaccggagaccagttcccatgagcagggatcaggcgtgattctccccccatcagtgttccgggtacctgtaacccgcttacagtcattgaaaccggctctgacaggcgattactgtatatcagtttaacgttatcccctttacggacacgaatagtcggccccagatagaggccattgatacccgacactgacgccttatttttcccgtcaaaagaccagctggctctctgaagagctaaaaacaggggctggccaccgcgagattccagtaaggggggaacaggtaatactatttgttggtctttatctgcctgaacagcaaaggggagcgctcctaaacatactgctaaaccagatgcctgaataaattggcgccgactcagtgacatattttctccacggcaggaatgagctccacgaaaagaaagaatagctgcccaaattgagtgcttatccatatctaattgatttcaaattatatcgcggcagtattaccctttgtttttcaaatcgcgcctttgttggacacgtgttgaaatccactgggtatagatatatatcttatcgattgcgtttaataaaaaacgttaatttatcaaaaagcaatcatatcgcgaacaggggataaattctaaaactatcttaaatttatagtcagaattaatccccatatcagaaaggagtacttcgtaaaaatagcgtaagttatttttaattcaattaactgcgcttgttaagctcctcaacttctttatccagcgcttcaatcttggtcttcatcacctgatgacaatgttcagccaattcacgaacccgctcttttgtatattttgttgtatcaatcggcggcagcatttcaacaataaccgtaccattattccaacgattgagcttgatcttgccatgtgttgaagaaacacaaaccggtacaatcggcactccggccgcaatggctgcatggaaagcccccgttttaaacggcattaaaccacgaccacgactgcgggtaccctccgggaacatccagacagaaacattgttctttttgatctgcttaacaacctgtgaaatcgtcccgtgtgcttttgtcctgttttgtctgtcaatcaggatattacctgtcagccagtacaactgaccaaagaagggtataaaaaccagactttttttaccaacagtcaccgtgcggggctgtacagcgtttgacatggttatcatatcgaaattgttctggtgattaccgatatagatgcttgggccaacttgtggcgcatcttcaggaatacgttcaataagcttgataccgaatattgtgtgcagcttgccaaatgcccggccaaaggtcatcacatggcgcggatcccgggggctgaataggcagtaaatcccgccgaatatacagactagaaaggtgaacagaataacaatgatcccacgaataatggttagcatagtttcctcttgcaaggcaggccagtgttgtactggcctgctatcagggttatttgagtatataaaaatgaagttatgttcagtttaattttgtttctatttctacgcgctcgacacgctgtaagccacgcggcagggctgttcctttacggcctctttctgcccggaatttctgcaattcctctggctgaagctgtaatttgcgcttaccgaaataaagcgtgattgaagattttggcggcaataccagcaaccagctcaatatatcttctccggaagccgcctgcgccgaggtaatggaaactattttattgcccttaccttttgacagctgcgggagatcggcgacaggaaacatcaacatacgtcccgctttggtgatcgccagtaacatatcatcctgttcattgccgatctccaatggtgacatcaccttagcgttttgtggcaacgtaatcagggccttccctgcccggttcttggcaattaagtcactgaaggtacagatgaagccataacctgcatcagatgccatcaggagtttctgatcttctttcgccatcagcagatgctcaacggatgctccggccggtaatgccagtttgccggtcaaaggctctccttgccctctggctgaaggtaaatccagaggatcaatagaataactgcgcccggtactgtcaataaagactaccggctgattactcttaccacgcacagcatcgcgatagctgtcaccagatttgtaatttaaaccggtaggatcaatctcgtgcccttttgcgctacgaacccagcccatttgagacatcacaaccgtaatcggctctgatggcagaatatcatgatcgctcattgccttcgcttctgagcgttctttcagcggagaacgacgcttatcaccatagttttctgcatcggcaataatctcttttttcagcagcgtgttcagcttgcgctcagaaccaagaatagcctgaagtttgtcccgctcttttgccagttcatcctgctcaccccggattttgacttcttccagttttgccagatgacgcagtttcagttccagaatcgcttccgcctgtgtttctgttaaaccaaaacgctgcatcaacactggctttggctcatcttcactacggatgagatggatcacttcatcaatattgagataggctgccagcaaaccttccagaatatgcagccgcttgagcactttttccagacggtggttaaggcggttacgtaccgtttcacgacggaataccagccattcactgagaatttcaaccagacctttaacacttgggcgattgtcaagaccaatcatgttgaggttaacacgatagctcttttccagatcggttgtgacaaacaggtggttcataacctgctcgacatccacacggttagtccggggcacaatcaccagacgcgtcgggttctcgtgatcggattcatcccgcagatcatcaaccatcggcaacttcttcgagcgcatctggctggcaatctgttctaatactttcgcaccagatacctgatgtggcagagcggtaattacaacgttaccctcttcttttgaccacacagcacgcatacgtatcgagccacgaccatttttgtagatcttacggatatcttctttcgaagtaatgatttccgcatctgtcgggtaatccgggcctttaacgtgctccataacttcatcaagtgaagactctggtttatccagcatggaaatcagcgcattggctacttcacgtgagttatgaggcggtatatccgttgccataccaacagcaatacctgttgtgccgttcagcaggatattaggcagacgcgcaggcagcattttcggctcctgcaatgtaccatcaaagtttggcacccagtctactgtcccgtgccccagttcactcagcagtaactctgcatactttgacagacgggattcggtataacgcattgccgcaaaagatttcggatcatccggagcaccccagtttccctgaccgtccacaagtggataacgataagagaaaggctgtgccatcagcaccatcgcttcgtaacaggcaccatcaccatgtggatgatatttacccagtacatcaccgacagtacgagcagattttttgaattttgcactgctactcagcccaagctctgacatcgcgtagacgatgcgacgctgtacgggttttaatccatcaccgataaaaggcagcgccctgtccatgatgacgtacatggaataattcagataggcgttttcagtgaatgtgtggagcggctgacgttccactccatcgtgagttatttcactcatgtattaatttcctcaaaacccgtcatctttcaagttgccgctttagttggccgctatgtatcttgaaatctaccgggtttaaatttcaattcaattgctatacttcaatatcaatggaatcacccttttcttgcagccagttacggcggtcttccgagcgtttcttcgccagaagcatatccataacggaaagggtttcctgataattttcatcattgatagtcaattgcaccagacggcgagtattgggatctagcgtagtttcacgcaactgcatcgggttcatttcacccaatcctttgaagcgctgaacattcggcttaccgcgcttacggctcaggcggtcaagtaccgcgctcttttcaccttcatccagtgcatagtgaacttctttgccaaggtcgatgcgatacagtggtggcatcgccatataaacgtgaccgcgtttgaccagtgtcgggaaatggcggacaaataaggcgcacagcagcgttgcaatgtgcaggccatcggaatccgcatcggccagaatacagattttaccgtaacgcagctggctgagatcttcactgtcaggatcgataccgattgcgaccgaaatatcatggacttcctgcgaagccaatacttcatctgaagagacttcccatgtattcagtattttaccgcgcagaggcataatggcctgaaattcgcgataacgggcctgtttagcagagccacccgcagaatccccttccaccagaaacagttcagtgacattgagatcctgtgaggtacagtcagccagtttccccggcaatgccgggccgttggtcagcttcttacgtaccactttcttggccgcgcgcatgcggcgctgagcgctggcaatggccatttcagccaattgctctgcttcctgaatatgctggttcagccacaggctgaatgcatctttgacaacaccggaaacgaaagccgcagactgacgcgatgacagacgttctttagtctgcccggcaaattgtggatcctgcattttgagggataacacataagcacagcgatcccagatatcgtcggcagaaagtttgacgccacgaggcaaaatgttgcggaattcgcagaactcacgcattgcatccagcaacccctgacgcaacccattgacgtgggtaccaccctgtatagtcgggatcaggttaacatagctttccgccagtaattcaccgccttccggcagccagagcagcgcccagtccaccgcttcagtctcgccactgagagcaccgacaaacggggcttgaggtaatgtcaccagcccattaactgcttccagcaaatagtcagtcaacccgtcggcataacaccatttttgctcagttccggccagtttatccttaaagataatttcaacgccggggcacagaaccgcttttgctttcagcaaatgggccagacgtgaggtcgaaaaacggggggtatcgaaatagctttcatctggccagaaatgcacactggttccggtgttacgttttccgcaactgcctataacagccagttcctgtactttatcgccattttcgaaggcgatctgatgaacctgactgtcgcgacgaacagttacttcgacccgtttggacagggcattaacgactgaaataccaaccccgtgcaagccaccggagaactggtagtttttattggaaaatttaccacccgcatgcaagcgggtcaggatcaattcaactgctgatactttttcttcaggatggatatcaaccggcataccacggccatcatctatcacttccagagactgatcgctgtggagaatcacttgaatatgcttcgcgtgaccagctagcgcttcgtccacactattatcgatcacttcctgtgccagatggttcgggcgggcggtgtcggtatacattcctgggcggcgacgaactggctccaggccactgaggacttcaatggcctctgcgttataactagattgagtcatgttgtaattctgtcggttgcttcatgattaaagggccaatcagtattgattaccctacgtatcccggaacgccctcagaacggcgttagcccggaatccattggatagatactgttgataataccagtcgcttacctatttttggcaatttttttactattgccgctggctagccccaagaagtcaatgatttgaggaaaatagtattcgaaaccaataaatgcatgatttccaccagattcgacagtttgtctgcactgcatcaggtaggcaaccgcctgacggtagtccagcacttcgtccccggtttgctgtaataaccagataagatccggtgattccagcgggtcaatatgcattactttgaggtcatgaatgtggctttcttcaagagtataccgctcttcggtataaggattcacgttttccccaagataatcctgaagaagatcgaatggacgaaccgcaggattgacgactacggctggcaggccaaagcattgtgaaagccagatggccagataacctcctaatgaggaaccaaccaaaccgatgtgttcccctgagcggctcatcactatttcttccagtaaggctgccgtatcttcgggataaggaggcaattgtggcaccagcatctctatttcagggtgctgctggtgcaaccatgttttcagcgcagttgcttttgctgattgggatgaactgttaaaaccatgtaggtaaagtaacgttgacattaatacccgtccgaatctaaatccgggcaaaattcattactcttgagcctataaagctgcgtttgcagttctgcttctccgccaccagtcacaggcaattcaaggtaacgccaacccggagccactgtatcaagcataaaattagtacaatgtggcttaaattgcacacaggttgatggtgttgctatcacacgaataccattccagattacatccagctcttgatggatgtgcccgcacagtattgttttcacctgagatttatccttcaggcattctgccagtgcaggagcattgcgcaggctgtgctgatccagccatgtacagccggatggtacaggatgatggtgaagcatgacaatcgcctgacgatcactgtgttcatccagacatttactcatccattccagctggtattccgtcaattcgccgtggggaacaccctgcacctgactatccagcatgataagctgccagtgctggcctatgaatatttgcttggaaggtgaaatctccgccgccgccagtacatcaaccatagcaggctgataatcgtgattaccgggtaaccagacacaaggggcgggcaaacgggcaatgccttcaacaaaattctgataggcaccgggagtctgatcctgaactaaatcgccggtcgcaacgaccaaatcaatatcaatattctgctcaaggatcgcatccaacacagcatgataactgcggtaggtattgatacccagcagtgagccacctttattggcaaaaaggtgcatgtcagtgatttgcaatattcttgctgtggcacctttcgccacaggtatttcaagcaggctttccaaatggtttccttttcctgtcggtcatagagggtcattctaacgtgtctttacacataagatctgctgactggggcacacttcacgtttcccaacacaaaattgccgtttatatttccagccactcttttttcagttttgcatggtgcaatgccagccactgtattgcaataactgaagccgaattatcaataattccctcttcaacccattgataagcctgctctctgctgacaaccagtacccggatatcttcattctctccttccagaccatggatacctgaggcagtagaagagttgacttctcctacaaaaatactcatgcgctctgttgttcctccggggcttgcaaggtaactcagtgccggctggcaacgtttaacttcaatacccgcttcttctatcgcttcacggcggacaacctgctcagcatcttccccttcttcaatcatgccggcaatcacttccagcaaccacggtgtctggctggtttctatcgccggaatgcggatctgttcaatcaggacaacttcatcacgcaccggatcataaggcaacaaaacaccggcatgaccccgttcaaatacttcacgcttaatattctcgctccatcctccacgaaacagacggtgtttgaattgatactccgtcattttgaaaaaaccgtgatagagtgtttttcgggaaatgacttcaacatcttgtttcgaaaacgtaaatggtttttctgaatctatcgattttgtagaaataagcggtgaggtaagatcttcgcgcataaaagctcctgtttgttatcttttaattctctactattaaaatgtattttttcacattgttctaaataaattgattttgaagatacaaacactctagaaaataaggcaatatggcacaaacagccaccttatactgcaagtattctctgctagaatctgtgatattgtttttatgcagaggcaacttaagcaaaatagctgcacaacaaggaacgcaaatgaaaaaattgctatctctttttatcgctataaatctggtaggtttcagtacttcaggccacgcagaagacctgttacaaatttataaacaggcgaaagaaactaaccctgagttgcttaaggcgctggctgatcgcaattcggtttttgaagggattgatttagcccgcagccctttgttacctcaattaagcctgactgcgggagccaaatatcttaaaagttttcgcaacagtgaacaggaaaatcacggtatcaacgcaggcttatcgctgaaacagagcatttttgatatgtcctcctggagtaaactgaatcaggcagaaaagaaagcagggattgccgatatcagttatcaggcagcccagcagaaattaattctggataccgccaacgcttattttgatgtcctgagcaaaattgatgctctgacctatagcgaagctcagaaatcctcactctaccggcaactggatcagacaacccagcgcttcaatgtagggctggccgccattactgacgtccagaacgcccgtgcccagtatgattctattctggcacaggaagtttatgaccgtaatgagctggataattcattggaaaaattgcgcctgattaccggtgtttattacccacagctggcttcattgaacattgaccacttcaagacaagtaagccaaaaccggctgaagacttgctgaaagaagccgaaacccgcaatctcaacctgttatctgcacgcttgatgcaggatttgaaacgtgagcaaatcaaagatgctcagactggttatatgccaactctcgggttgtcagccaatacaggagttgagaatgaacacacgcgtcatagcagtgccagtggcaatcaatatggtggcaaccattctgtcagtgtctcattcagcatgccactttacagcggcggtgcaaccagctctcaggtagaacaggctaaatatgatttcctctccagcagccaggatttagaaaatacttaccgcaaagttattcaggatgttcgttcttcctccaatgatattgcagcttctatcagtagcattgaagcgaacaaacaagccgtgctctccgcagaaagctcactgcattcaatggaagccggttatcaggtaggcacccgtactatcgttgacgtgctggagtcaaccaccaaactgtatcaggccaaaaagaacctttctcaggcacgctataagtacctgatcagcctactggttaatcagcaatcccgtggtactttgaacgaggacgatctggcggcactgaataatatactgggaacacaggtttcaacctctgccagcaatattattaaagagatgaaaacaccatcaattcgctgaattaatgcgctatcgttttagattaaaaaacgttatattaaacgcgctatactcaataaacagcccgccgttgtgtgggctatttttaatagagcctaatataccctatggatttcgagttgcatcgcggcagcaaaggagcaagtcccctgagcatagataactatgcgactggggtgagcgagtgcagccaacaaagaggccatttgaaagacgacgggtataagccatcccattgtgagtcactggtgggattagctcttaatctaacctgatacctttaagatggatgctccctatgacaatgaaacggacaaaagagattaaccgcgatagtttccgcaaagcgtggaaacaatatcgtctggcacctgtggcactcgctgtcagtgctgttttcatgctttctgcctgtgaacagaacgatgaaacggtatcgctttacaccaatgccgatgagtgttccaaggcaaatccttctcaaagtgaacaatgtaccattgcttataacaacgccctgaaagaagcagagaaaactgcaccaaaatatgcgacccgtgaagactgtgtggctgaatttggtgaacagcagtgtactcaggctcctgcacaagcaggtgtcggcactcaggcacaggcacaaagcagtagcggaagcttctggatgcctttgatggcgggttatatgatggggcacctgatgggtaacagatctgcgccttcgcaaccgctgttctcatcaaaatcagccagcagcccggctaatggtaaatttgttgacgctacaggtaaaagttatggcccggctaccgctggcggtcgtagcatgtctgtaccaaaaaccgcaatggcgccaaaaccggcaaccacaacgacaattactcgtggcggattcggtgattcggtggcaaaacaatccagtatgcagcgttcatctgctggctcaagttccagttcttcccgttcaatgggcggctaagtcaaagtgagtattaagtaaagatgaaacgcattagtattactgagcgcccggactggcgcgaaaaagcaacagaatatggcttcaatttccataccatgtatgaccagccttactggagtgaagaggcttattatcagttcactctgcgtcagattgaagaaattgaagatgctaccgcagagctgcatcagatgtgtttgcaggttgtggaaaaagtcgtcaatagtgaagagctgctgacaaaattccagatcccgaaacattgctgggagtttgtccgctcttcatgggtaaccagtcagccttcactctattcccgtctggatttcgcctatgatggccagaatccaccaaaactgctggaaaataatgccgataccccaacatccctgtatgaatcggcattcttccagtggatatggctggaagatcaggtcaatgctggccatctgccgtcaaatgcagaccaattcaacagcctacaggaaaagctgattgagcgttttgcgcaattacgcgaaaaacacgggtttggcctgctgcatatggcatgttgtcaggacagcgaagaagaccgtggcacaatccagtatttgcaggattgcgcttcagaagccggtattccgacagaattcctgtttattgaagatatcggtctgggtgaaaagggtcagtttacggatttacaggatcaggtgatcggtaatctgtttaagctgtatccgtgggaattcatgctgcgtgaaatcttctcgaccaaactggctgatgctggagtccgttggcttgaaccagcatggaagagtattatttccaacaaggcattattgccgatgctatggaaaatgttcccgaatcaccctaatctgttacctgcttactttgctgatgaacgtccggcagacatggacagatacgtgattaagcctttattttcacgtgaaggggccaatatccgtattatcgagaatggccgggaaatagccagtgcagatggcccttatggtgaagaaggcatgattgttcagcagttccatgccctgcctaaattcggtgataaccatacgctggtaggaagctggttagtgaacgatcaggctgcgggtatctgtatccgcgaagaccgtgaattaatcacacaggatctatcccgcttctatccgcatatcattctggattaattcagtcatatccaatcgatgttgaattgcatggcattagcgaacagttagtaacccccaggaacatagataactatgtgactggggtgggcgagcgtagccaatgaagtgcccgttcgagagatgaagggtattagcctaattggattgtcagcatacttaaggagccatcttcaatcccttcaacaggcgttgaaattggctcttctttatcccatgttcccattacatagaaaagtggcataaagtgttccggtgtcgggtgggataatttaccatcttccctatccaaggcctgaagtaacggatgtggctcttcagtattcgtcaggttttcacgtacaaactgctcaaaagaaagtgcccacgggtaaggttctgcgcccagctcttcggctggcaggttatgcacgacattcccgctgccgatgatcataacgccttcatcccgtaacatagatagttttctacctatatcataatagaaagccgtcgactgattacgatctatactcagctggatcaccggaatatccgcatcagggtacattttagctaatattccccaggagccatgatccaatccccattcgtcaaaatcagtttcgacctcaatcggctcaagaatatcctgtaccaaaacagccagttctggataaccttttgctggatactgtttttcatgcaactcacgggggaaattaccaaaatcgtggatagttctgggctgaggcatcgccgtcacagcagtaccatctatataccaatgtgcagaaatgaccagaatggctctcggtctgggcagtttttgccctaattcaaaccaggctcgtgaataacaattatcttcaatggcattcattggactaccgtgaccaatgaacaaggcgggcattctcaggagactcattctcgtccctcatacagcaaatcaaacatggtggattatgaatagcgacaaaaaaattatggcaagattatgatgtttcttccctgaatatgaccaatcaaaaaataatggggtactttaaaaatactgaaaggccacagggtgtggactgcggccttataagcgtacatgcgataagaactgatatattctatcctgttcggccttttattccgaactttttttatccatcatgatcatggctcagaatttagttctatcagttaagaaccatgaaatatttcatgctaatagaggacgatatcagcagaagaaaaccaccgtgctgaatcagctgacagccttttccattttaatgcggtagtcacccaaatcttcaattgtgaccactggcatctcgtgctgttgagcaaattcaatcacctcaggtgctctggccatggagccatcatcattcgtcagctcacacaacacacccgctggtttgaagcctgccagtttgaccaaatcaatcgttgcttctgtatgaccacggcgggttaaaactcccccgttctgcgcccgcagaggaaaaacatgccccggacgattcagatcatccggctgcgcgccatctacaatagccgcacgaatggttgtaatacgatctgcggcagatacgcctgttgtcactccctgtgcagcttcaatcgtaatagtaaaagccgtctgatactggcttgaattgttttccaccatcataggcaactgtaattgccgacggcgctcatctgtcatgcagagacatacaattccgctgccataacggatagttaatgccatttgttccacagtcatggtttcggcggcgaaaatcatatcaccttcattttcacgattttcatcatccaataccattaccccaccgcctgcacgtaaagccgcgatcgcgcgttcaacacgttggaatggagtgccataggaagaaagtagcgtctgattcatggtaaaaaaacctcttttaagtatatgggttaccagaatcagggcgattttgaggagttgatattgcttaaaaatgaagcaaaaaaaacaacagacgagcgcaagcgcccgattgatgctgttattctctcccatccggactataaccgtcggctccagagtcacactggatctgctgacctctatttatactccggttgtttatgtttttaacaacaacggaataacgacaaacagagcgctcgcgggcttcatgaaatcaccagaagataatttcattttaccgccggtagggactttcaccctgccctgagataaaccattcgactataacgttaatgcttcatcagggcaattagtaaaaaccaaatataaaacctgtctcgcaatcatttgtgctttcgccagcaggtattaaaatagcgacaacattatttttatttttccatatgacaggttaaaaccaccgtctttagacggtgactttgactttaatgttttgacctacgcgcgtttacgaggtgcgtggttcgacgactttcagtcgtcagcaccgaagtgcgctaacccacctacttcagtaggtggtagttaagtaataacagcccggtgattaaactgacgctgtcagtaaaaggatacccattatgctcgatccgaaaaaaattgaacaaattgcccgccaaattcacaatgcgatgccgaaaggtgtaaaagagtttggtgatgatatcgagaaaaaattgcgcactgtattgcaatctcagttgagcaagctggatctcgtcaaccgtgaggagtttgatgttcagactcaggttttactgcgtacccgtgaaaaactgatcagtatggaacagcgcctgaacgaactggaagctcgtttcgaaaccccaaaaacagcgattaatgccgaagagagtcatggcgaaaagaaagctgattaatacataaggagaattgcaacaaaatacaattctcccaatcattcaggctatgccgttgatgtcatccgttaaattacgcaaaaacataacggcattatggctcagataaaattactggctttttatcgccttaataatattggtcgttgagatcccgtcttcaaaattcagcacctgtacttcaccaccagcggcccagacttcctcactgccagcgatctcttcgggcttataatccccgcccttgaccaaaatatcaggcaaaatgcctgcaattaggcgctgcggtgtatcttcttcaaatgcaacaacccagtccactgactccagtgcagacagtacaatcattcgctgttccagcggattaactggtcgcgtttcacctttcaggcgtctggttgaggcatcactgttaacggccacaattaggcgatcgcccagtttacgggcattggacaaataagatacgtgccccgcatggagaatatcgaaacagccgttcgtcattacgatacgttcaccgcgctgacgcgcctgctcaacaacttctttcaggcgtgattcattcatcacaccaaagcctgtttctgcacgcccacgcacggcattttccaattccaccggggaaacagtggaggtacccagtttaccgactaccactcccgcagccgcattagccagataacaggcttcagccagtggcttaccggctgcaattgccgttgccagaacaccaattaccgtgtcaccggcgcccgttacatcaaaaacttcctgcgcctgagttggcagatgtaaaggaggctgcccgacacgcagcagactcatgccacgctctgaacgggtgattaacagtgctttcagttccagatcttgtaccagcttcgtacctttgcgcaccagttcatcatcatctttgcaatgaccaaccacagcttcaaattctgacatattcggagtcagcagggttgcgccacgataacgctcaaagtcgtggcctttagggtcaatcagaactgggacaccagcatcatttgccagcttaatcattgcctgaacctgactcagcgcgcctttagcgtaatcggacaataccagtgcaccgatatttggcagagattgctgaattttctccagcattggctgagcatctacgttctggaagccttcttcaaaatccagacggatcagttgctgattacgcgaaagaatacgtaatttcgtaatagtcggatgggttgaaacggaaacaaaatcacaccggactttcacgctgctcagtttttcgcttaatgcacgagctgcatcatcaatacccgttaacccgactaaatgtgaattagcgcccaatgatgcgatattcatagcaacgttagctgctccgcccggacgctcttcgatggtgtcaactttaacaacaggaaccggcgcttccggtgaaatgcggctggttgggccgtaccaatagcgatctaacatgacatcgccaacaaccaaaacacctgcacggtgaaaatcagggagtgctacgttcatcccatgctccaaatatcagaataaattgtggcggatattaccataaccagccagaatgccagaaagaaccctcagaaaaagccaaactcactgtgctttatctccaagccatttctgccagctattgtgtacgagtgctttctgttggatgaaccgttcagcaggcacatggctggatagtgcctgtaaagcaagctggtgcagttcattacgcagagtgatataagcctgtgtcagtgcacttgcttcctcctcgtccataatattgtattcagccattaactcaaaaatgcggacattatcagaccagcgggtcagtttggcgttttcaggggcgtaacgcagtacctgatattgggcgataaattcaatatcggtgatccctccgggatcagctttaatatcaaactgaccatgttgatggcttcccagatgccgatacattttttcgcgcatttcacgtacttgttggcgcaacagttcaggctcccgtggcatacatagcgtttcacggcgaatacgctcaaaatcgccccgcattttttcatcaccaaataccatccgggcacgaatcaacgcctgatgctcccacgtccatgcctcttttttctgatattcatcaaaggtttcaagagtactgaccaacattcctgattcaccggacggacgcagtcgggcatccacctcatacaacacacctgacgctgttcgggtactgaataaatgaaggatccgctgggccagacgcaaatagaactgacgggcatcaatggaacgatcaccatcagtcattaccccaatcgggcagtccagtaaaaacaccaaatccaaatcagaaccataacccagttcccatccacctaatttgccatagcctagaatggcaaaaccaagcccctgacgttgcgataaatgagttggtgtaccgaaacgttttaccatctggttccacgccagatgcacgaccgcaccgattatcgcttcagccagataagtcagatgatcgctgactttcataaccgacagggcacctgcgatatcttctgcggctatccgaaatagttgcgcctgtttgaactgcctcagagcttccaataactgctcttcatcatcttcaggaatacgcaataagtattgatacagctcatcccgatacgcctccaacggtaatggcttatacaatgaagtcggatcgagtaattcatccagtaatagagggtgatggctaagctggcaggcaatcatcggagaagcggcacacagacgaataacgtgggtcatcacctgttctgactccagaatcagctccagatatgttgtccggctgacgatactcagcaataagggaataacccgctccaatacggtattggtatcttctcttgccacgatttttgccagcagacgaggcatcagatgatccagcacatcacgtccccgtgggccaatggtgcgcttactgatatcgttacgtagagataccatcgtctcgagcattttttgggcttcaggttcactgagatgaggaacaagtgccatcagttcgtctctgttcagatactccagccataagctcttaaacggcacatgagcggagacttcgccattaccctcagtttcatcaccgatcagctgctgaaaaatatcccgcacaaccagcatatttttttcggtttctgctgttaaatgatcccagtcagaaaatcccattccccagcataaacgggcacgatccagttcattctccggtaacgtctgggtttgttgatcacgaatggattgcagcaaattctcaagccgacgtaagaacaggtaactttctttgagttgtctgacctgctcctgagtcaataatgccaatgtttcgatggcttccagtgcccgtaataatgaacgggattgcaggattggctcccggcctccgcggatcaactgaaatacctgtgtgataaattcaatttcccgaattccaccggctcccagtttaatgttgtcttttaaaccacgccgacgaacttcccgctcaatcatattcttcatgttgcgtaacgactggatcacactgaaatcgatataacggcgatagataaatggccttaacatctgacgtaattcattacagtacgcctgatcgtcatgccccagaatccgcgccttgattaacgcataacgctcccagtcccgcccctgctcctgataataatcctccagcgccgggaagctgaataccagtggcccgctatcaccaaacgggcgtaatcgcatatcaacacgataaacaaaaccatcgatcgtctgctgatccaataccttgatcagtttttgccccagccgggtaaaaaactgtgcattatccatttcacggcgaccacctcgtgtcacaccattttccggataggcaaaaatcagatcaatgtcagaagagaaattaagttctcctcctcccagtttacccataccgaggatcaatagcggctgtgcaacaccagcctgatccgtgggagttccccaactctgacagcaatgccggtacaaccagtcacgggcggcaataatcagcgtttccgccagtacactcaattgttgcagtgtctgctctgttgtactgctgcgcagagcctgtgaccatgcaattctcaccagcattctgttgcggaaaagacgtaaagcccgcatgaggatattttcgtcattggctgaagataaagcctgattcaaccattcagccaaccatgtagaatagtatttccactcatcaggctgcgggggatcctgacggatttcatccagccattcagcgcgagtcagtagattttctgctacaaaatcacttatcgccaatactgcctgctcatgaggtgcaaaattgtctgcgattgcctctgattgccggaatgatagctgaaagtgcatcaccgtatgctttaattgatgggttaaaacggatgaaagtggcagcatagtcaggttccattgtttatggtaattgggtcatcaaccactgagtcagtgccagtttacattgcaaccatttcgcgctgtaacacacgttttctgcaccagcctctgcatcggccgtagaaaggctctcttctaattcagacaataaacccagtgccggagctgttccgccttgtttttcaaccagtagtcctgcccgttttaaaactttctctaagcctacttttcctgcattgatccctgccagccatccttcctcttgttcctgccactgttgcaggatatctgtcagaagaacagataacggttgctgccattccggcgtttcagagatctcctcttccatactgaccaagttaatggacgaggcttctctgacaagcgcataaccccgtgccgctttgctactgtttgccaaccgtaagcccccctgaaccgccagctcctcagctaatgacagcacatcagacacctgcccagttttcagctccagctcaaattcacaaatcggcgaggttttttctccggcacggatttcgccctgatccagaaccacttcgatttcactctgtccatagttcaccagccatttttcacgggaaaaatccgtgctgaacagatcactcaacgcagcctgcaattgagtaatatcggtattttcaggccagatatcagcaggaaacagggttaaatccagttttggctgatgaagaggaacgttgaactctggtctctgatgcaaaccaccaataacccgcccggctgttttaatcgtcatttcatactgttggtcaaaaccacgaatacgcagccccatatcccagcgacgtagctgattatccggtgtttcaaagtaaatattggtcaaatgttgtggtgaggtgtaatgattaggaagctggaataatcggtcgcgtactgtcgatatcgtttcgggttttactgacagtttcaactctacttctacagaacgcatatctatctctctctcggttcatactgctcggatcgtttttcatcctgaccacggttttttcagggaaattcttcagagaagtttttcagaatatgaaaaataaaccacaatagactgttctctcaacaatgattgtgctactccatcaaaaaaaccctaacaatatcgatattcggtcagttgattgaacattcattctggtttactgattgcacccacaaacttaactctttactatcagcctgagtagtttgaaaaattggatagcttgaatcacgttaatcacatacaccaaaacagttgacaacagaatgcagaaactacatcgattacttattttattacttggttttacacttccgttatccgtgcatgctgaagaaaaacgttatgtttccgatgaactatcagcctacattcgtagcggcccaagtaatcagaaccgcatcacgggttcattgaatgcgggttcagaagtcattctggtgaatcctaaatcagagaatggctactcgcagataaaggacagcaaagggcgtacaagctggatcttatccagtgaactcagcgctattcccagtgtgcacgagcgtattcccgctatggaacagaaaattaaaacgctgactgagcaattggctaatattgataaaagctggaatgaacgtactgctgaaatgcaggacaaagtcgctgccagcgatagaatcatcaatgacttaaaagccgagaataccaaacttaataacaagctgactgtcgctgagaaaaaagtagaaattgctaacctacagctcgatgataaacaaagagaaatcattttgcagtggttcatgtatggcggagctgtcgctggtatcggcctgctgttggggcttgttctgccgcatatcattccgcgtcggaaacgcaaagatcgttggatgagctgattttaaaaaccggttttaaggatgcagggttcaggaatatcgattcaagaacatagtctcaaggatatagctttaaaggacacaaacgtgaaagtttacttggttggcggagccgttcgtgatcaactgttgaatctgccggttacagaaagagactgggttgttgttggcggcagccctgaagaacttctgtcacagggatatcaacaggtcgggaaagaaattccccgttttctgcatcctcaaacccatgaagaatatgctctggcaccttcagaac

SEQ ID NO: 1462 - DNA, 27693 bp, Xenorhabdus sp.; identical to SEQ ID NO: 1461
  CDS (1739)..(1870)

SEQ ID NO: 1463 - DNA, 27693 bp, Xenorhabdus sp.; identical to SEQ ID NO: 1461
  CDS (2608)..(2775)

SEQ ID NO: 1464 - DNA, 27693 bp, Xenorhabdus sp.; identical to SEQ ID NO: 1461
  CDS (2778)..(3551)

SEQ ID NO: 1465 - DNA, 27693 bp, Xenorhabdus sp.; identical to SEQ ID NO: 1461
  CDS (3750)..(4196)

SEQ ID NO: 1466 - DNA, 27693 bp, Xenorhabdus sp.; identical to SEQ ID NO: 1461
  CDS (14637)..(16004)

SEQ ID NO: 1467 - DNA, 27693 bp, Xenorhabdus sp.; identical to SEQ ID NO: 1461
  CDS (16303)..(16983)

SEQ ID NO: 1468 - DNA, 27693 bp, Xenorhabdus sp.; identical to SEQ ID NO: 1461
  CDS (17007)..(18167)

SEQ ID NO: 1469 - DNA, 27693 bp, Xenorhabdus sp.; identical to SEQ ID NO: 1461
  CDS (20709)..(21008)

SEQ ID NO: 1470 - DNA, 27693 bp, Xenorhabdus sp.; identical to SEQ ID NO: 1461
  CDS (26850)..(27413)

SEQ ID NO: 1471 - DNA, 27693 bp, Xenorhabdus sp.; identical to SEQ ID NO: 1461
  CDS (27501)..(27692)

SEQ ID NO: 1472 - DNA, 27693 bp, Xenorhabdus sp.
  CDS (27546)..(27677)
gttctgaaggtgccagagcatattcttcatgggtttgaggatgcagaaaacggggaatttctttcccgacctgttgatatccctgtgacagaagttcttcagggctgccgccaacaacaacccagtctctttctgtaaccggcagattcaacagttgatcacgaacggctccgccaaccaagtaaactttcacgtttgtgtcctttaaagctatatccttgagactatgttcttgaatcgatattcctgaaccctgcatccttaaaaccggtttttaaaatcagctcatccaacgatctttgcgtttccgacgcggaatgatatgcggcagaacaagccccaacagcaggccgataccagcgacagctccgccatacatgaaccactgcaaaatgatttctctttgtttatcatcgagctgtaggttagcaatttctacttttttctcagcgacagtcagcttgttattaagtttggtattctcggcttttaagtcattgatgattctatcgctggcagcgactttgtcctgcatttcagcagtacgttcattccagcttttatcaatattagccaattgctcagtcagcgttttaattttctgttccatagcgggaatacgctcgtgcacactgggaatagcgctgagttcactggataagatccagcttgtacgccctttgctgtcctttatctgcgagtagccattctctgatttaggattcaccagaatgacttctgaacccgcattcaatgaacccgtgatgcggttctgattacttgggccgctacgaatgtaggctgatagttcatcggaaacataacgtttttcttcagcatgcacggataacggaagtgtaaaaccaagtaataaaataagtaatcgatgtagtttctgcattctgttgtcaactgttttggtgtatgtgattaacgtgattcaagctatccaatttttcaaactactcaggctgatagtaaagagttaagtttgtgggtgcaatcagtaaaccagaatgaatgttcaatcaactgaccgaatatcgatattgttagggtttttttgatggagtagcacaatcattgttgagagaacagtctattgtggtttatttttcatattctgaaaaacttctctgaagaatttccctgaaaaaaccgtggtcaggatgaaaaacgatccgagcagtatgaaccgagagagagatagatatgcgttctgtagaagtagagttgaaactgtcagtaaaacccgaaacgatatcgacagtacgcgaccgattattccagcttcctaatcattacacctcaccacaacatttgaccaatatttactttgaaacaccggataatcagctacgtcgctgggatatggggctgcgtattcgtggttttgaccaacagtatgaaatgacgattaaaacagccgggcgggttattggtggtttgcatcagagaccagagttcaacgttcctcttcatcagccaaaactggatttaaccctgtttcctgctgatatctggcctgaaaataccgatattactcaattgcaggctgcgttgagtgatctgttcagcacggatttttcccgtgaaaaatggctggtgaactatggacagagtgaaatcgaagtggttctggatcagggcgaaatccgtgccggagaaaaaacctcgccgatttgtgaatttgagctggagctgaaaactgggcaggtgtctgatgtgctgtcattagctgaggagctggcggttcaggggggcttacggttggcaaacagtagcaaagcggcacggggttatgcgcttgtcagagaagcctcgtccattaacttggtcagtatggaagaggagatctctgaaacgccggaatggcagcaaccgttatctgttcttctgacagatatcctgcaacagtggcaggaacaagaggaaggatggctggcagggatcaatgcaggaaaagtaggcttagagaaagttttaaaacgggcaggactactggttgaaaaacaaggcggaacagctccggcactgggtttattgtctgaattagaagagagcctttctacggccgatgcagaggctggtgcagaaaacgtgtgttacagcgcgaaatggttgcaatgtaaactggcactgactcagtggttgatgacccaattaccataaacaatggaacctgactatgctgccactttcatccgttttaacccatcaattaaagcatacggtgatgcactttcagctatcattccggcaatcagaggcaatcgcagacaattttgcacctcatgagcaggcagtattggcgataagtgattttgtagcagaaaatctactgactcgcgctgaatggctggatgaaatccgtcaggatcccccgcagcctgatgagtggaaatactattctacatggttggctgaatggttgaatcaggctttatcttcagccaatgacgaaaatatcctcatgcgggctttacgtcttttccgcaacagaatgctggtgagaattgcatggtcacaggctctgcgcagcagtacaacagagcagacactgcaacaattgagtgtactggcggaaacgctgattattgccgcccgtgactggttgtaccggcattgctgtcagagttggggaactcccacggatcaggctggtgttgcacagccgctattgatcctcggtatgggtaaactgggaggaggagaacttaatttctcttctgacattgatctgatttttgcctatccggaaaatggtgtgacacgaggtggtcgccgtgaaatggataatgcacagttttttacccggctggggcaaaaactgatcaaggtattggatcagcagacgatcgatggttttgtttatcgtgttgatatgcgattacgcccgtttggtgatagcgggccactggtattcagcttcccggcgctggaggattattatcaggagcaggggcgggactgggagcgttatgcgttaatcaaggcgcggattctggggcatgacgatcaggcgtactgtaatgaattacgtcagatgttaaggccatttatctatcgccgttatatcgatttcagtgtgatccagtcgttacgcaacatgaagaatatgattgagcgggaagttcgtcggcgtggtttaaaagacaacattaaactgggagccggtggaattcgggaaattgaatttatcacacaggtatttcagttgatccgcggaggccgggagccaatcctgcaatcccgttcattattacgggcactggaagccatcgaaacattggcattattgactcaggagcaggtcagacaactcaaagaaagttacctgttcttacgtcggcttgagaatttgctgcaatccattcgtgatcaacaaacccagacgttaccggagaatgaactggatcgtgcccgtttatgctggggaatgggattttctgactgggatcatttaacagcagaaaccgaaaaaaatatgctggttgtgcgggatatttttcagcagctgatcggtgatgaaactgagggtaatggcgaagtctccgctcatgtgccgtttaagagcttatggctggagtatctgaacagagacgaactgatggcacttgttcctcatctcagtgaacctgaagcccaaaaaatgctcgagacgatggtatctctacgtaacgatatcagtaagcgcaccattggcccacggggacgtgatgtgctggatcatctgatgcctcgtctgctggcaaaaatcgtggcaagagaagataccaataccgtattggagcgggttattcccttattgctgagtatcgtcagccggacaacatatctggagctgattctggagtcagaacaggtgatgacccacgttattcgtctgtgtgccgcttctccgatgattgcctgccagcttagccatcaccctctattactggatgaattactcgatccgacttcattgtataagccattaccgttggaggcgtatcgggatgagctgtatcaatacttattgcgtattcctgaagatgatgaagagcagttattggaagctctgaggcagttcaaacaggcgcaactatttcggatagccgcagaagatatcgcaggtgccctgtcggttatgaaagtcagcgatcatctgacttatctggctgaagcgataatcggtgcggtcgtgcatctggcgtggaaccagatggtaaaacgtttcggtacaccaactcatttatcgcaacgtcaggggcttggttttgccattctaggctatggcaaattaggtggatgggaactgggttatggttctgatttggatttggtgtttttactggactgcccgattggggtaatgactgatggtgatcgttccattgatgcccgtcagttctatttgcgtctggcccagcggatccttcatttattcagtacccgaacagcgtcaggtgtgttgtatgaggtggatgcccgactgcgtccgtccggtgaatcaggaatgttggtcagtactcttgaaacctttgatgaatatcagaaaaaagaggcatggacgtgggagcatcaggcgttgattcgtgcccggatggtatttggtgatgaaaaaatgcggggcgattttgagcgtattcgccgtgaaacgctatgtatgccacgggagcctgaactgttgcgccaacaagtacgtgaaatgcgcgaaaaaatgtatcggcatctgggaagccatcaacatggtcagtttgatattaaagctgatcccggagggatcaccgatattgaatttatcgcccaatatcaggtactgcgttacgcccctgaaaacgccaaactgacccgctggtctgataatgtccgcatttttgagttaatggctgaatacaatattatggacgaggaggaagcaagtgcactgacacaggcttatatcactctgcgtaatgaactgcaccagcttgctttacaggcactatccagccatgtgcctgctgaacggttcatccaacagaaagcactcgtacacaatagctggcagaaatggcttggagataaagcacagtgagtttggctttttctgagggttctttctggcattctggctggttatggtaatatccgccacaatttattctgatatttggagcatgggatgaacgtagcactccctgattttcaccgtgcaggtgttttggttgttggcgatgtcatgttagatcgctattggtacggcccaaccagccgcatttcaccggaagcgccggttcctgttgttaaagttgacaccatcgaagagcgtccgggcggagcagctaacgttgctatgaatatcgcatcattgggcgctaattcacatttagtcgggttaacgggtattgatgatgcagctcgtgcattaagcgaaaaactgagcagcgtgaaagtccggtgtgattttgtttccgtttcaacccatccgactattacgaaattacgtattctttcgcgtaatcagcaactgatccgtctggattttgaagaaggcttccagaacgtagatgctcagccaatgctggagaaaattcagcaatctctgccaaatatcggtgcactggtattgtccgattacgctaaaggcgcgctgagtcaggttcaggcaatgattaagctggcaaatgatgctggtgtcccagttctgattgaccctaaaggccacgactttgagcgttatcgtggcgcaaccctgctgactccgaatatgtcagaatttgaagctgtggttggtcattgcaaagatgatgatgaactggtgcgcaaaggtacgaagctggtacaagatctggaactgaaagcactgttaatcacccgttcagagcgtggcatgagtctgctgcgtgtcgggcagcctcctttacatctgccaactcaggcgcaggaagtttttgatgtaacgggcgccggtgacacggtaattggtgttctggcaacggcaattgcagccggtaagccactggctgaagcctgttatctggctaatgcggctgcgggagtggtagtcggtaaactgggtacctccactgtttccccggtggaattggaaaatgccgtgcgtgggcgtgcagaaacaggctttggtgtgatgaatgaatcacgcctgaaagaagttgttgagcaggcgcgtcagcgcggtgaacgtatcgtaatgacgaacggctgtttcgatattctccatgcggggcacgtatcttatttgtccaatgcccgtaaactgggcgatcgcctaattgtggccgttaacagtgatgcctcaaccagacgcctgaaaggtgaaacgcgaccagttaatccgctggaacagcgaatgattgtactgtctgcactggagtcagtggactgggttgttgcatttgaagaagatacaccgcagcgcctaattgcaggcattttgcctgatattttggtcaagggcggggattataagcccgaagagatcgctggcagtgaggaagtctgggccgctggtggtgaagtacaggtgctgaattttgaagacgggatctcaacgaccaatattattaaggcgataaaaagccagtaattttatctgagccataatgccgttatgtttttgcgtaatttaacggatgacatcaacggcatagcctgaatgattgggagaattgtattttgttgcaattctccttatgtattaatcagctttcttttcgccatgactctcttcggcattaatcgctgtttttggggtttcgaaacgagcttccagttcgttcaggcgctgttccatactgatcagtttttcacgggtacgcagtaaaacctgagtctgaacatcaaactcctcacggttgacgagatccagcttgctcaactgagattgcaatacagtgcgcaattttttctcgatatcatcaccaaactcttttacacctttcggcatcgcattgtgaatttggcgggcaatttgttcaatttttttcggatcgagcataatgggtatccttttactgacagcgtcagtttaatcaccgggctgttattacttaactaccacctactgaagtaggtgggttagcgcacttcggtgctgacgactgaaagtcgtcgaaccacgcacctcgtaaacgcgcgtaggtcaaaacattaaagtcaaagtcaccgtctaaagacggtggttttaacctgtcatatggaaaaataaaaataatgttgtcgctattttaatacctgctggcgaaagcacaaatgattgcgagacaggttttatatttggtttttactaattgccctgatgaagcattaacgttatagtcgaatggtttatctcagggcagggtgaaagtccctaccggcggtaaaatgaaattatcttctggtgatttcatgaagcccgcgagcgctctgtttgtcgttattccgttgttgttaaaaacataaacaaccggagtataaatagaggtcagcagatccagtgtgactctggagccgacggttatagtccggatgggagagaataacagcatcaatcgggcgcttgcgctcgtctgttgttttttttgcttcatttttaagcaatatcaactcctcaaaatcgccctgattctggtaacccatatacttaaaagaggtttttttaccatgaatcagacgctactttcttcctatggcactccattccaacgtgttgaacgcgcgatcgcggctttacgtgcaggcggtggggtaatggtattggatgatgaaaatcgtgaaaatgaaggtgatatgattttcgccgccgaaaccatgactgtggaacaaatggcattaactatccgttatggcagcggaattgtatgtctctgcatgacagatgagcgccgtcggcaattacagttgcctatgatggtggaaaacaattcaagccagtatcagacggcttttactattacgattgaagctgcacagggagtgacaacaggcgtatctgccgcagatcgtattacaaccattcgtgcggctattgtagatggcgcgcagccggatgatctgaatcgtccggggcatgtttttcctctgcgggcgcagaacgggggagttttaacccgccgtggtcatacagaagcaacgattgatttggtcaaactggcaggcttcaaaccagcgggtgtgttgtgtgagctgacgaatgatgatggctccatggccagagcacctgaggtgattgaatttgctcaacagcacgagatgccagtggtcacaattgaagatttgggtgactaccgcattaaaatggaaaaggctgtcagctgattcagcacggtggttttcttctgctgatatcgtcctctattagcatgaaatatttcatggttcttaactgatagaactaaattctgagccatgatcatgatggataaaaaaagttcggaataaaaggccgaacaggatagaatatatcagttcttatcgcatgtacgcttataaggccgcagtccacaccctgtggcctttcagtatttttaaagtaccccattattttttgattggtcatattcagggaagaaacatcataatcttgccataatttttttgtcgctattcataatccaccatgtttgatttgctgtatgagggacgagaatgagtctcctgagaatgcccgccttgttcattggtcacggtagtccaatgaatgccattgaagataattgttattcacgagcctggtttgaattagggcaaaaactgcccagaccgagagccattctggtcatttctgcacattggtatatagatggtactgctgtgacggcgatgcctcagcccagaactatccacgattttggtaatttcccccgtgagttgcatgaaaaacagtatccagcaaaaggttatccagaactggctgttttggtacaggatattcttgagccgattgaggtcgaaactgattttgacgaatggggattggatcatggctcctggggaatattagctaaaatgtaccctgatgcggatattccggtgatccagctgagtatagatcgtaatcagtcgacggctttctattatgatataggtagaaaactatctatgttacgggatgaaggcgttatgatcatcggcagcgggaatgtcgtgcataacctgccagccgaagagctgggcgcagaaccttacccgtgggcactttcttttgagcagtttgtacgtgaaaacctgacgaatactgaagagccacatccgttacttcaggccttggatagggaagatggtaaattatcccacccgacaccggaacactttatgccacttttctatgtaatgggaacatgggataaagaagagccaatttcaacgcctgttgaagggattgaagatggctccttaagtatgctgacaatccaattaggctaatacccttcatctctcgaacgggcacttcattggctacgctcgcccaccccagtcacatagttatctatgttcctgggggttactaactgttcgctaatgccatgcaattcaacatcgattggatatgactgaattaatccagaatgatatgcggatagaagcgggatagatcctgtgtgattaattcacggtcttcgcggatacagatacccgcagcctgatcgttcactaaccagcttcctaccagcgtatggttatcaccgaatttaggcagggcatggaactgctgaacaatcatgccttcttcaccataagggccatctgcactggctatttcccggccattctcgataatacggatattggccccttcacgtgaaaataaaggcttaatcacgtatctgtccatgtctgccggacgttcatcagcaaagtaagcaggtaacagattagggtgattcgggaacattttccatagcatcggcaataatgccttgttggaaataatactcttccatgctggttcaagccaacggactccagcatcagccagtttggtcgagaagatttcacgcagcatgaattcccacggatacagcttaaacagattaccgatcacctgatcctgtaaatccgtaaactgacccttttcacccagaccgatatcttcaataaacaggaattctgtcggaataccggcttctgaagcgcaatcctgcaaatactggattgtgccacggtcttcttcgctgtcctgacaacatgccatatgcagcaggccaaacccgtgtttttcgcgtaattgcgcaaaacgctcaatcagcttttcctgtaggctgttgaattggtctgcatttgacggcagatggccagcattgacctgatcttccagccatatccactggaagaatgccgattcatacagggatgttggggtatcggcattattttccagcagttttggtggattctggccatcataggcgaaatccagacgggaatagagtgaaggctgactggttacccatgaagagcggacaaactcccagcaatgtttcgggatctggaattttgtcagcagctcttcactattgacgactttttccacaacctgcaaacacatctgatgcagctctgcggtagcatcttcaatttcttcaatctgacgcagagtgaactgataataagcctcttcactccagtaaggctggtcatacatggtatggaaattgaagccatattctgttgctttttcgcgccagtccgggcgctcagtaatactaatgcgtttcatctttacttaatactcactttgacttagccgcccattgaacgggaagaactggaacttgagccagcagatgaacgctgcatactggattgttttgccaccgaatcaccgaatccgccacgagtaattgtcgttgtggttgccggttttggcgccattgcggtttttggtacagacatgctacgaccgccagcggtagccgggccataacttttacctgtagcgtcaacaaatttaccattagccgggctgctggctgattttgatgagaacagcggttgcgaaggcgcagatctgttacccatcaggtgccccatcatataacccgccatcaaaggcatccagaagcttccgctactgctttgtgcctgtgcctgagtgccgacacctgcttgtgcaggagcctgagtacactgctgttcaccaaattcagccacacagtcttcacgggtcgcatattttggtgcagttttctctgcttctttcagggcgttgttataagcaatggtacattgttcactttgagaaggatttgccttggaacactcatcggcattggtgtaaagcgataccgtttcatcgttctgttcacaggcagaaagcatgaaaacagcactgacagcgagtgccacaggtgccagacgatattgtttccacgctttgcggaaactatcgcggttaatctcttttgtccgtttcattgtcatagggagcatccatcttaaaggtatcaggttagattaagagctaatcccaccagtgactcacaatgggatggcttatacccgtcgtctttcaaatggcctctttgttggctgcactcgctcaccccagtcgcatagttatctatgctcaggggacttgctcctttgctgccgcgatgcaactcgaaatccatagggtatattaggctctattaaaaatagcccacacaacggcgggctgtttattgagtatagcgcgtttaatataacgttttttaatctaaaacgatagcgcattaattcagcgaattgatggtgttttcatctctttaataatattgctggcagaggttgaaacctgtgttcccagtatattattcagtgccgccagatcgtcctcgttcaaagtaccacgggattgctgattaaccagtaggctgatcaggtacttatagcgtgcctgagaaaggttctttttggcctgatacagtttggtggttgactccagcacgtcaacgatagtacgggtgcctacctgataaccggcttccattgaatgcagtgagctttctgcggagagcacggcttgtttgttcgcttcaatgctactgatagaagctgcaatatcattggaggaagaacgaacatcctgaataactttgcggtaagtattttctaaatcctggctgctggagaggaaatcatatttagcctgttctacctgagagctggttgcaccgccgctgtaaagtggcatgctgaatgagacactgacagaatggttgccaccatattgattgccactggcactgctatgacgcgtgtgttcattctcaactcctgtattggctgacaacccgagagttggcatataaccagtctgagcatctttgatttgctcacgtttcaaatcctgcatcaagcgtgcagataacaggttgagattgcgggtttcggcttctttcagcaagtcttcagccggttttggcttacttgtcttgaagtggtcaatgttcaatgaagccagctgtgggtaataaacaccggtaatcaggcgcaatttttccaatgaattatccagctcattacggtcataaacttcctgtgccagaatagaatcatactgggcacgggcgttctggacgtcagtaatggcggccagccctacattgaagcgctgggttgtctgatccagttgccggtagagtgaggatttctgagcttcgctataggtcagagcatcaattttgctcaggacatcaaaataagcgttggcggtatccagaattaatttctgctgggctgcctgataactgatatcggcaatccctgctttcttttctgcctgattcagtttactccaggaggacatatcaaaaatgctctgtttcagcgataagcctgcgttgataccgtgattttcctgttcactgttgcgaaaacttttaagatatttggctcccgcagtcaggcttaattgaggtaacaaagggctgcgggctaaatcaatcccttcaaaaaccgaattgcgatcagccagcgccttaagcaactcagggttagtttctttcgcctgtttataaatttgtaacaggtcttctgcgtggcctgaagtactgaaacctaccagatttatagcgataaaaagagatagcaattttttcatttgcgttccttgttgtgcagctattttgcttaagttgcctctgcataaaaacaatatcacagattctagcagagaatacttgcagtataaggtggctgtttgtgccatattgccttattttctagagtgtttgtatcttcaaaatcaatttatttagaacaatgtgaaaaaatacattttaatagtagagaattaaaagataacaaacaggagcttttatgcgcgaagatcttacctcaccgcttatttctacaaaatcgatagattcagaaaaaccatttacgttttcgaaacaagatgttgaagtcatttcccgaaaaacactctatcacggttttttcaaaatgacggagtatcaattcaaacaccgtctgtttcgtggaggatggagcgagaatattaagcgtgaagtatttgaacggggtcatgccggtgttttgttgccttatgatccggtgcgtgatgaagttgtcctgattgaacagatccgcattccggcgatagaaaccagccagacaccgtggttgctggaagtgattgccggcatgattgaagaaggggaagatgctgagcaggttgtccgccgtgaagcgatagaagaagcgggtattgaagttaaacgttgccagccggcactgagttaccttgcaagccccggaggaacaacagagcgcatgagtatttttgtaggagaagtcaactcttctactgcctcaggtatccatggtctggaaggagagaatgaagatatccgggtactggttgtcagcagagagcaggcttatcaatgggttgaagagggaattattgataattcggcttcagttattgcaatacagtggctggcattgcaccatgcaaaactgaaaaaagagtggctggaaatataaacggcaattttgtgttgggaaacgtgaagtgtgccccagtcagcagatcttatgtgtaaagacacgttagaatgaccctctatgaccgacaggaaaaggaaaccatttggaaagcctgcttgaaatacctgtggcgaaaggtgccacagcaagaatattgcaaatcactgacatgcacctttttgccaataaaggtggctcactgctgggtatcaatacctaccgcagttatcatgctgtgttggatgcgatccttgagcagaatattgatattgatttggtcgttgcgaccggcgatttagttcaggatcagactcccggtgcctatcagaattttgttgaaggcattgcccgtttgcccgccccttgtgtctggttacccggtaatcacgattatcagcctgctatggttgatgtactggcggcggcggagatttcaccttccaagcaaatattcataggccagcactggcagcttatcatgctggatagtcaggtgcagggtgttccccacggcgaattgacggaataccagctggaatggatgagtaaatgtctggatgaacacagtgatcgtcaggcgattgtcatgcttcaccatcatcctgtaccatccggctgtacatggctggatcagcacagcctgcgcaatgctcctgcactggcagaatgcctgaaggataaatctcaggtgaaaacaatactgtgcgggcacatccatcaagagctggatgtaatctggaatggtattcgtgtgatagcaacaccatcaacctgtgtgcaatttaagccacattgtactaattttatgcttgatacagtggctccgggttggcgttaccttgaattgcctgtgactggtggcggagaagcagaactgcaaacgcagctttataggctcaagagtaatgaattttgcccggatttagattcggacgggtattaatgtcaacgttactttacctacatggttttaacagttcatcccaatcagcaaaagcaactgcgctgaaaacatggttgcaccagcagcaccctgaaatagagatgctggtgccacaattgcctccttatcccgaagatacggcagccttactggaagaaatagtgatgagccgctcaggggaacacatcggtttggttggttcctcattaggaggttatctggccatctggctttcacaatgctttggcctgccagccgtagtcgtcaatcctgcggttcgtccattcgatcttcttcaggattatcttggggaaaacgtgaatccttataccgaagagcggtatactcttgaagaaagccacattcatgacctcaaagtaatgcatattgacccgctggaatcaccggatcttatctggttattacagcaaaccggggacgaagtgctggactaccgtcaggcggttgcctacctgatgcagtgcagacaaactgtcgaatctggtggaaatcatgcatttattggtttcgaatactattttcctcaaatcattgacttcttggggctagccagcggcaatagtaaaaaaattgccaaaaataggtaagcgactggtattatcaacagtatctatccaatggattccgggctaacgccgttctgagggcgttccgggatacgtagggtaatcaatactgattggccctttaatcatgaagcaaccgacagaattacaacatgactcaatctagttataacgcagaggccattgaagtcctcagtggcctggagccagttcgtcgccgcccaggaatgtataccgacaccgcccgcccgaaccatctggcacaggaagtgatcgataatagtgtggacgaagcgctagctggtcacgcgaagcatattcaagtgattctccacagcgatcagtctctggaagtgatagatgatggccgtggtatgccggttgatatccatcctgaagaaaaagtatcagcagttgaattgatcctgacccgcttgcatgcgggtggtaaattttccaataaaaactaccagttctccggtggcttgcacggggttggtatttcagtcgttaatgccctgtccaaacgggtcgaagtaactgttcgtcgcgacagtcaggttcatcagatcgccttcgaaaatggcgataaagtacaggaactggctgttataggcagttgcggaaaacgtaacaccggaaccagtgtgcatttctggccagatgaaagctatttcgataccccccgtttttcgacctcacgtctggcccatttgctgaaagcaaaagcggttctgtgccccggcgttgaaattatctttaaggataaactggccggaactgagcaaaaatggtgttatgccgacgggttgactgactatttgctggaagcagttaatgggctggtgacattacctcaagccccgtttgtcggtgctctcagtggcgagactgaagcggtggactgggcgctgctctggctgccggaaggcggtgaattactggcggaaagctatgttaacctgatcccgactatacagggtggtacccacgtcaatgggttgcgtcaggggttgctggatgcaatgcgtgagttctgcgaattccgcaacattttgcctcgtggcgtcaaactttctgccgacgatatctgggatcgctgtgcttatgtgttatccctcaaaatgcaggatccacaatttgccgggcagactaaagaacgtctgtcatcgcgtcagtctgcggctttcgtttccggtgttgtcaaagatgcattcagcctgtggctgaaccagcatattcaggaagcagagcaattggctgaaatggccattgccagcgctcagcgccgcatgcgcgcggccaagaaagtggtacgtaagaagctgaccaacggcccggcattgccggggaaactggctgactgtacctcacaggatctcaatgtcactgaactgtttctggtggaaggggattctgcgggtggctctgctaaacaggcccgttatcgcgaatttcaggccattatgcctctgcgcggtaaaatactgaatacatgggaagtctcttcagatgaagtattggcttcgcaggaagtccatgatatttcggtcgcaatcggtatcgatcctgacagtgaagatctcagccagctgcgttacggtaaaatctgtattctggccgatgcggattccgatggcctgcacattgcaacgctgctgtgcgccttatttgtccgccatttcccgacactggtcaaacgcggtcacgtttatatggcgatgccaccactgtatcgcatcgaccttggcaaagaagttcactatgcactggatgaaggtgaaaagagcgcggtacttgaccgcctgagccgtaagcgcggtaagccgaatgttcagcgcttcaaaggattgggtgaaatgaacccgatgcagttgcgtgaaactacgctagatcccaatactcgccgtctggtgcaattgactatcaatgatgaaaattatcaggaaaccctttccgttatggatatgcttctggcgaagaaacgctcggaagaccgccgtaactggctgcaagaaaagggtgattccattgatattgaagtatagcaattgaattgaaatttaaacccggtagatttcaagatacatagcggccaactaaagcggcaacttgaaagatgacgggttttgaggaaattaatacatgagtgaaataactcacgatggagtggaacgtcagccgctccacacattcactgaaaacgcctatctgaattattccatgtacgtcatcatggacagggcgctgccttttatcggtgatggattaaaacccgtacagcgtcgcatcgtctacgcgatgtcagagcttgggctgagtagcagtgcaaaattcaaaaaatctgctcgtactgtcggtgatgtactgggtaaatatcatccacatggtgatggtgcctgttacgaagcgatggtgctgatggcacagcctttctcttatcgttatccacttgtggacggtcagggaaactggggtgctccggatgatccgaaatcttttgcggcaatgcgttataccgaatcccgtctgtcaaagtatgcagagttactgctgagtgaactggggcacgggacagtagactgggtgccaaactttgatggtacattgcaggagccgaaaatgctgcctgcgcgtctgcctaatatcctgctgaacggcacaacaggtattgctgttggtatggcaacggatataccgcctcataactcacgtgaagtagccaatgcgctgatttccatgctggataaaccagagtcttcacttgatgaagttatggagcacgttaaaggcccggattacccgacagatgcggaaatcattacttcgaaagaagatatccgtaagatctacaaaaatggtcgtggctcgatacgtatgcgtgctgtgtggtcaaaagaagagggtaacgttgtaattaccgctctgccacatcaggtatctggtgcgaaagtattagaacagattgccagccagatgcgctcgaagaagttgccgatggttgatgatctgcgggatgaatccgatcacgagaacccgacgcgtctggtgattgtgccccggactaaccgtgtggatgtcgagcaggttatgaaccacctgtttgtcacaaccgatctggaaaagagctatcgtgttaacctcaacatgattggtcttgacaatcgcccaagtgttaaaggtctggttgaaattctcagtgaatggctggtattccgtcgtgaaacggtacgtaaccgccttaaccaccgtctggaaaaagtgctcaagcggctgcatattctggaaggtttgctggcagcctatctcaatattgatgaagtgatccatctcatccgtagtgaagatgagccaaagccagtgttgatgcagcgttttggtttaacagaaacacaggcggaagcgattctggaactgaaactgcgtcatctggcaaaactggaagaagtcaaaatccggggtgagcaggatgaactggcaaaagagcgggacaaacttcaggctattcttggttctgagcgcaagctgaacacgctgctgaaaaaagagattattgccgatgcagaaaactatggtgataagcgtcgttctccgctgaaagaacgctcagaagcgaaggcaatgagcgatcatgatattctgccatcagagccgattacggttgtgatgtctcaaatgggctgggttcgtagcgcaaaagggcacgagattgatcctaccggtttaaattacaaatctggtgacagctatcgcgatgctgtgcgtggtaagagtaatcagccggtagtctttattgacagtaccgggcgcagttattctattgatcctctggatttaccttcagccagagggcaaggagagcctttgaccggcaaactggcattaccggccggagcatccgttgagcatctgctgatggcgaaagaagatcagaaactcctgatggcatctgatgcaggttatggcttcatctgtaccttcagtgacttaattgccaagaaccgggcagggaaggccctgattacgttgccacaaaacgctaaggtgatgtcaccattggagatcggcaatgaacaggatgatatgttactggcgatcaccaaagcgggacgtatgttgatgtttcctgtcgccgatctcccgcagctgtcaaaaggtaagggcaataaaatagtttccattacctcggcgcaggcggcttccggagaagatatattgagctggttgctggtattgccgccaaaatcttcaatcacgctttatttcggtaagcgcaaattacagcttcagccagaggaattgcagaaattccgggcagaaagaggccgtaaaggaacagccctgccgcgtggcttacagcgtgtcgagcgcgtagaaatagaaacaaaattaaactgaacataacttcatttttatatactcaaataaccctgatagcaggccagtacaacactggcctgccttgcaagaggaaactatgctaaccattattcgtgggatcattgttattctgttcacctttctagtctgtatattcggcgggatttactgcctattcagcccccgggatccgcgccatgtgatgacctttggccgggcatttggcaagctgcacacaatattcggtatcaagcttattgaacgtattcctgaagatgcgccacaagttggcccaagcatctatatcggtaatcaccagaacaatttcgatatgataaccatgtcaaacgctgtacagccccgcacggtgactgttggtaaaaaaagtctggtttttatacccttctttggtcagttgtactggctgacaggtaatatcctgattgacagacaaaacaggacaaaagcacacgggacgatttcacaggttgttaagcagatcaaaaagaacaatgtttctgtctggatgttcccggagggtacccgcagtcgtggtcgtggtttaatgccgtttaaaacgggggctttccatgcagccattgcggccggagtgccgattgtaccggtttgtgtttcttcaacacatggcaagatcaagctcaatcgttggaataatggtacggttattgttgaaatgctgccgccgattgatacaacaaaatatacaaaagagcgggttcgtgaattggctgaacattgtcatcaggtgatgaagaccaagattgaagcgctggataaagaagttgaggagcttaacaagcgcagttaattgaattaaaaataacttacgctatttttacgaagtactcctttctgatatggggattaattctgactataaatttaagatagttttagaatttatcccctgttcgcgatatgattgctttttgataaattaacgttttttattaaacgcaatcgataagatatatatctatacccagtggatttcaacacgtgtccaacaaaggcgcgatttgaaaaacaaagggtaatactgccgcgatataatttgaaatcaattagatatggataagcactcaatttgggcagctattctttcttttcgtggagctcattcctgccgtggagaaaatatgtcactgagtcggcgccaatttattcaggcatctggtttagcagtatgtttaggagcgctcccctttgctgttcaggcagataaagaccaacaaatagtattacctgttccccccttactggaatctcgcggtggccagcccctgtttttagctcttcagagagccagctggtcttttgacgggaaaaataaggcgtcagtgtcgggtatcaatggcctctatctggggccgactattcgtgtccgtaaaggggataacgttaaactgatatacagtaatcgcctgtcagagccggtttcaatgactgtaagcgggttacaggtacccggaacactgatggggggagaatcacgcctgatccctgctcatgggaactggtctccggtcattccgattgatcagccagcagcaacatgttggtatcacgctaatacaccacaccgaatggcggaacaggtttatgcaggattagcaggaatgtggctggtggaagacgaaaatactcatcgcctgcctttacccagacattatggcgttgatgattttccggttattttgcaggacaaacgattggataattttggtacgccccgctatgacaaggcttccgccagtcagggattccttggggatacactggttattaacggggtggaaaacccgtttatcgaagttgccaaagggtggattaggctgcgtctgttaaatgccgccaatgcccgccgtttccaattacagctcagtgatggccggcctttctatatgattgcgactgatcaggggttattgccagcaccggtggcggttcagacgctttcactggcaccgggagaacgccgtgaggtgctgattgatatgtcgaaagcagacagtgttgttatcacagcgggagaatctgccggcatgatcgatcgtctgaaagggctgtttgaaccatccagtaaattgcgctcaacaaatgttctgacgattaaatcaggagggttgctacctttggtcacagaagaactaccttctcagcttgtgaccgatacgactggcattgattcttcaattcgcaaccgacaaattgttttaggggatgaaacacagggcatcaatggggcattactgaaccccaaccgaaccgacatgaccagccatcagggagcatgggaacgctggatagtaacaacatcgattccacagccttttcatatcgaaggggccagattcaaagttatcaagcacaacggagtacaaccggagccgcaggattatggctggaaagataccgtctgggtggatggcagaaccgagctgttggtcaatatgatgcagccatcctatgaacactacccgtttatgtattacagccagatattagaatgggccgatcgtggcgtggcagggcagttggtagtgactccggcggggatgtaagggattttctgtttattcttctgtgtgatgagcaaatttttttacaagattggcagagaaaagcctgcttttgcaggctgcatggaggatttatattattttaaataaatatctggttatcataaaaaccaaacaattaagttagaattccacctatatttaattgaagagtcagggtattagctttagccagccccatgcactaggtcatgtatttaaggcgttgttcttcatcaccgaattaagcacctgaaccgtaaaacattgggttattcaaagttacctaaaatgcatgacaaaatcattggcactttcattgaacgtaaatattatgtttgagggagatcaacgccttaaatacatgaccaaaaaataccatacatgtagttaaatttatctgccacaaaagaaaaacacataatccattgaaattaaaaaattatttccttattgcataaactttatattttcttaatagtcactattgattgactttcaacaaactcgaaatggataataaatccgctgttttcttaatattttccatttcatttaggtgactaggtgacgcgctatgtacgataacttgaagagtttagggattactcaccctgaagatattgatcgctatagcctccgtcaggaagcgaataacgacattcttaagatttattttcgcaaagataggggtgagttctttgccaaaagcgttaaattcaaatacccacgccagctcaaaactgtctctgacgataatgcagggcaaggttacaaagaagttaaagagatcaacaccaacctgcgttatgtgctggaagaactggatcaaatttgtaaacgtgaacaggcagaagtggatttgaaacacaaaatcctcgacgacttacgtcaccttgagcatgtcgttgccaataagatcgcagaaatagaagcagatttagaaaaactgacccgcaagtaatgatatcagctgtgtcatacaccgcttatcccttttctggcagcaaagagataaagggtataagcggtataaccaacggtatgagcgggagcgcctataataaatttccccactcctcaacccagccctgagcaaaaacttccggctcaactacctcgagagcatcaatctgcagaatttcaccgatccgcttagcgccttgctcttgtagcagcgcatcaaagatatgacctcctccacagaaagtgtcataactgctgtcacccagcgcaataaggccgtaacgtaaatcaggctgataacccagttgatcattcaattccgcataaagcggctggatattatcaggcaaatccccctgtccggttgtggatgtcacaaccagtactacctgctgtaagtattcctgccattgctccaaagttgcctcttcaaatacttcagcctcatgcccctgctgctcaagaatttgctgcgcttcttcggcaacggccaatgcattgccataaactgtaccaacgaaaataccaatctttgccatagatatgatcccttcattctgtttgatactgcttttattcgtatacccttcgtctttcaagctgcctctttgttggctcgctcgttcaccccagtcacattatctatgcttctgggggttcactcccttgccgccgcgatgcaattcgaaattcattatcattaggtataagtggtgaacgtttattttttcaggcggctattctgtcggctgtaattcacaagcaaccggatgtgaacattccagttccggtacaaggccttgccagccaaattgttcaagcaaatgctgccatgaagaatcccaacgggcggtcaataacaactcctggccggttaccggatgcctgagttgaaggtgacttgcatgcagcattaatctgcctgtctgataatatttagcaactcctcgattctgacgcaaatccccgtgtgtggtatccccgataatgggatgacggatatgtgacatatgtcgtcgtagctggtgcttacgcccggttttaggtttcagttccaataagctgaaacgtgatgtcggataacgccctatttcaaccggacactcaattttcgccagtgcgcgataatgagtaatggcggattgcgcttccctgtccgtatcagcgaatttatccgcaattttatccaactcttccattaatgcgtagtcgataatctcctctccttcgacataaccacgcacaactgcatgatacgttttttgcacctgctgatgttcgaattgccgggagagtgttcgggccacatcactcgacagccccatcagcaaaacgccggatgttggcctgtccagccgatgaacaggaaaaacatgctgaccaatctggtcacgcagtgtctgcataacaaagacggtttcatgacgcgccagccaactacgatgaactaaccagcccgccggcttatttactgcaacgatgtgttcatcctgatagataatatccagcattatcaaccattccctgccagatcatccgatgtaaacaggctgtccagttcacgcaaatgcttaagcaacggtaaataacgttctgtctcttctttatagacttcttcaaaatagggagcgattgcaaatgatgttggtaagctggctttttgctcaatcagcgcactcattctgggaattaatacccattggagccattcttccgccgccatcgtatcaatagagaaaggctctgtgctttcgtacgcttctggtttgggcgggtaactctgccataagccaacggttttcatcgtggcttcaatgagctgtaatttgtggagaatttgtttctcgatactcatgattcttatcttatcctgactgtaatcccaatagcaggaactgccattgcgtcattaaatcgtaagagtatcattgttcgatctcagcgaaaaatatgtgacagcataaaatgccacaaaacaaaataagaggggagacagtatctcccctcttatttgattatcatagcaatccggctaaattggtcgcttcctgcgcattccctgacaaagtacttccctgtctgttattccttaaaagatcattatattgatagtatctggcagtcctgcccgaaccgaatcatccttgagtcaccttcctgatgacatcattccttaataattttgtcgctgtgattcctagcggaacaacaaaataatcgtcgattcagtagcttgaaacaagctacctgaattgtcaggaaaagcatttcaccaaaaagatatcttgataataatttgcatattattgatataaaataaaaataatatttatcagaggtattgatacgatgattaagagacatatctcacatcacatgtgagatatgtcttacaaaaaagtaaactgatatctgcacctatgaagatatcacaggggtagcagcagaaaggaaagcggctaaatcagcagataatacggttcgttccttactgccaaattgctcaagtatgacctgacctgtcagattacatacagaaatcagccccatatcagaatccgttgtaccaataaataccgtcggtgagagtttcaggcgcttttgtgtcacaagatggcctatcagattttcctgtagccggacaaaatcatcctcactccatacctgaatcaagctgaagctcaatccatcaaaactggcagacatgtcgcccgctaactgagtgacatagtagtcgtgaatagaattctgcaaacagatatccagtgcgttttctaccttactgagtttatccgctggagtaaaaggcttcggaagccagtgcaccacctcatacaaaaaagtaaactgatatctgcacctatgaagatatcacaggggtagcagcagaaaggaaagcggctaaatcagcagataatacggttcgttccttactgccaaattgctcaagtatgacctgacctgtcagattacatacagaaatcagccccatatcagaatccgttgtaccaataaataccgtcggtgagagtttcaggcgcttttgtgtcacaagatggcctatcagattttcctgtagccggacaaaatcatcctcactccatacctgaatcaagctgaagctcaatccatcaaaactggcagacatgtcgcccgctaactgagtgacatagtagtcgtgaatagaattctgcaaacagatatccagtgcgttttctaccttactgagtttatccgctggagtaaaaggcttcggaagccagtgcaccacctcatctcctgtacgttcgatacagggggacggtacaccatataattcactactcgctggtggtaatccggtttcctcctgccacaattcaacatagcgtcgggtaaaatcagcaagtgcttctgtcacattgaaggtcatatgtttgtttcttccatttttctgtctgttactcatattctgcgtattcctatacggttttcagcaaaataacaactaaaaatggtgtcatcacttccataaaataatggtatcaggttctacactatttataacaggaaagagaatcatctcccttcaagtaatattatgccgtgtacctggcctgaatttatagccaggggatgaataaagccatctctaataagtcataaattaaaacaaaatagtattaatggaaaaaataacacctcttgttatccacattataaacatggattcaaaatagttattttatttatatcctacaaggtaataacataatgaacataaaaaacaaaaatccaaacaaattaaataaagaaaacaagaataaaaaaacaaacctgacattaactgatttccctaaagacgtaaaattgatatatagagaatttattaactggtcagaagaaatttattcgaatcatattccatgctgtatccctaaatcagacaaagaaattattttagttgttaattgggcgtggaaaaaaaattataaactgagagtggtgggagagtcacataactggtcgcctttgatcatttcagctcaggaacaaaataatcatcaagtcatgctcatggatcttacccagcactttaatcaagtaagtattaagcatcttcctgagtatgccattgtcactgcgcaggctggtgtattaatggaaacactcatgacaaaaatggaagagcaaggagttggttttactgcaactccggcacccggtgatttaactcttggcggagtactggcaatcggtgggcatggaacaagtgttaaggccatgaattaaggaccgccaacccgcc

SEQ ID NO: 1473 - DNA, 27693 bp, Xenorhabdus sp.; identical to SEQ ID NO: 1472
  CDS (23017)..(23403)

SEQ ID NO: 1474 - DNA, 37380 bp, Xenorhabdus sp.; identical to SEQ ID NO: 457
  CDS (27297)..(28316)

SEQ ID NO: 1475 - DNA, 37380 bp, Xenorhabdus sp.; identical to SEQ ID NO: 457
  CDS (25948)..(27210)

SEQ ID NO: 1476 - DNA, 37380 bp, Xenorhabdus sp.; identical to SEQ ID NO: 457
  CDS (24821)..(25951)

SEQ ID NO: 1477 - DNA, 37380 bp, Xenorhabdus sp.; identical to SEQ ID NO: 457
  CDS (23709)..(24764)

SEQ ID NO: 1478 - DNA, 37380 bp, Xenorhabdus sp.; identical to SEQ ID NO: 457
  CDS (22587)..(23675)

SEQ ID NO: 1479 - DNA, 37380 bp, Xenorhabdus sp.; identical to SEQ ID NO: 457
  CDS (19928)..(20269)

SEQ ID NO: 1480 - DNA, 37380 bp, Xenorhabdus sp.; identical to SEQ ID NO: 457
  CDS (14852)..(16882)

SEQ ID NO: 1481 - DNA, 37380 bp, Xenorhabdus sp.; identical to SEQ ID NO: 457
  CDS (11836)..(13314)

SEQ ID NO: 1482 - DNA, 37380 bp, Xenorhabdus sp.; identical to SEQ ID NO: 457
  CDS (9127)..(10674)

SEQ ID NO: 1483 - DNA, 37380 bp, Xenorhabdus sp.; identical to SEQ ID NO: 457
  CDS (7274)..(9124)

SEQ ID NO: 1484 - DNA, 37380 bp, Xenorhabdus sp.; identical to SEQ ID NO: 457
  CDS (6253)..(7176)

SEQ ID NO: 1485 - DNA, 37380 bp, Xenorhabdus sp.; identical to SEQ ID NO: 457
  CDS (4324)..(5970)

SEQ ID NO: 1486 - DNA, 37380 bp, Xenorhabdus sp.; identical to SEQ ID NO: 457
  CDS (1589)..(1954)

SEQ ID NO: 1487 - DNA, 39957 bp, Xenorhabdus sp.; identical to SEQ ID NO: 458
  CDS (910)..(2313)

SEQ ID NO: 1488 - DNA, 39957 bp, Xenorhabdus sp.; identical to SEQ ID NO: 458
  CDS (8179)..(9327)

SEQ ID NO: 1489 - DNA, 39957 bp, Xenorhabdus sp.; identical to SEQ ID NO: 458
  CDS (10262)..(11149)

SEQ ID NO: 1490 - DNA, 39957 bp, Xenorhabdus sp.; identical to SEQ ID NO: 458
  CDS (19078)..(19395)

SEQ ID NO: 1491 - DNA, 39957 bp, Xenorhabdus sp.; identical to SEQ ID NO: 458
  CDS (19953)..(21794)

SEQ ID NO: 1492 - DNA, 39957 bp, Xenorhabdus sp.; identical to SEQ ID NO: 458
  CDS (21968)..(22150)

SEQ ID NO: 1493 - DNA, 39957 bp, Xenorhabdus sp.; identical to SEQ ID NO: 458
  CDS (23540)..(24367)

SEQ ID NO: 1494 - DNA, 39957 bp, Xenorhabdus sp.; identical to SEQ ID NO: 458
  CDS (24508)..(25038)

SEQ ID NO: 1495 - DNA, 39957 bp, Xenorhabdus sp.; identical to SEQ ID NO: 458
  CDS (25050)..(26381)

SEQ ID NO: 1496 - DNA, 39957 bp, Xenorhabdus sp.; identical to SEQ ID NO: 458
  CDS (26513)..(27412)

SEQ ID NO: 1497 - DNA, 39957 bp, Xenorhabdus sp.; identical to SEQ ID NO: 458
  CDS (27521)..(28033)

SEQ ID NO: 1498 - DNA, 39957 bp, Xenorhabdus sp.; identical to SEQ ID NO: 458
  CDS (28780)..(29577)

SEQ ID NO: 1499 - DNA, 39957 bp, Xenorhabdus sp.; identical to SEQ ID NO: 458
  CDS (29648)..(31171)

SEQ ID NO: 1500 - DNA, 39957 bp, Xenorhabdus sp.; identical to SEQ ID NO: 458
  CDS (32851)..(33597)

SEQ ID NO: 1501 - DNA, 39957 bp, Xenorhabdus sp.; identical to SEQ ID NO: 458
  CDS (34148)..(34768)

SEQ ID NO: 1502 - DNA, 39957 bp, Xenorhabdus sp.; identical to SEQ ID NO: 458
  CDS (35032)..(35799)

SEQ ID NO: 1503 - DNA, 39957 bp, Xenorhabdus sp.; identical to SEQ ID NO: 345
  CDS (39259)..(39810)

SEQ ID NO: 1504 - DNA, 39957 bp, Xenorhabdus sp.; identical to SEQ ID NO: 345
  CDS (35135)..(36514)

SEQ ID NO: 1505 - DNA, 39957 bp, Xenorhabdus sp.; identical to SEQ ID NO: 345
  CDS (33869)..(35101)

SEQ ID NO: 1506 - DNA, 9651 bp, Xenorhabdus sp.
  CDS (4667)..(5023)
aaaaaaaataaaatattcctgaagaagtaaaaaccaaaagttcagaaaaagtaatcccgctttcagccaaatatcccgtatcacaatacatagaacaggctgcatcaatcagagacattgcgatcgcagccccactgccctcacccaaacgcaaatctaaatgcagatgaggtttcagacccagatgctgcaacgccagaaccgcgcctttttccgctgatagatgagatggaatacagtaatcccgaacagaaggtgccagctgaactgccgccagcgcagaggcataagagataaagccatcgagcacaactggaacacctgccgcagcagctcccagaatcactccggtcattcccacaagctcaaatccccctacttttgccagtacatcaaggggagactgagtatcaggtttattcacatcaatagcctgacgtacaacagattctttatgtttaagtaatccagcgggcaaattagtccccaaacccacaacatcactgggatcacttccggtaagtacactgataacagccgctgctggtgtggtattcgcgatccccagctctcccacaccaaatacagagatcccggcagcaagacgttgctgaactaattgcacacttgccaacaataacgtttctgcatatgcataaggcatagccgggccttgtgcaatgttgccacagccacaggctaatttgagggacaataaattatctatcggctcacaatcaataccaatatcaacaggtaacacatgagtaccgttacttttcgctagtgagcaaacccctgtcagccccagcaacatgttccgggcctgtatggctgtaacatttttcggagatatcgccacaccttcattataaacaccatgatcggcacacataacgataatctctttttgcagatcccgcagctttccaattccgggcatagccgcaagttgcgctgccagtgtttccagacggcccatactaccaaccggcttgacgagtttatcaatatgctgccccacccgatccattctttcccgatccagcggtttaatcttttccagtaacagtggtaatgactgaaactccatgatgatccttccgatcaagtttcaacataaatatgtaaatataaaatacactctaatggatttctgaatgcatcgcagtgacaaagaagcaacgagaataaaataacattaactatcggcaacctacttccagataaggattaaagccagcagaaaaatcacttcaccgacttcaattgccgctcccagcgtatctccggtttgcccgcctaaatgatagttaaaatagatggcaagcaaaaagatagcgatcatcgttaccagcattgcagataacccctgccagtcacccagcagcatcaccaatactgtccctgccaataatgtgatgactgtttcacggggcgtaatgcgaccgatatagctacttcccattccttcaacttcacgggcataacgttgttcaaacatcaaaagcacaacagcagtacgtccgacaatcggtgcacaggataataaagccagcaagtgcaaaggaggatgataggcaatttcaacaaccgcaagtaccttaagcaaaatgcagaagatcagccctaatccgccatatgtgccaagacggctatcttgcataatttccagtattctttctctatttcgggaagaaaaaataccgtcgcaggtatctgccaggccatctaaatgtaatcctcccgtcagaaataccagagcgagcgcataaccaattgcaccaatatatactcctccaccagattgagttattaccagtgcaatacaagctgcaatcgcaccaacaataaggccaactaaagggaaaataggtacaccatgcccaatttgccgaaaatcaatgccttcggcccattttgcagggataggaagccgggtcataaactgtaatgttgcccaaaagagtctcaacttcatttgatttttactccaagaccagagactaccatccagactgattttgctgcctgagccagtttctggttaacccgaccggaaatatcaataaaatgacgggccagccgattctcaggcacgattcccatacccagttcattcgtcaccagacaaacgggcattgggcaattcagacaagcatcgatcacatcgtctatctgctggtggataaacacctccaatgaggcgaaatccatttcatcgggtgatgcaccttctgctttgtcaaacagaagattggtcattaatgtagtcacacattccagtataatcccctcttccgctttacgatgcctacggataacatcccccaaatcctgatacccctcccaggttcgccaatgtaaaggacgatccttccgatgccgttcaattcgagccagcatctcttcatcagtaccttgagctgtcgcgatatacaatacttgttcacattgatctgaaataaaccgctccgcataagcacttttgccactacgtgctccgccagtaattaagatcatctgataactccagaagagctagactccgtgtgttctttcattaactgatagatacgttctatatccagatgctcacgcatactggctgccaggatattaaactgtttctctttatggctggcatagctgaaagccgcattttccagcgggttgatgcctttatgcatgcgaagctgattcaataatggacgggtgaaattattttggtcaaacaggccatgcaggtagcttcccatcaccgtcccttcctgattcattgcgccatcaaaccaactcgcctcttcaccattacgtaagtacattttggcaaatggccttgcctgctctttcaggcgcgtaactcccatatggatctcataacccacaatgggttgatcaccacataagttcagcatgccagatagctccggcatcacaattcccctgacctgagccgtctgtttatcattggcaaataaggtttcagtatcgagtaatcctaacccttccatctggtataaaccagattcgacttcatcaataatctgttttccaagcatctggtaaccaccacagatcccaatgatcggaattcctgactggtgtgcagcaataattgcgtgatccagcccctgcgtttttaaccaccccaaatcacccaatgtgtttttactgccgggtaaaatgatcagatcggcattctgaagttccaaaggatctgcaatataattaagataaacatcaggctggagtgctaatgcgttaaaatcggtgaaatttgcaatatgcggaaaccggacaacaacaatattcaggcatcgttctgttttatttttatccctttcatatttacccacctgcaaagcaacactgtcttcttcttccagatcgagttccagccacggtaatacgcccagtatcggtacttgtgtcagctcttcgatctgttcaatacctgaatgcagcaacgatatatcaccacgaaatttattaataatgacccctttaacccgcgccctttcttctggtgtgagtaaggccagtgtgccgtagatagaagcaaaaacacctccgcgatcaatatctgctaccagaataacgggcgcatcaaccagctcagccattcccatattgacgatatcccgatcccgcagattaatttccgccgggctacccgctccttccaacaccataatatcggtttcagccgcaaggccattataagcactcaggatctgctgctgaagctgtggtttatattcgtgatattctacagcattcatattgcacataactttgcccataaaaatcacctgagccttacaatcactggagggtttcagcaaaacaggattcattcgtacatcaggagtaatccctgcagcttcagcctgaaatatttgagcacgccccatttctttgccatcagcagtaataccagaattaagtgccatattttgtgatttaaaaggagtacagtgataaccatcctgtaaaaaaatccggcaaaatccagcaaccaaagcactctttccaacatcagacgctgttccttggatcataagagaccatttcatggtgttttactcctctatattattgtcgccacagaataacgcaccaaatgactacatgatgaactcatatggataagtgttttttattcgcgtgaatcagctcacaaagtcaaacaaatatttttatgcactctctgttacaatcacaatcaatatcattaacctattaataatagatatacagttatgcaaaattcagaaaattatctcacagatatatccacttttatggctcttgatatccgagttggcaaaataatcaaagctgaaaaaaatgaaaaggccatcaaacctgcttataaactgtatatcgattttggtagcgaaataggtgaaaaacagagttcggcacaattgtgccaaaactatacggaagaacaattaatcggcaggcaagttctggctgttatcaattttccaccgagaaaagtagccgggtttaaatcggaagttttggttctggctgccgtttgtgacaatgaaggcactgtactcatccaaccagataaaaatgtgaccttagggacacggatgctgtaatttaaaataggaatattatgagaacacaaaaaagatgcatgggttatgttgccattgttattgatgattatgataaagcaattgattactacaccaacaaactgggatttactctggtcgaagacaccccacaaccgggcaaaagatgggttgttgtgacaccgaatcctgaaagtgactgcaatctattgctggcaagagcatctaatgaaaagcaggaagcctttattggcaaccagtgtggaggaagagtatttttgttcctgcaaactgacgacttctggcgcgattatcataaaatgaaagaaaatggcgttcatttttgcgaagagccacgacaagaagaatatggcttggttgttgtatttgaagatatttatggcaaccggtgggatttatatcagaacgcgattgtttaaagtacaaaaaaatccacctgttaaacaggtggattcctatttgataataaaataacgctcaattttttataccccataatccttctgattacctaactgttggccacatccaattacctcagtcactgtttttttaggcatattattatctatattctcgataattttatcctttaccgccacattacaattcgacatcttctgagtgtattccttgactttactaggaagtattacattttttttattatgataatgtctctctgtatatggaattttcccatgagcaatatcagaaactacacctggtaaacttaataaaaactcaagaggagaccccggtaatttcacagagagtttttcgcctttactatgagtagttatttcatgatttaccagctctttagtattcaatataactggctggtcagtactttcaatcttagctccagtcagattggttttacctgatacatctaaattaaccccatctctagcagaaattcctgattggttagttaaacctgtatcatcatgtgtttcgtaattaaaattaaacttggtttttatacccgatacgatacttttaatagtgttaaccactcccataaaaccggagggttgattatcattaaagagtgtaccgctattaaatccgcctccagcttctagacctattttactcccattagccgtattttgagccgtttcaatattaagattaccgcctactttccctcccattgtattcgctacaatattagctcctttaatagtcgtatcttttttacttgttaatgttacgttttcaccagaaatatggctattatgattgataacatctctttcataaccattaccaaatttaccataagcctttgcctcaattttagctaattgagaaccattcattgctactcccccacctaaattagccccaatttggaaatgacttttatttatactgtcctgagcagaggtaactatgataccacctcgttctgctttaagatttatgtgttcgccagaggtatttgtcccctgcaaagacagattatttccagaaaccaagttaactccctgctttccattaatattactactttttgctgtcacagtagtgtcatcatttacagcatatcctgctgctgcacttcctgcccccatattaacaactcctgtcggcaaattgacgcctaccccaacaccaagaccaaccccatattgggttttagttttcttatgagtattatttgcctgattaatactgatattattccctgcctgtatggttgtttctccatcttctgaattaaacgatgtcccctgatatttaatatcgtggcgcgcctgaatattaatatctttatgtgctttgaaatcactgacaatagcatctgaattagattcagaactccgagatgcattccctttccctctccctgtaacagtaagatcctgggagaaaggtgctaagtcagcttgtatgctggcatgacctgatgaatcaaaaacatctttttcatttttattaaatgcggcttcattaatatggttgttagcttttaattctatacctccattatctgcctgatactgtgttccctgatcatatatatcctctttggtatttattctaatgttattgttggctttaattgaagtgacattagcatttgatttagtattactctctgtatgattacctcctttggcgaaaacattagctccaacattaggtgaataattcttcatactcaaagagagagcaactcctcctccaatattaaaatttcctgaagaagtactatcactactttccgccgctctattttctatactattagcactcgcttcataattaccagcaacattatgctgagctccctcctgtttcagtttatttcgtgcgtttaatttcagatctccctcgatatccgtttttgaaacaacagcttttttcttctcatgagatttattattgctactatgattagctccaccgccaatacttactccattgtttcctttagagaaaaacacaccaaattttgtcgaagaatgagattctttttgggcttccaggtcatttgaagcaagaaaagaaatattgtcggctgatatattagcatttccatttctcgtatctatatctgaacccacaactgtaacatctttacctgcattaattgtgatatttcctccatccaatacagctcgtttttgtgttatattctcttgttctttatcatcactgctatacttaatagcaaaactttttgtaatggattttttatcctcttgattagaggataaaaaatcccctgcctcaagcaatgaattctctttctttttattatatttttctccataagaagaaatatttatattatcgcctgcatgaatattcaaatcatcagaacttcttaatatactaaccaactacattcaaccatttttttccacttaaatatttttaaatttgcattagatttaacctgactgtgtactgcctcttcttttttttctttctccttattagaatccttagtaatattaagaacagttccatgacgctcatcaataatattttgatgataattaaccgcattatcaatgcgtaaatcaccattttttgattgaaaatatccgcctttttcagcttcaacattactgccagtaattttaatgccatcatttcctacaagcaatacatgtccatcagctgtaatatcagatgattgattttttttatcttcaatataattatttttattttttcctccggcaatccctccccaataagttctattatcatcatcaataactttatcaccataatattgagctattatctggttttttttacctgcttttatgataatattatttccggcatgcgccttagaacctgcaattttaatatcaccattggcttctataccaagatcattatcagcatttagttcacttctaatctgtttttgagtaaaatgtcctttttcttttagtcctgtatctagtgaattagactctaatctgtgatattgctgattatccattttttcagtttctatcaaaccatctattatgacattacgtttagatgataatgacagattattacctgcatcaatcttgctcccatcaattctgatatcttctccagtcgaagttaatttgatattattatctgctcttatatcattcccctcctgttgggttttatcatgagtattttttttattacgcttccataaaaacttccattgctcttgaaaatcctccgaatgttgattaactgcctgaccgtctaaatcaagtttacgaccggttaaattaatattttcaccaaaaatatctgttcctttaatttcattattgttgctggcatttaatgtaatatttctaccttctaatttggttcggtgaaggacttgcgacttctgctcgctactagcactatttccgctaaaaaaattaccttctgacttttcctttttcaaggatacttcatccaaagcaccctgagatgtaatattttcaccttttaaggtgagatcgcctccttttaatctggcaccttccagttttaatccacctttagactcaacattaatagtatcatcagcagtcatctccccctgtaaattaacaccactccctttatctgtacttaataaccggatacgaccagcctgcatactgcctaaataatagctatcaagtaaaccaaccgttgccttttttgaatccaatactcgaccatcagcagatattttattcagacctgtaatgatattaatatcttggctggtactaattttgccatggctatcaattttaggagaaaaaatatttatgatagagtcatgaaccagccctcctctaccaattttcagggaatttgtattatcgagggtattaaatccctgtaaagtacctttttcaactaatgggtttccgccaactagcgataactgattagtattaatgaacccacacccatcacaagtaataccgttagggtttgccaatatataatctgcagccataccaaaaatttcctgcttgcccaacagtaaagatggattgcggctaattacctcatttagaataatcgttgccgaattaccatgcagattactattaccaggcaattctccagctaattgagattcacctccatttgtcgaattattaaaaactgcccctttttcagaaacattaaaatcctcatattggttatgtgataatccagattcagaaggagcaacaatattaacgacatctgcaccagatttagattgtgtaacacctggtctgtgtgagtcatcacctcctgctactattccattggaaaaaccacttgagctaaaaagcataaaaattgccactgatacagcaagccgaccagatgacgataatttaaaccttttttctttcatttaattactcctatacatctagttattactgtgtgtaaaaatatgaccaaaccgaaacagtggcagttctgcaattaaaaaccataagaaatacgcactaatatctgtatgggattattaagtttctcgtactgccgagacaaaactttcctttagagcacatgg

SEQ ID NO: 1507 - DNA, 9651 bp, Xenorhabdus sp.
  CDS (166)..(2187)
ccatgtgctctaaaggaaagttttgtctcggcagtacgagaaacttaataatcccatacagatattagtgcgtatttcttatggtttttaattgcagaactgccactgtttcggtttggtcatatttttacacacagtaataactagatgtataggagtaattaaatgaaagaaaaaaggtttaaattatcgtcatctggtcggcttgctgtatcagtggcaatttttatgctttttagctcaagtggtttttccaatggaatagtagcaggaggtgatgactcacacagaccaggtgttacacaatctaaatctggtgcagatgtcgttaatattgttgctccttctgaatctggattatcacataaccaatatgaggattttaatgtttctgaaaaaggggcagtttttaataattcgacaaatggaggtgaatctcaattagctggagaattgcctggtaatagtaatctgcatggtaattcggcaacgattattctaaatgaggtaattagccgcaatccatctttactgttgggcaagcaggaaatttttggtatggctgcagattatatattggcaaaccctaacggtattacttgtgatgggtgtgggttcattaatactaatcagttatcgctagttggcggaaacccattagttgaaaaaggtactttacagggatttaataccctcgataatacaaattccctgaaaattggtagaggagggctggttcatgactctatcataaatattttttctcctaaaattgatagccatggcaaaattagtaccagccaagatattaatatcattacaggtctgaataaaatatctgctgatggtcgagtattggattcaaaaaaggcaacggttggtttacttgatagctattatttaggcagtatgcaggctggtcgtatccggttattaagtacagataaagggagtggtgttaatttacagggggagatgactgctgatgatactattaatgttgagtctaaaggtggattaaaactggaaggtgccagattaaaaggaggcgatctcaccttaaaaggtgaaaatattacatctcagggtgctttggatgaagtatccttgaaaaaggaaaagtcagaaggtaatttttttagcggaaatagtgctagtagcgagcagaagtcgcaagtccttcaccgaaccaaattagaaggtagaaatattacattaaatgccagcaacaataatgaaattaaaggaacagatatttttggtgaaaatattaatttaaccggtcgtaaacttgatttagacggtcaggcagttaatcaacattcggaggattttcaagagcaatggaagtttttatggaagcgtaataaaaaaaatactcatgataaaacccaacaggaggggaatgatataagagcagataataatatcaaattaacttcgactggagaagatatcagaattgatgggagcaagattgatgcaggtaataatctgtcattatcatctaaacgtaatgtcataatagatggtttgatagaaactgaaaaaatggataatcagcaatatcacagattagagtctaattcactagatacaggactaaaagaaaaaggacattttactcaaaaacagattagaagtgaactaaatgctgataatgatcttggtatagaagccaatggtgatattaaaattgcaggttctaaggcgcatgccggaaataatattatcataaaagcaggtaaaaaaaaccagataatagctcaatattatggtgataaagttattgatgatgataatagaacttattggggagggattgccggaggaaaaaataaaaataattatattgaagataaaaaaaatcaatcatctgatattacagctgatggacatgtattgcttgtaggaaatgatggcattaaaattactggcagtaatgttgaagctgaaaaaggcggatattttcaatcaaaaaatggtgatttacgcattgataatgcggttaattatcatcaaaatattattgatgagcgtcatggaactgttcttaatattactaaggattctaataaggagaaagaaaaaaaagaagaggcagtacacagtcaggttaaatctaatgcaaatttaaaaatatttaagtggaaaaaaatggttgaatgtagttggttagtatattaagaagttctgatgatttgaatattcatgcaggcgataatataaatatttcttcttatggagaaaaatataataaaaagaaagagaattcattgcttgaggcaggggattttttatcctctaatcaagaggataaaaaatccattacaaaaagttttgctattaagtatagcagtgatgataaagaacaagagaatataacacaaaaacgagctgtattggatggaggaaatatcacaattaatgcaggtaaagatgttacagttgtgggttcagatatagatacgagaaatggaaatgctaatatatcagccgacaatatttcttttcttgcttcaaatgacctggaagcccaaaaagaatctcattcttcgacaaaatttggtgtgtttttctctaaaggaaacaatggagtaagtattggcggtggagctaatcatagtagcaataataaatctcatgagaagaaaaaagctgttgtttcaaaaacggatatcgagggagatctgaaattaaacgcacgaaataaactgaaacaggagggagctcagcataatgttgctggtaattatgaagcgagtgctaatagtatagaaaatagagcggcggaaagtagtgatagtacttcttcaggaaattttaatattggaggaggagttgctctctctttgagtatgaagaattattcacctaatgttggagctaatgttttcgccaaaggaggtaatcatacagagagtaatactaaatcaaatgctaatgtcacttcaattaaagccaacaataacattagaataaataccaaagaggatatatatgatcagggaacacagtatcaggcagataatggaggtatagaattaaaagctaacaaccatattaatgaagccgcatttaataaaaatgaaaaagatgtttttgattcatcaggtcatgccagcatacaagctgacttagcacctttctcccaggatcttactgttacagggagagggaaagggaatgcatctcggagttctgaatctaattcagatgctattgtcagtgatttcaaagcacataaagatattaatattcaggcgcgccacgatattaaatatcaggggacatcgtttaattcagaagatggagaaacaaccatacaggcagggaataatatcagtattaatcaggcaaataatactcataagaaaactaaaacccaatatggggttggtcttggtgttggggtaggcgtcaatttgccgacaggagttgttaatatgggggcaggaagtgcagcagcaggatatgctgtaaatgatgacactactgtgacagcaaaaagtagtaatattaatggaaagcagggagttaacttggtttctggaaataatctgtctttgcaggggacaaatacctctggcgaacacataaatcttaaagcagaacgaggtggtatcatagttacctctgctcaggacagtataaataaaagtcatttccaaattggggctaatttaggtgggggagtagcaatgaatggttctcaattagctaaaattgaggcaaaggcttatggtaaatttggtaatggttatgaaagagatgttatcaatcataatagccatatttctggtgaaaacgtaacattaacaagtaaaaaagatacgactattaaaggagctaatattgtagcgaatacaatgggagggaaagtaggcggtaatcttaatattgaaacggctcaaaatacggctaatgggagtaaaataggtctagaagctggaggcggatttaatagcggtacactctttaatgataatcaaccctccggttttatgggagtggttaacactattaaaagtatcgtatcgggtataaaaaccaagtttaattttaattacgaaacacatgatgatacaggtttaactaaccaatcaggaatttctgctagagatggggttaatttagatgtatcaggtaaaaccaatctgactggagctaagattgaaagtactgaccagccagttatattgaatactaaagagctggtaaatcatgaaataactactcatagtaaaggcgaaaaactctctgtgaaattaccggggtctcctcttgagtttttattaagtttaccaggtgtagtttctgatattgctcatgggaaaattccatatacagagagacattatcataataaaaaaaatgtaatacttcctagtaaagtcaaggaatacactcagaagatgtcgaattgtaatgtggcggtaaaggataaaattatcgagaatatagataataatatgcctaaaaaaacagtgactgaggtaattggatgtggccaacagttaggtaatcagaaggattatggggtataaaaaattgagcgttattttattatcaaataggaatccacctgtttaacaggtggatttttttgtactttaaacaatcgcgttctgatataaatcccaccggttgccataaatatcttcaaatacaacaaccaagccatattcttcttgtcgtggctcttcgcaaaaatgaacgccattttctttcattttatgataatcgcgccagaagtcgtcagtttgcaggaacaaaaatactcttcctccacactggttgccaataaaggcttcctgcttttcattagatgctcttgccagcaatagattgcagtcactttcaggattcggtgtcacaacaacccatcttttgcccggttgtggggtgtcttcgaccagagtaaatcccagtttgttggtgtagtaatcaattgctttatcataatcatcaataacaatggcaacataacccatgcatcttttttgtgttctcataatattcctattttaaattacagcatccgtgtccctaaggtcacatttttatctggttggatgagtacagtgccttcattgtcacaaacggcagccagaaccaaaacttccgatttaaacccggctacttttctcggtggaaaattgataacagccagaacttgcctgccgattaattgttcttccgtatagttttggcacaattgtgccgaactctgtttttcacctatttcgctaccaaaatcgatatacagtttataagcaggtttgatggccttttcatttttttcagctttgattattttgccaactcggatatcaagagccataaaagtggatatatctgtgagataattttctgaattttgcataactgtatatctattattaataggttaatgatattgattgtgattgtaacagagagtgcataaaaatatttgtttgactttgtgagctgattcacgcgaataaaaaacacttatccatatgagttcatcatgtagtcatttggtgcgttattctgtggcgacaataatatagaggagtaaaacaccatgaaatggtctcttatgatccaaggaacagcgtctgatgttggaaagagtgctttggttgctggattttgccggatttttttacaggatggttatcactgtactccttttaaatcacaaaatatggcacttaattctggtattactgctgatggcaaagaaatggggcgtgctcaaatatttcaggctgaagctgcagggattactcctgatgtacgaatgaatcctgttttgctgaaaccctccagtgattgtaaggctcaggtgatttttatgggcaaagttatgtgcaatatgaatgctgtagaatatcacgaatataaaccacagcttcagcagcagatcctgagtgcttataatggccttgcggctgaaaccgatattatggtgttggaaggagcgggtagcccggcggaaattaatctgcgggatcgggatatcgtcaatatgggaatggctgagctggttgatgcgcccgttattctggtagcagatattgatcgcggaggtgtttttgcttctatctacggcacactggccttactcacaccagaagaaagggcgcgggttaaaggggtcattattaataaatttcgtggtgatatatcgttgctgcattcaggtattgaacagatcgaagagctgacacaagtaccgatactgggcgtattaccgtggctggaactcgatctggaagaagaagacagtgttgctttgcaggtgggtaaatatgaaagggataaaaataaaacagaacgatgcctgaatattgttgttgtccggtttccgcatattgcaaatttcaccgattttaacgcattagcactccagcctgatgtttatcttaattatattgcagatcctttggaacttcagaatgccgatctgatcattttacccggcagtaaaaacacattgggtgatttggggtggttaaaaacgcaggggctggatcacgcaattattgctgcacaccagtcaggaattccgatcattgggatctgtggtggttaccagatgcttggaaaacagattattgatgaagtcgaatctggtttataccagatggaagggttaggattactcgatactgaaaccttatttgccaatgataaacagacggctcaggtcaggggaattgtgatgccggagctatctggcatgctgaacttatgtggtgatcaacccattgtgggttatgagatccatatgggagttacgcgcctgaaagagcaggcaaggccatttgccaaaatgtacttacgtaatggtgaagaggcgagttggtttgatggcgcaatgaatcaggaagggacggtgatgggaagctacctgcatggcctgtttgaccaaaataatttcacccgtccattattgaatcagcttcgcatgcataaaggcatcaacccgctggaaaatgcggctttcagctatgccagccataaagagaaacagtttaatatcctggcagccagtatgcgtgagcatctggatatagaacgtatctatcagttaatgaaagaacacacggagtctagctcttctggagttatcagatgatcttaattactggcggagcacgtagtggcaaaagtgcttatgcggagcggtttatttcagatcaatgtgaacaagtattgtatatcgcgacagctcaaggtactgatgaagagatgctggctcgaattgaacggcatcggaaggatcgtcctttacattggcgaacctgggaggggtatcaggatttgggggatgttatccgtaggcatcgtaaagcggaagaggggattatactggaatgtgtgactacattaatgaccaatcttctgtttgacaaagcagaaggtgcatcacccgatgaaatggatttcgcctcattggaggtgtttatccaccagcagatagacgatgtgatcgatgcttgtctgaattgcccaatgcccgtttgtctggtgacgaatgaactgggtatgggaatcgtgcctgagaatcggctggcccgtcattttattgatatttccggtcgggttaaccagaaactggctcaggcagcaaaatcagtctggatggtagtctctggtcttggagtaaaaatcaaatgaagttgagactcttttgggcaacattacagtttatgacccggcttcctatccctgcaaaatgggccgaaggcattgattttcggcaaattgggcatggtgtacctattttccctttagttggccttattgttggtgcgattgcagcttgtattgcactggtaataactcaatctggtggaggagtatatattggtgcaattggttatgcgctcgctctggtatttctgacgggaggattacatttagatggcctggcagatacctgcgacggtattttttcttcccgaaatagagaaagaatactggaaattatgcaagatagccgtcttggcacatatggcggattagggctgatcttctgcattttgcttaaggtacttgcggttgttgaaattgcctatcatcctcctttgcacttgctggctttattatcctgtgcaccgattgtcggacgtactgctgttgtgcttttgatgtttgaacaacgttatgcccgtgaagttgaaggaatgggaagtagctatatcggtcgcattacgccccgtgaaacagtcatcacattattggcagggacagtattggtgatgctgctgggtgactggcaggggttatctgcaatgctggtaacgatgatcgctatctttttgcttgccatctattttaactatcatttaggcgggcaaaccggagatacgctgggagcggcaattgaagtcggtgaagtgatttttctgctggctttaatccttatctggaagtaggttgccgatagttaatgttattttattctcgttgcttctttgtcactgcgatgcattcagaaatccattagagtgtattttatatttacatatttatgttgaaacttgatcggaaggatcatcatggagtttcagtcattaccactgttactggaaaagattaaaccgctggatcgggaaagaatggatcgggtggggcagcatattgataaactcgtcaagccggttggtagtatgggccgtctggaaacactggcagcgcaacttgcggctatgcccggaattggaaagctgcgggatctgcaaaaagagattatcgttatgtgtgccgatcatggtgtttataatgaaggtgtggcgatatctccgaaaaatgttacagccatacaggcccggaacatgttgctggggctgacaggggtttgctcactagcgaaaagtaacggtactcatgtgttacctgttgatattggtattgattgtgagccgatagataatttattgtccctcaaattagcctgtggctgtggcaacattgcacaaggcccggctatgccttatgcatatgcagaaacgttattgttggcaagtgtgcaattagttcagcaacgtcttgctgccgggatctctgtatttggtgtgggagagctggggatcgcgaataccacaccagcagcggctgttatcagtgtacttaccggaagtgatcccagtgatgttgtgggtttggggactaatttgcccgctggattacttaaacataaagaatctgttgtacgtcaggctattgatgtgaataaacctgatactcagtctccccttgatgtactggcaaaagtagggggatttgagcttgtgggaatgaccggagtgattctgggagctgctgcggcaggtgttccagttgtgctcgatggctttatctcttatgcctctgcgctggcggcagttcagctggcaccttctgttcgggattactgtattccatctcatctatcagcggaaaaaggcgcggttctggcgttgcagcatctgggtctgaaacctcatctgcatttagatttgcgtttgggtgagggcagtggggctgcgatcgcaatgtctctgattgatgcagcctgttctatgtattgtgatacgggatatttggctgaaagcgggattactttttctgaacttttggtttttacttcttcaggaatattttatttttttt

SEQ ID NO: 1508 - DNA, 9651 bp, Xenorhabdus sp.; identical to SEQ ID NO: 1507
  CDS (2370)..(4547)

SEQ ID NO: 1509 - DNA, 9651 bp, Xenorhabdus sp.; identical to SEQ ID NO: 1507
  CDS (5573)..(7132)

SEQ ID NO: 1510 - DNA, 9651 bp, Xenorhabdus sp.; identical to SEQ ID NO: 1507
  CDS (7129)..(7674)

SEQ ID NO: 1511 - DNA, 9651 bp, Xenorhabdus sp.; identical to SEQ ID NO: 1507
  CDS (7680)..(8435)

SEQ ID NO: 1512 - DNA, 9651 bp, Xenorhabdus sp.; identical to SEQ ID NO: 1507
  CDS (8559)..(9647)

SEQ ID NO: 1513 - DNA, 9651 bp, Xenorhabdus sp.; identical to SEQ ID NO: 1506
  CDS (4296)..(4619)

SEQ ID NO: 1514 - DNA, 8964 bp, Xenorhabdus sp.; identical to SEQ ID NO: 188
  CDS (1)..(222)

SEQ ID NO: 1515 - DNA, 8964 bp, Xenorhabdus sp.; identical to SEQ ID NO: 188
  CDS (6590)..(7366)

SEQ ID NO: 1516 - DNA, 8964 bp, Xenorhabdus sp.; identical to SEQ ID NO: 188
  CDS (7563)..(8963)

SEQ ID NO: 1517 - DNA, 8964 bp, Xenorhabdus sp.
  CDS (4389)..(6173)
ggcgtgacaataatgcccgcgcccaggttggccttcctgacagaatgcagggttgtggttcgagagcagcagtaaaactgcatagttcgcccattttccaggatgccactttatctgtgtgggatcttgtggggcagatcggagctataacgcactgacgtgctgataatgcctgacatgcttcagcctctgaggaggcaaatgagatttgatttcgagcctgatgaataatggtgtaatttacatcgttttccacatctgtaatggcgtgagtgacttgtttggttagccagtccgcagagctatttcccggttggtctaactccagctctttatcagcgcgtagcaaacggatgcgaggagagtcgtttgcgctacggcggccgaaaaatagtagcagaagagggacaccgcgatctcgccagtgtttttgtgctgcggtcagcgccttactttcctcacagtaacgcagtacagggcgaagtccggcagcttgcagcatactagctaactcctgcatgcgttttttttcatcatcgtgccggctacgtaccaaaataaccacttgtgtgggagcaagccggggatgaacagtaagtaagccattggctctggctgacagataaagctgcgcgtatagcaccctgcgactgataaaaccatccaactgccaggcatgctgcctttgttctcctttaccaaagccgatatcgtaacgacgagacagttcctgcccctgaaaatatagtgctgacgtttgcacgcattcaccactgggaaggggagtatcgctgcctatagcccattgatacagttctgaacggttgccccacggagggcgtacacccactatttgtggcagaggtaaggaagcagacagtgcagtcagggagctatctatacgttgcaaatccagtaatgcggcatcctgagtccgatggcagcagtgaaattcgaatatgtccgctgcttcaagtgcactgaatacccctttaccactgcgatcagccgaactgagagggcggaaatagcgagctcgctggaacatgcggattggcatcacgtctggcgtattgatcatttttttccaatgactggcaatgacctgctcacctgtcggaagtaatataccgcgctcacgctggctctgagtgtctatggtggttgcgactctcaacagattacgctctgtatcaagtaaatcagccataggttcaaaacagctttctgctataacatgcggataggcgtactcgtccagctctattgcctcataagccgttcttatccttgtggcgatgatttcgctcaatgctactccccaggggagtagaacggttgcaccaggaatggggacgacaccgagatcacaaatgccagcctgcttgagcgaacgggagaattcccccattgtcagcgcagccagcgtagaatttgtcgttgtctgagacgaacatacaggccaaggaagctggctgataacaggtttcgggttatgggtcagccagtctggtaatgttggcagtatgccgcccaacgaatctgatcttacctgtggattgggtgaaccgatatatacatcaggcttcatgcttattttattccgttccgaattcgtttatctggcgggtgcgatagcggttttctcccgctaaagaaataccgtctacccaggttcgattaatcatcgggtgcgcttcatgggtggggccgaagtcagaatcagggtgatagactacgattcgcagcggggtatcatcagtatggaagctgtgaatttcgtctgttggcagtaagaatattcctccggctatcaggtcggttttcgacttttcagtcagacaatagccagccccttcgatgacgatcccgatccgaaccgaaggatgggtatgagctgtttgattcagccttggtggaacatacaggtaatttagacaggggtctcccttgagtggcggcgatatgagaaggctatcggaacagccatctatgtatttcagtcgtcccagtcgttctactgggccaccaaatgacaggaagcctttgtagccatttctgatgcaaatcaaaccgacaaagggagaaagctccgcaggtccgggaatggaaaagtacatcccctcgcgtagttgttgtgaagtaccatcgatggagacagttaaatctccctgatgaacgaatccataagcagtattattctcttcgacgtggatagtatgttgaccgccagagatatgcagagttgatgaaaaattgacgtccagatcgtaccgcgatagcggctgcatgatatcgaatatttccatagcaaattcctttagactaagatttaaaatgtaaatcaggtttaatcggactagcattgttaacatttcgaaagatgctttttaatacagctcggtgcgatgaatcgtcaatattatttatgcatcactatcctttgttttttattaaatacgcccctgacttatttaatggtcggataaattcaccacatatgaataacagttgctcatcaaataaataacgaacatttcacctcccttaaaaaatgagaaattactttggattcaatcttcagattatttttaggtatggtgttcaggaatgatttcgcggattaccttgattttggcttttgaatattactttggcaggtctttttttgtttttgaacaagtgattgtggaatttttatgcgaagcgtatcgaaaaaaatgcgacttatcctgtttacgctggcatagcggctgttaactccctataatccgccaaacatagcatgaaaggatgctatttttcccactttattttttctttctaaccaggttatttttagtatggctgatgaagcacataagtgtacaatcgtaggcattgcaggtgcctccgcttcgggcaaaagccttattgccaacacactttatcgagaattacgggctcaggttggcgatcataatatcggtgttatcccagaagattgctattataaagaccaaactaacaccccgatggaagaacgcattaaagtcaattatgaccatccaagttcaatggatcacgatttactgttcgagcatattcagactttgaaagccggtaactccattgaattgccccaatatgactacgctgaacacacacgaaaatcaaaatccatccacttcgaaccaaagcgcgttattatccttgaaggtattctattattaacggataagcgtttgcgtcaggaactggacttctctatttttgttgatacaccactggatatttgcctgatgcgtcgcattaagcgtgacgtaaatgaacgtgggcgttcattggattctgtaatggaacggtataagaaaactgtccgtccgatgttcctgcaattcatcgagccatcaaaacaatatgcggatattattgttccccgtggtggaaaaaaccgtgtggctattgacatactgaaagctaaaattggccaattttgcgaataacctgttgaacaggtattcataagaatcatcgtattttgagaggaagtaatgcgactctgtgaccgtgacattattaaatggcttgatgaaggtaaactggtaattaccccacgtcctcccgtcgaacgtattaatggggcaactgcggatgttcgccttgggaatcagtttcgcgtttttcgtggtcataccgctgcttatattgacttgagcggccctaaggctgaagtcaatgctgcgcttgatcgtgtcatgagcgatgaaatcattttaccggatggggaagctttttttctgcatcccggtgaattggcactggcagtcacactggaatctgtcacattgcctgctaatcttgttgggtggctggatggtcgctcatctttggctcgtcttgggctgatggtgcatgttacggctcatcggatcgatccgggctggcatggtcaaattgttctggaattctataactcaggaaaactgccattagctctgcgccctggaatggtgattggtgctttaagctttgaaccgctttcaggtgatgctgaacgtccttataaccgacgtcaggatgccaaatataaaaatcagaaaggagctgtagggagccgaatcagcgaggattaatcttttctgatgcagatatctagtaaaatatacccaatgaatttcgagttgcatcgcggcggcaagggagagaatcccctggaacatagataactatgtgactggggtgaacgagcgcaagccaacaaagaggcagcttgaaagacgaagggtatagtcatttggtgaaaataatcatcttgtggacatgagactggggaagtcatgaaaagattgttgacgacactcattattttgttagtcgtagttgttgcaggtctgacggcattagtcatgttgattaatccgaacgattttcgtaactacatagtaaaacaagtacaaaaaaagagtggctaccagctcgtgttacaggatgatctgcgttggcatgtctggccaaaactgagtattttgaccggacaggtatcactgactgctcccggcgcaaaaaagcctgcaattgtggcagaaaatatgcgcctggatgttgaattattgcccctgttatcccaccagttggcagttaaggaagtcatgctcaaaggggctgttttccgccatacacctgatagccagccacaacaaaagcctgaagcgcctattgcaccggaaagtgatattcattatccggtagaaggcaatggccaaagctggaaattggatattgacaggatcaaagtagaagacagtttgctaatctggcaaaccaactcccattcgcagttaaatatacgggatattaacctgctgatgaagcgtcaggatcagcatcatattaatcttgagcttaatagtaagattaataaaaatcagcaggaatttgcttttgaacttgatgctgacattaatattgctgattatccacagtatataacaggcgatatgaattcatttaaatatcagcttacaggtgttggtttaccttcagaaggtattactggggagggttctgccttcgtacgatatgatgccttttcttcatttatttcgttacaaaaaatagcgcttaagataaatgagagtgaattagctggtggagtggatattaatctgaaagataaaccggcctattccatcaatttatcttcaccagaattaaatttagataacctgctgggatgggataaattagtaaagaatagttttcaggaaaaaattgattatcggatggaaaataatttggtaaagcctgttattgcaaagtcagtttcacctttatccaattatgatctcagtttcttgaaaggatttaatgctcacctgttatttaaagcaaataaatttatttatcaggggatggatattgataactttgttttcaaggctgtcaataacgcaggaatggcaaatatctcaaagctgagtggtaatgcatttgggggatattttgcgcttcctgcaacagttgatgcaacggtcaatccggctaaactgcatgcgaaacccttattacaaaatattgacttacagcctctgctgaaagcattggatttaccgtcagtattcagtggacagttagctctggacggggatctttttggggaagggtatgatgaatatgccgtcgctcattactggcagggagacctgaacgttaatctaaaaaatgcgcgtttagatgggttgaatattccaatgttgattcagcaatctttttcacgagtaaccgatcaggttaaacagcccactaatacgcagagctttactggcgcacaaaatttgtcagtaaaggcgaaatttgcacaaggcgaaattaaaattaacagcctttctgcaaactctgagcattcaaagattgaagggcagggcaaagcaaacttactgaaacaaaatgttgatgttgcattgctggtgcagttaaccggtggctgggggcaacaaaatgagttagtcagccatttagaaaaattaaaagtaccattgcggatttatggtgattggaacaatttgcaatatgctctgaatgttgaatccatcttgcacgatgaattacaacaaaaagttaaacaatctataaagaactggtttgataatattgatagcagtaagaataagaaaaaggccacagaaaaatagataatttgagcatcatcaggtgattaatttgccaatcacctgatgagtaataaagtgggtattttactccttgctactgctaatacccggtcacttcataataaaactcaggagtccagcctaattctggtgtggtaactgatatggttaaagtatcctgagataatccgactccatccgaattacttctttgggttctaacatcagccagatggcttgggagttggctatcgaaattattacaagcgatactggcgtgacacgaaataatgccattgggcaggctgaccggtaaccgtattttgtaataattggtatagtacgttactccaccgacaatcgatgtgttttcttgcttaattggtgtaccggctatcgctacgccgcttatttgagtaattttcccaaggttaatgatcgtagcatcttgtccgattagttgggattcaatttttgatccaatcaaatcacctaagcctatattttttacgaacgcgtttttgtccggaatatcggcaccattttcatcttttgccagtcggccattagcgtttttagtgactttgtctaggcgggaatcgatctcgtttttattataagtgcctacatcgaatgctgtaagggtaatatcggttagtaatgccttattgttcactgtacgggtcagtgggactttgccattgacattattattggcatcatttgctagttttctgacagaattgatttgttgatcaatttctcctttagcataggtatctacatcagatgcgtttagcataatgtctgtcaataatgctttattatttatcgtacggaaaactggtactttgctatcggcattattgttggcagcattggccagttctttgacgccatcaataagctgatcgatttcctccttatcgtaagcatttacatcagatgctatcaatttgatatcatttactaattcttttccgtttatccgacgggttaacgggactttgcttgctgcatcacggatggcagtggcgccgttttggttggcggtatccgccagtttcattgcctgcgcgatgtcctgctggatgggggcaatcagcgcatcggtttcagtcctgttgtaggcatccacgtccgccgcgtttagattgatatcactgaccagctctttatggttgatcttacgggttaacgggactttactttccgcttccttgatggcggtatccgcctgtctcattgcctgcgcgacgtcctgctggatgggggcaatcagcgcatcgctctcagtcttgttgtaggcatccacgtccgccgcgtttagattgatatcattgaccagctctttatcattaattttacgggttaacgggactttgttttccgcattgttgatggcgctggtggcattctggttggcggtatctgccagtttcattgcctgcgcgatgtcctgctggatgggtgcaatcagcgcatcggtttcagtcttgttgtaggcatctacgtccgctgcgatcaggcggatatcattgaccagctctttatcattaattttacgggttaacgggactttgttttccgcattgttgatggcgctggtggcattctggttggcggtatctgccagtttcattgcctgcgcgatgtcctgctggatgggtgcaatcagcgcatcggtctcagtcttgttataggcatccacgtccgccgcgtttagattgatatcattgaccagctctttatggttgatcttacgggttagcggaacccatttcttcatggcattaactggatcggctaaattataggctttctgggctaattcatgggtggatttcaccgctttggatgtagctgcgtgagcctcactattactgtctacagcattactcagaatgacaaagcctttattttttaatgtggcatcgggatgattacgactttctgcatgatctctaattttccctctgacatagctacgagtggctaagccagaaattagttctgctatccagccagttaaatttctatcaccaataggcaaaaccatgcgaactgtttgttcctgcatttgtgatttgtacagagcagcacagtttccgacagcgattagcgtattatcttcatcaaacaggcctatttctcggatccaccagttaccctcagtttccggaattatctgctcaacaataatttggttagggttattgggatcgatgaatagcctgtcaatttctgcacgatgcttttcatttattaattggctttgattggcatcaggtgttggtaaatgcccatcaccaacagccatatgtgtgatctcaagcttatttcctgaagttgctgcattttccagtttattggcgcctgaatccgtcaataatgcaaaatatttattactcatgtaacccccatatttatgaatgacaagtcaatgaagtaagacatacaattgcatacgtaagattttaaggcttaattatctgaaaattcacattaaatcgatataataaaatttgtcagaactaaaaaaaccgacataatgccggttttttagtaagtcatatctatatttaatagattattcgaccgtttcttcttccactttcagtgatgtaattttcactttattgatgcggtggctggtgatttccatcggttcaaatagataatcaccgatctttagctgttcgcccagttgtggaatatattgcagatgctccatcaataagcctgccagtgtctgatattcgcgtttctcatccagcggcagcggaacgtaaagtaccaaatcctttagggc

SEQ ID NO: 1518 - DNA, 8964 bp, Xenorhabdus sp.; identical to SEQ ID NO: 1517
  CDS (3534)..(4115)

SEQ ID NO: 1519 - DNA, 8964 bp, Xenorhabdus sp.; identical to SEQ ID NO: 1517
  CDS (2826)..(3485)

SEQ ID NO: 1520 - DNA, 5081 bp, Xenorhabdus sp.
  CDS (11)..(295)
tgctctaaaggttgacactctggtaataaaatgtaaacgggcattggagcagactggcttcaaacggctggttatggcgggaggagtgagtgcaaatcgcacattgcgtatcagaatgcaaaatatggcggaaaaattgcgcggtgaagttttttacgcccgtcctgaattttgtactgataacggggcaatgatcgcatttgctggaatgatccgtttggcaagcggaacaaagaacaatttaggcgttactgtgaaagcgcgctggccattatctgagcttccttcattataatataagtcaatacctttaagggataacggtcttgagaaaattatctgactccataagatagagaccagcagaacgaaagtacttattaagtcataaagtaataaggcgctattcaggattaaatgatatttagccctgaatagcgctttgtttctacaaaagtgaataaaggctaaagcacgagcactcattttttcttaaaaccgataccctacaccgacattaaatccattgataaagttgtttactccctcgttgcgcgatcctctaggagcatgttttgacctagtaacttcataggcaagataaacactaaagtttttcaccggattaatttcaatccctgcaccataagcaagctcattagtcttcagcgtttcatcagaggtcggtaaaatatcaaaaccaccagaagcagcgggattaactccaccagtacccacagacccatcattagtatctatggagattttatgtgcactatttgttacatgagcaataccaattaggctataaatactcagataatcattgatgcgataggcagggcctaccattagggaaaagtattttgacttaaacgctactggttgctcagatagtgtgctttgatgagtgccagatgtagggtttgtatattttacgacttggtctgtgttccccctcatgtgagtgaatgtacctataatactgactggcgagtcccattcataacgataatgaatattaatcccatcaagataggtattagcaggcgttgatatttgactatttgaatatcctatgccgaaagtctgagtatctgccttggctaatgaaccatatataaagaaaggcattgccagagttattataagtgctttttttgttaccatgattatatacctttaatggttattatctgaatcaagtatagatgatttataaaataaacaagtaaaaactcatgggtgtataattaatattaacttatatttcattcatgaaatgtataaagcatatcgattttttctttttgaatgttttacagataattgcgttatatattattcaatctgatttaggtgcagtgaaaataaagatgtataattttttaattacatcatgtttatttaaaatgattacacatcttggttatttagttgtttatttaaattaataaaagtatatatcacttttcaataaccattcactttattacgccttataatatttttcgcaaggatttttggtgttttaattttttaaggttgacgtttcttatcattataataactatttgatattatttaagttattattgtttatgatgaatattatcaatccattatggggtaattgtaatatatgtcatacagtggtgttcatttcattataaaaaataaatattaactcgttagaaaagggtgaatgctaaaaagttgctatggcagccagagtgatgacaaagacggtaagaccgtgacctgagaaacctgaataattgccagggcataaagcccgccagaggaataaggatcaggtcagcgaatctcatagtggcccgcagcgctggctgcaataaggccggatacagagctgcaactactcgtcaatgttaaaacaacggaagccttgcaaacggggaggcgttcatacagtaattatgatcaaggcagacaagtatcaaccatttggagatgaaagtgtcggctacccacaaatatgtattcggaccaatagaacagctgatcgtacgaatatgaagccaataatagaaaaggctatggctatagggcaacagtatccttggagtgagaaagacacaataattaaagaagtatttaaagcattgggaagtgactttggcggaggtggttttggtcatgcatgggttatttacttcaatagtgaaaaagaaggggataatacatcatatgcttttcattcaggatatggattcgtaaaaaactcagaatataccaatgattctccagggagaaaattccaccttcagcgctgtgtaaaggttgatagcaaagcgataaaccctgaattaatagaaatgaaaattatacctaagttaatagatgaaagtaaccagttggcaaaactgatgcaacttacctctgaagatatgaaaaatggggtatacacacctataacaaattgctcgtggtttgcaggcaatttatggaaccagataacgagattaacattcgagcaatctattgaagagggtatcaatattgataagttggcagataaactggaccttccatttataaagaatattagaggtattggagaccccggaatgcttgccgagagcattaagaatggattgtatatttaacgaaaaaattcctgataataattgaaagaaactggcttaattattctagaattaagccaatatttgtaacgaatcgtatttacggtcatgtattcaaggcgttgttcttaacctataatacttattttgcgagataacatgcatggccacagtagaagtaaaatgtcaattttgtcaccagacgaagaacattaaaaaaacatggtattggcaaaggtgggcaccaacgttatcgttgtttatcctgtcatcgtactttccagcgcgattattcttatcgcgcttgtcaagctggactcaacaaccaccgactaaagtcggtgggttagtgattaacggactgaaagtccggatacgcatcgactgaacgatgcgtcaattatccagcctgaagtgatcattcgggttcggttcaaaatgatgcgccagataggcctttatcatctcttccgttaactgacctaccgtcgcacaaaaatagcctctgccccaaaaatgctgaccccagtaacgctttttcaagtgagcaaactcttcaaacaacttacttgctgtccttccctttattcgcctcatgatttctgagggcgctaagctcggaggacaactcaccagtatatgcacatggtctttgctcacgaccccttctactatcctgatttcaaacgcttcacaggtctgacgaactagctctctcacccgtaagccaacttcacctgtgagcactttgtgtctgtattttgttacccacacaaaatgatactcaatctgaaataccgtgtggctgccatatctgtaatccatattgcacctctcgtgcaacacagtatcgcagctaaagctgaccgactaaagtcggtggttttaacctttcatatggaaaaataaaaatgcctgaaatagaaaaaacccctgagatttctctcaggggtttatctaaatcggtggcggtgcggacgggactcgaacccgcgacccccggcgtgacaggccggtattctaaccaactgaactaccgcaccaccgaatgctgttttatgctgccttttgggccggcaacacgtctaaatcgatgtctggcagtgtcctactctcacatggggagaccccacactaccatcggcgctacggcgtttcactgctgagttcggcatggggtcaggtgggaccaccgcgctattgccgccagacaaatcctgttttcaatcccgaacaagctgtgtcaccggccactttctgttttccggtcactcttcatctgaaacttttgtcgtcttgctctcaatccccgcaaaacaccttcggtgttgtcaggttaagccgcacggttcattagtactggttagctcaacgtctcgcaacgcttacacacccagcctatctacgtcctcgtctcgaacgttccttcaggatcctctaggaatcagggaagactcatctcaaggcaagtttcccgcttagatgctttcagcggttatctcttccgcacttagctaccgggcagtgccattggcatgacaacccgaacaccagtggtgcgtccactccggtcctctcgtactaggagcagcccctttcaatcttccaacgcccacggcagatagggaccgaactgtctcacgacgttctaaacccagctcgcgtaccactttaaacggcgaacagccgtacccttgggacctacttcagccccaggatgtgatgagccgacatcgaggtgccaaacaccgccgtcgatatgaactcttgggcggtatcagcctgttatccccggagtaccttttatccgttgagcgatggcccttccattcagaaccaccggatcactaagacctactttcgtacctgctcgcgccgtcacgctcgcagtcaagctagcttatgcctttgcactaacctcacgatgtccgaccgtgattagctaaccttcgtgctcctccgttacgctttgggaggagaccgccccagtcaaactacccaccagacactgtccgcaacccggatgacgggcctacgttagaacaccagccattcaagggtggtatttcaaggatggctccatgcagactggcgtccacacttccaagcctcccacctatcctacacatcaaggaccagtgttcagtgtcaagctatagtaaaggttcacggggtctttccgtcttgccgcgggtacactgcatcttcacagcgagttcaatttcactgagtctcgggtggagacagcctggccatcattacgccattcgtgcaggtcggaacttacccgacaaggaatttcgctaccttaggaccgttatagttacggccgccgtttactggggcttcgatcaagagcttctccttacggataaccccatcaattaaccttccagcaccgggcaggcgtcacaccgtatacgtccactttcgtgtttgcacagtgctgtggttttaattaacaggtgcaag

SEQ ID NO: 1521 - DNA, 5081 bp, Xenorhabdus sp.; identical to SEQ ID NO: 385
  CDS (3930)..(4589)

SEQ ID NO: 1522 - DNA, 8645 bp, Xenorhabdus sp.
  CDS (7715)..(8287)
gcaaaaaattactgaatattcttcaggatcgctgtcaggaactgggagtcaagctggtatttggacgcaggttcaggataagcaaaaggtagctcgccagtatcaggctgatttgttgattgcatccgatgggatcaatagccaaatccgtaaccgttatgctgaaaacttctggcctgatgttgaacagcgtcattgtcggtttgtctggctgggaacccatcggatatttgatgcttttacctttctgtttgctgaaacagaacatggctggtttcaggctcatgcttaccagtttcaggaagggctatccacattcattgttgaaacaacggaagatacgtggctggcagcaggaattgacaaaatgttacaggaagagggcatcgcgtattgcgaaagtatctttgcccaatggctggatgggcatggcctgatctccaatgctacccatttacgcggggctgcaatctggatccgttttccccggatcctctgtaatcactgggtacactggattaaaccagaaggtgataagggcaaaaatgtaccgattgtattgatgggggatgcggcccataccgcgcatttttccattggttccggaaccaaactggcattggaggatgccattgaactcgctaacagcctgaaagccaataaggggaatttatcggcagggctggcccattaccagaaattacgcagcgtggaagtgctgaaaatccagaatgcggcgcgtaattccacagaatggtttgaaaatgtggcccgttatgaagatttcccgccagagcaatttgcctattctttactcacccgccacagcgtatttcccatgaaaatctgaggctgcgggataaatcatggctggaaaactatgaatattggttcaatcggcagcctgatcaatcttccccgttgatccctcccatactaacgccttatcaggttcgggggattaggctgaaaaacagagtcgtagtttcgccaacactgctgtacaaggcggtggaaggtattccgggaacattccatcagattcatcttggcagcagagctttgggaggcgcaggtttagtcattgccgaaatgaccgcgatttcaccacaggcgcgggtaacgcctgcttgtcccggtttgtggaatgagcaacaagtgcagggatggaaaattatcaccgattttatccaccagaatacggatgcacggataggcattcagctggggcactcaggaaggcgaggttctactcaacggggctgggaacaggttaatcatcctttgccggaaggaaactggccactggtttctgcttcatccatgccttatctgcctggtatttcacaggtaccaactgcggtgactcagaaacaaatgagtgaaattatttcgcaatttgttgaagcaactcaccgtgctatcaccgccggttttgactggctggaaattcaggcagctcacggttatctgctttccagttttatttcgcctgtcaccaatctgcgtgacgatgagtatgggggggcactggaaaacagactgcgtttcccattagcggttttgcgcgctgttcgtcgtgtctggccggctgatttaccgatatccatacgtatttctgccactgactggataaagggaggcaccaccgttgatgaagctgtcatcatcgcccgtactttctatgaggcgggtgctgatatggtggactgttcaaccggggaagtttccgctgaacaacaacccgtttatggaagaatgtatcagacgccgatggctgatcgtatccgtaatgaaggcaatgtgcctgttatcgccgtgggtgcgattaccgatgccgatcagattaacagcattatcgcttccggtagggcagatctgtgtgccttatcccgcccatttttatccgatgccgcatggctgctgcatgaatgtgccagatatggctggacagacatcaattggccggaaccgtacctttacggcaaagagcaactggaacgccagcttgcccagaagagtatcctctgaatttcaggccgatttccaaatggcagttattatccgtataggagatacctcatgtctcaacaagaaaatgtgcaggaatatgagcagaataggcaagaaagccacgatcagtacagagaagatatcctcgggcgcgccaatgtcgccgatagccctgaattgctggcatattacaaagagctggcaaaatatcacacaggggcactctggacaatcgccaacaaaatagagccgtggcaacctcagtccacttctgttccggtgctctggcgttatcgtgacttacgtgaacatgttcttaaatccgctgaactagtgactccggaaaaagccggtcgtcgggtcgtctatctggagaatccgggtaaatccggtgaagggccggctgtcggtttactgtattccggacttcagactatgcaaccgggagagtctgcttcggctcatgctcactcttcttcggccctgcgtttcatcatggaagggcgtggtgcctatacgattgttgatggccagaagatgttgctggaagcgaatgattttgttctgacacccaatggaacctggcatgaacatggggtggagcctgatggttctccgtgcatctggcaggatggccttgatatgccattagtgaatactctggaagccgggttttataaggtacaccctgatctgcgccaggccgtgactgaaccggtggattcctctgtagcgctgtggggagcgcctgctttgcgtccgcaaaatgtgggctgggataaaccctattccccattattcagataccagtggaagccaacttacgccgctctgcaaggttatgcccgaatatcacggggatcaccgtttgatgacatcttgatgtactacatcaatcctctgactggcgggcatgttatgccaactctgggtgccagtatgcagctattgcgccccggatttattggtaaggctcatcggcataccggcagctttatctatcaggtcgcgaaaggagcgggatattctattattgatggtcagagattcgactggcaggagcgggatatcttttgcgtaccttcatggaaatatcatgagcatgcgaatgcatcacaaaccgaagatgcctgcctgttctgtttcagcgacttgccggtgatgcaggcattacagctgtattatgaagaagccctgaacgagaatcacgggcatcagcgagtgggagaataaaatgcgtttaattacttatcgtactgagataacggctgaggcccgattgggggcgatagtgaataataatgtcgttgatctggcaaaattggcggctcatagtggcagcacattaccggataatatgctggattttattgaactggggccacttgccataagtagtactgcaatgttgctgaattcatttgacggattatggccagtcggtgtcatccggccactggaaaatgtcaaaattcttgctcctattccccgcccacgtaaaaacattttcggcattggcctgaattatgttgagcatattgaagaatccagccgtttgctggatacggcaaaagatctgcccaaagaaccggttatcttctccaaaccaccttctacggtgattgggccgggggatgccatcgagcataacagtgaaattacccggcaactggattgggaagtggaattagccgttatcatcggaacacgggccaaaggcgtatcggaagctgatgccctgaagcatgttttcggttatagcctgattattgatatgagtgcccgtgactgtcgtcgtgccgggcagtggatctattctaaggggcaggatacttacgcgccttttggcccctgtattgtgacagctgatgagatccccgacccgcataacctcgccttgagcctgaaagttaacggggtaaccaaacaggattccaatacccgccatatgttattcaaggtcgatgccctgatcgctgatatcagtaaaggtattgttctggagccgggcgacattatcgccacgggaacaccgtcaggcgtaggggcagggcgtaacccgcaaaagtggttatggccgggggatgttattgaagctcatcttgagaaaatcggggatttgcgtcatcccgtcatcgccgtataaacctcatacaggaatctgacatgctgactcttcctaaattcaaggcagctgcggtacaggctgctcccatctttctggatacggaagccacggttgatctcgtttgccggctgattcatgaggcagcgaataacggagccagtctggtggcttttcctgaagtttttattgccggttatccctactggaactggattatgaaccctgtgcagggtagtccgtggtttgaaaagctgtgcaaatcggccattgaagtaccgggtgctgagatcctcaaagtggcacaggctgcagctcgtcatcacatcaatgttgttgttggcatcaatgaacgcaatcccaatggtgttgcgacaatttataacactctggtgaccatttcagacgaaggaaaaattttgggacggcatcgtaaactggtaccgacatgggcagaaaaactgacatgggcgaatggtgatgcttcttcattgaccgtacataacaccagcattggcccgctgggtgtgctggcctgtggtgagaataccaacccactggcgcgttttactttgctatcacagggggagctggtgcatgtcgccagttacatttccctgcctgtcgccccgccagattatgatatggcagaagccattcgtttacgggccgccgcgcattgctttgaaggcaaagtttttactattgtttcctgttccactatatcgccggaaattgtgcaggctatgactgccagccaccctgaagcaaaacatctgttggcacgtcgtaatagcgcgtttacgggaattatcgggccggatgggcgtgtgattggcactcctctgattgataaaggagggattgtttatgcggaaattgacttgaaccgctgcattcagccccgccagatgcacgatattacagggcattacaatcgttttgatattttcgatctggctgtcagccgacgagccatgaatgcagtcagatttactgatgaacctgaacagactgattttaatccagttgtggatggggttaatccgatacgggaggatcttccatgagtgaacagcgttgttttcgggtagggctgattgtaccctcctcaaataccacgatggaaacagagatcccggctattttacgtgcccgtgaaacggtagcacctgagcgttttacctttcattcgagtcgtatgagaatgaaaacagtcagcaaagatgaactggcggcaatggatgcagacagtgatcgctgcgcactggaactgtcagatgcttcagtggatgtgttgggatatgcctgtctggtggcaatcatgagtatgggtaaaggataccaccggatttctgaaaaacgtttgcatctgaggacatcagaaaacggatatccggcaccggtgatcacaagtgccggcgcattggtggatgggctgcacgcgttaggggcaaaacggatctcaatactgacaccctatatgaaaccgttaacgcaactggtgatcgattatatagaaaatgaaggtattgaagtcattgacagtatttcactggaaattgcggataatctggcggtcgggcgtcaggatccgctggcaccagcggaaataacaaaaaaactgaacagcaatgtggatgtgatagtcgcttctgcctgtgtacaaatgccttcactggcctcagtgcctctgattgaagcccgtatgggcttaccggtaatttcagcttctgtagcgacaacctatatgcttctgaagcagcttagtctgaatacctgcgtgccgggttttggatcattgttatcctgaaaattgttttctgaaatgaaaataatcctctgagaaaatgagcacagactattggaataggtaacatcccgttattgaaagagctattgcaagacttgagtataactatgtggccggggtgagagagcgtcgccaacaaagaggcaacttgaaagacgaagtgtataatagtggaaatgctctgttaatgacctataacactctaaggaagacccggtatatgacacgctacgagcaactggcagtgaccatccgccaacagatagaagataatatctggctggtgggggataggctaccctccttacgggaatcggtgaaatcgtcagggctgagcctgatgacagtattgcaggcctatcaattactggaaagtcagggctggatcgtagcacgcccacagtcaggctattatgtcgctccccggataaagccgtttgctgcggcaaaagggggaaacaggctgaatttgagcgaaaatgtagagatcagcgcctcaatttttgatgttttacaggcgtgtaaagatcccagaatcataccttttggctccgcatttcccgacccatccttgctggtggagcccaaattagccaagacattagcatctgtagcccgtcgttttgctccccatagttcactggtgaacttacctccgggaaatgaacagttgcgccgcaatatttcccgtcgttatgcctcacagggtatgcatgtttctcctgatgaaattgtgatcaccgcaggagcaatggaatctttaagtttcagccttcagtctgtcacatctcccggcgactgggtggtgattgaatcacccgctttttatggtgcgctacaggccattgaacgtttgcgcctgaaagcaattgccatcaaaacggatcctaaaaccgggattgatttagatgtactggaagaagtggctggaaaatacccgataaaagcctgttggctgatgtcccgcttccagaacccgctttgcgtcagtatgccgacagaaaacaaacaacggctggtagaaattctgaatgaaaatgaaattgttctgattgaagatgatgtttatggcgaactctattttgatcagaacccgccaatgccggttaaggcatgggataaagaaaataatttcatgcactgttcatctttttcaaaatgccttgctcccggataccgggttggctgggtcgcggcaggaaaacatgccctgaaaattcagcaactccagatgacgagtactgtttcagccagcatcccgactcaactggcgattgctgaatacttgtctcaggggggatatgataaccatatacgacggctacggcgccaactggagcaaaggcagattcagatgctacgggcagtgagtgagtattttcccgattctgtcaaagttaacagtacacggggcgggtattttatctggctggaatttgaaccgcctttcaatgcaaggcgactgtatcagctggcgctggccaaaaatatcagtattgcgcccggcagtatgttttctaccagttctcagtttgatcatgctttccgtctgaatacttcgtttgtatggaacgaaactcagactgctgctatgaaaacattaggaagtttgtgtcgtatgttgttaaaggaatacgggtaattagtcacattttaactgtttttctattgcgatatataaaattctttgagaagtttacaattcgacataaattgcctctttaggtgtaaataaaatataaaagcagtggaaaaataggagcatgagaatgaagtgtttcgattatacagagttaccaagagagcaatgggttgggggcatcggggaagtaagagatattgtttgttggccgaatgctgatgactttgcctggcgtgcctgcttcacatctatccataaaaatggggtattggggcacttcccggggattgatcgttcaattgtattattaaaaggtaaggggcttcgtttaaccagtcctgggttccttgaacatgaactggtacaaaaaatagctcccttccatttttccggtaatactccgggtaatgctgaactgttggatggttctgttcagtgtttcaatatcatgacccgtaattctgagtgggtttctgaaatttcttttgtgactgatgagcgcaaattaccaacatctcacagcggtgtgctttatgtcctgaaagggcgctgggaaataacgggtacaaataatgttcagctggcctttgggcaaggtgcatggtggttgcctgatgagatacgcgaaggtgtgattaagccgttagtcactgatagccagttgttatgggtggatttacattctgctgaataaattcagcaaagaatcaactggaaagatgaagagtctatttaattaaaaacctgtgacctgctttatttcaggccacaggttgtgtgatatgcactttatgccaaaacacaattatggtttccaatctttcatagtaaagttttcataatcctgcatctcgattgctattagatacgatttatttccgtagatatctgtgaatctgaataaagggctcgcattgtcccaatcatcccaaaaatcgtgtactggtgactgaaaatataatctactcagacaaacagcatctgtacgtggagtggttactatagtgacttttggcgttgcctcgtatgtaaagtcatctatactttttttt

SEQ ID NO: 1523 - DNA, 8645 bp, Xenorhabdus sp.; identical to SEQ ID NO: 1522
  CDS (6061)..(7593)

SEQ ID NO: 1524 - DNA, 8645 bp, Xenorhabdus sp.; identical to SEQ ID NO: 1522
  CDS (4198)..(5208)

SEQ ID NO: 1525 - DNA, 8645 bp, Xenorhabdus sp.; identical to SEQ ID NO: 1522
  CDS (3248)..(4159)

SEQ ID NO: 1526 - DNA, 8645 bp, Xenorhabdus sp.; identical to SEQ ID NO: 1522
  CDS (2101)..(3246)

SEQ ID NO: 1527 - DNA, 8645 bp, Xenorhabdus sp.; identical to SEQ ID NO: 1522
  CDS (904)..(2031)

SEQ ID NO: 1528 - DNA, 8645 bp, Xenorhabdus sp.; identical to SEQ ID NO: 1522
  CDS (2)..(850)

SEQ ID NO: 1529 - DNA, 8757 bp, Xenorhabdus sp.
  CDS (1733)..(1897)
  unsure (1)..(8757): unsure at all n locations
tgctctaaagtattgaaaccaaatcgcaactacgtgtctctgaattagctattcttaaacaattcgaaggttgtttctacttcgtaatttccttaacttgcaatcgatatgtaatcaatgatgcaagttcagccagcggcttatcacttaacaacaattccagcggaatatccaaacgtaattgtttgttgattttttgtaccaacattaaaccattcaatgaatcaataccgttgttagtcaaaggtagatcgggatggaatacttctgttgacgtcccaacaatctcaccacaaaaagtttgtagcaagctaacgatatcgtccagatcactcactgcaagcgccgcttctatgggtaaagtctgaaccacattttcttgctgaatatcacgcaagagcggtaaatgacgcatctggctggacagcaaatttgaccaattcgccaggaatggcaccagttgcggctcaatccgagcaaacaagcgctctaaaacagctaatccctcctctgaaccaaatggctgtaagccactattttccaatattggcagcgttcgactatcccgcaaagcgatcccagcttcccatggcccccaattaaggcttaacgcaggtaaaccttgctgacgccgtaaacaagccagactatccaacatagcgttagccgctgcgtaagatgccatacccggtaaagccaataatgccgccaacgaggaaaacataacaaaatgctctaaaggtgcatcagccaatgcttgatgcaatgtccaggcagctaatgctttagtggcaaatactctatcaaacgcctcggggctgagttcacgatatccctgatcttcaacatgcgcagcgcaatgaatcacccctcgcagcggctggctggcttgttgtcgatactcagccaaacaaatgcgggtgctttccacatcaccaagatcaaccggcagataattagcctctatcccttgttgatgtaacatttccaataacttttgatcagccgcatcaagggcaagacgacgccctatcaataacaaatgttgggcaccatgttgtaccatccagggaatcaattgacgcccaatatcaccaaaagcaccagtcagcagatagcagccatccggacgaaaacgtactggtggtagcgcgggtatttcaggtaatggcgcaaggcgtagcacataacgctggtcatggcgcagagctaattgatcctcgtcgtcacctatcaatagcgcatcccaccatttggctggagccgtgatactgtcaatatccagtaatccaccccataatgcagttgcttcttgttgaccaataacgcgcatcattccccataatgcggcggcaaatgggtcgggctgatcctgctcagtgatttgatgagcacattgagtcactatccacaaacgtggttttatcgaccgttcggccagcgccgcacacaaatgtatcaacgaatgataagccatccgcggagcctgcaacggccagaggaccaggatcctttctgtttcaacaggaagagtatcaactaattcctgaattttctgataactgtcaggcagaccagaatacaacgaggcacacccaccacggcgttgcaactcatcaactaactcttctgccagagcgttttcacccccaaggatagcccattgcgtcacagactctgttgacggctgagcgggcaatttacgccactgtggttggccgacaaccagattgtgcaatttggcagacaagctgttttttctattaccaacaagctgaacgcaaaatccgctaatctgacaaagcaacataccgctatcagtatagacgtcaatatcaccaatccattgttgttgcgtctgcttagtatttcgggcatggacatgaacccgacctgacaatttaccattgatacgcaaatgctgaatactgaccgggatacggaactcgttggcaggaattggcgcgtgaacatcagcagactgaatcgccaacaatgattggaagatgccatccaaagccgctgggtgaaaattcattccctccggtgcaggtggtaattcaatctcacagattgtttcttctttaccaacaaacgcatggcgcagagtacaaaaaacaccactataactgaaatgtagatgttgaaatgcctgatacaacatctcttggttccacatgcaaggatagcgatcatttaccgctaatggaggaatagcacaagcagtagcacccggtacaacgatgttcacctgtgcactggctgcaagttggtaatgtacactctcatccagattacgggtaatgtgtacttgcacttccattcgctggcgatctagctgtgtctttaacctgaattctatgcctggctctagcagtaaagccgattgcaacacaatattatcaagcgctaatccaacgtcaggaaaacagatacgagccgccgccaacatgatttcaatatagcccgcagccggaaacattgcatttcccatgacaacatgatcgagtaaccaaggcacttgttctacagtcaactcagcttgccaactctcgctgcccggctgagcttcgcccaataatacaccgctcaatatacgtaatcggcggcgacggctaatttctggttcatgccaataagattgctgatgccaggagtaagtgggtagatcaattgggcaagcggtaggcatcagagcccgccagtccggttcaacgccagattcaaacagctgtcctaacagttgtggccagttctgccctgagcgacaagcaaacacctgccctcgataaggctggctccagtcctttaatcctgaactcagtagggatttaggtgaaacttccagaaaatggtggaaacccgctttgagcatgttttctaccgcatcgtcaaaacggagtgacgagacaacattgtcagcccaatgctcgggattcaactttccattaatcaactccccggtgactgatgaaaacactggcaacaaaggttctgctgcgggaacggttgccgcatccgcagtcaatccagccctgattgactctatataatgtgaatgagaagcaattctataattaagccaactactggcgatacgctgctgctttaagcgctcagcaacagcggttaattcacttatcggcccagacagtaagcaacgattgatactattacgacctgctatcaccacggcaggctcgacaccgggggcagacaaatgaggcaatatctgctcaactgtcgccgccacgattaataatccgccgcctttattcaacacacgttccagataatgataacgctgatgtaacagtgtcagtgcctgcgtcagatcataaattcccgccagataacaagccgccatttcaccggaactatgaccaagtaacgccgctggtttgaacccccacttctgcaactgcgcagccattgagatttgtacagcaaactgcattggcggctctatcagttcatcggcagagatcaatgccgcatataaggaaggtgcagaaaatcccgtccaaattgcctcacaacgctcgaattgttcagtaaattcgggaaattgctgaaaccaagcgatagagtcttgccaatcttcgctgccaatacccgcaaatatccaagccagacgatcaacttttttattgttatgctccgacgacacattcagattagtcaaccgctgtcgcaactgttcccggttactgaatgcgatccccttacgtaacggaaagcagtgacgagtcgtcgccaagctatagcacaaatcatcaagggcaatatctggctgctgttgcagcaaatcagcaatgctctgagcttgttgcttcagagaaaactcagactgcgcagacaatggcagcatgaaagcttgcccttgcgtcgtccgaagttgtacggaaggttctgcattattacttaacaccacatggacattcgttccgccaaaaccaaaggaattcaccccagctatcacttttccttcagacagtggagttaactgctgtgggacttgcaatcccaactcaataaaacgaatgtggcggttaggcggttcggcatgtaaattgcccggtacctgtcctcgttgtaaacacaataccgctttaattaatccagcaatgcccgccgcagcttccgtatgaccaattacggatttacacgcaccaatcaacaatgggcggtcngtcggttnggncnnncaggccccaagccccagcgcttctgcttctatcggatcacctactccagtcccagtaccatgggcctcaatataatcaatctcttccggggaaatccccgcctgagcacaggccatccgaatcactcgttgttgtgcgctgctacttggctgagtaatcgtgggagtgtggccatcttgattggctgctgaaccgtggatcaccgccaaaacgggatcgccatcctgtaaagccgcattcaaaggtttcagcaaaacagcaccgactccttcactacgcacataaccatcagcgttagctgaaaagctatgacagcggttggtcaatgatagaaaaccagtacggctttctactatcgaaaaatcaggcatcaacattaactggcttccacccgctagcgccagttgtgattctccgcgccgcaaactttcgcaagccaaatggaccgctaacagggacgatgaacaggcgctatcaatagtcaaggatggcccttgaaaatcaaacgcatgggatatccggtttgacaacatggttcccattgcaccggttgaggtataaccggtagtctgacgcaaatcagtaaattgcaggtgcatataatcatgagtgaaagcaccgatatagacaccaaccgcctgacccgccaacgattttggcgctattctcgcccgttccagcgtttcccatgtcacctgtaacatcaaacgatgctgtggatcgataaaaggcgcttctgtattactgatatcaaacaccgccgcatcgaagccggtaacatcagcgataaatccgccttctcgcgccaccattttccccggcaaattgcgatctcggtaactataagcctgagttgaccagcgttcaggggggactggggtaattgcgttacttgaaccacataacagctgccagaattcctctggagagctaacacctcccgggaaacggcaactcataccgataatggcaatcggcatattatcgcttctcatcatattgatatccatagtggtattctttactccgattagttatttgccagatcatcgggcttacttatcaacaccaagtcgtcggactgggaatacattttggcggatgaggtggtaatcccggcgtcatcaatgactgatagctgatacccgtattgagtagctgataacgcaaaccacttgggcaggtggtggcaccatccattgcctgagtgatatcaactgtcaccccaaaagcgacattaaccggttgcaatgtattgtcagccgcagtacggatgatacgtaatggcgatccaccacaaacttgcagatggttattaccgacctcactcacccgaatcaccataaagttacaatatcctcgataattcagatcggtgtctggcggctggttggagataatccaatattgatcactttgtttttcaatgagtttggcattagataacaggctgtagccgttatcagtgaatacctgacgcaactcttttgagactgtgccactatttaatgaactcatcagctcaagcgccgcactgaataaaggcacacctgttaacttattgcctgtttcctcaaacggtaaagccaccgcgccattggtcagattagcgccggtcaatttagcttccgtaaagatagtgccttgaattgaagcaaaggccagagatgccggcttaagaccttcggtgggttctaacattgccttgctgaaatcagtattcaccagactcgcataggacaaattcgcaccaaacaatcgagcctgagtgaaattcattgtcgctaagttagcattcgacaaattgacctgttccaaattggcgttatcggctctggcgttactgccgtaccaatgagcgccagacatatcaaccgcgtacagattagcgccagtcaggatagcattaggcataaatgtgttggcaagaattgccgcattaccgccattatcttgcgcaacgtttaattgcccatcctgatagtgaataaataatggtttaccatcatgttccaccagccagttctggcccggctgacgaaccaacacctctgcctgaccattaactaatatctttccctgatacaacatttgacgtaaccgttcaggcagttgctgattatccagtgtctgagcatcggctttatccaaatgtgtcactgtggataaagcaccaaattgagcaccagttaaattaacattctccagactcgcattagataaattcgcgccgactaaagagacattccccagaatagtggcaccggccagattagcaccaaccagaactgcgccattcagtgacgtataatccagatttgcctttttcatcgacgccatcagaaatatgacttgatccagcttctggctgctcagattaacgccatccatctgcgcctgagtaaaatccgtattcggcaacgtccagagacgcactttggctgacactccagttatgattttgcaggcgaccatcattatgcgaagttttcagcgcattagatgttggcgagccggaataattctccgtatcatccgataggttatattgcatcaccggatcaccttcggcgaaaatcacctgtccgtcttgacctacccagtcaaattcgtaaaacattgcgttgccatcagggtcaaccaattgcccataagtggcaaaaccgcctgtttctgtcgcgggtccctgactcgatattgatatagccagttcataaactcggttatattgcagtgggtctattgcctccggtggggcaatatgtgaatgagtgacaattgatgctgcataagcctgactgttagataattccggatgggaaaacacaatagagcaagcaacatcccacggtgttttaatttcattagccgcaacccacaaatcggcgtaatgaatagaatttcgcgctaaatgttggttattaacaccgagagcactaagtttacccggcaaagccatctctatattatttactgtcagtttttctctgttacgtttggcataatgatgtaaatgagcattgggaatatgataagaaagatgataaagaaccggtaatgaagaacgataaggcccggatttatcaccaaccactttaattagcgtaacgtgatgaggtaaaaaatagtgttcaggtacctccgcgaaatggctgatattgtgtgaaccgtaactcagaaccatatctattgcaggattttctccagctgctctggctaaacttgactcatcatgttcttgcaacggtatattatattcaccaacccaaaggtttaattgactggattgggtacgtaaatggctttgagctaggtcaaaatgtagaatatgcgttttcatttgtatttcatctctctaaatgactattttcgttatcacaataaatactcaataaccgtataaataatccggcagaaaatcctgaaaaaacaatcccatgagaatgaatacatcctcctataaacttatttttaaatgataaacacctgaaactaagtagaaaaagatttatctactttacaaaaatcaattgaaagtgacataaagctaactttcaattttagctaattgatggtttcaattttaaatctttattatcagacgttattagtatgatttaaattaagagaaaaaataatcctctaaaattataaaacctatcttcaataataaaataagcctttaaacaaactcacctcataaattaagatggcgttcagaattctgtgtcacgttaatttagcggttataacgttattacattatccaaacgctcttcaaagatcgtatattcaatctgttgatttgtgttaaacgtagtattcactttcaatgaaagtgccgatgacattattcgcgtactttggggaacctctaaaaacttttcacagccacaaaattgagtaaaatgtaggcacagtacctctctgcaaggtagcgccatcatgataccgcctcgttctgctttaaaaaaagacaaacaggcatccgaatatcaccgtcgaaaaatcgatgaattaggtgatccgctgcttgttcttgataaatatgttgatttctcggcactggctgacaccctagaccgtatcgtcccacgtattatttcccccaaagggggacgcccgccattcccgacggaggtgatggttcgcatcattatcctgaaacatttccataatctttccgatgaaaaaatggaatatcaattgcttgaccgaatgagctggcaacgtttttgtcgcttgaccgatgtcattaatattccagaccgtaacacgatttggtgtttcgaaaaacggattgggcaggaaggtgccagagcgttatttgaagaggcgaagcatcagctgtcagcacagggattcattcccagaggagggcaaatcattgatgccacgttgatccccgtgcctaagcagcacaataagaaggaagaaaatgaacaaatccgtcagggcaaaaccccggataactggacagtaaacaaacgatgccagaaagacaccgaggcaaccggacgaaaaagcacggtaagctntttnagagcac

SEQ ID NO: 1530 - DNA, 8757 bp, Xenorhabdus sp.; identical to SEQ ID NO: 1529
  CDS (8352)..(8756)
  unsure (1)..(8757): unsure at all n locations

SEQ ID NO: 1531 - DNA, 8757 bp, Xenorhabdus sp.
  CDS (3540)..(8681)
  unsure (1)..(8757): unsure at all n locations
gtgctctnaaanagcttaccgtgctttttcgtccggttgcctcggtgtctttctggcatcgtttgtttactgtccagttatccggggttttgccctgacggatttgttcattttcttccttcttattgtgctgcttaggcacggggatcaacgtggcatcaatgatttgccctcctctgggaatgaatccctgtgctgacagctgatgcttcgcctcttcaaataacgctctggcaccttcctgcccaatccgtttttcgaaacaccaaatcgtgttacggtctggaatattaatgacatcggtcaagcgacaaaaacgttgccagctcattcggtcaagcaattgatattccattttttcatcggaaagattatggaaatgtttcaggataatgatgcgaaccatcacctccgtcgggaatggcgggcgtccccctttgggggaaataatacgtgggacgatacggtctagggtgtcagccagtgccgagaaatcaacatatttatcaagaacaagcagcggatcacctaattcatcgatttttcgacggtgatattcggatgcctgtttgtctttttttaaagcagaacgaggcggtatcatgatggcgctaccttgcagagaggtactgtgcctacattttactcaattttgtggctgtgaaaagtttttagaggttccccaaagtacgcgaataatgtcatcggcactttcattgaaagtgaatactacgtttaacacaaatcaacagattgaatatacgatctttgaagagcgtttggataatgtaataacgttataaccgctaaattaacgtgacacagaattctgaacgccatcttaatttatgaggtgagtttgtttaaaggcttattttattattgaagataggttttataattttagaggattattttttctcttaatttaaatcatactaataacgtctgataataaagatttaaaattgaaaccatcaattagctaaaattgaaagttagctttatgtcactttcaattgatttttgtaaagtagataaatctttttctacttagtttcaggtgtttatcatttaaaaataagtttataggaggatgtattcattctcatgggattgttttttcaggattttctgccggattatttatacggttattgagtatttattgtgataacgaaaatagtcatttagagagatgaaatacaaatgaaaacgcatattctacattttgacctagctcaaagccatttacgtacccaatccagtcaattaaacctttgggttggtgaatataatataccgttgcaagaacatgatgagtcaagtttagccagagcagctggagaaaatcctgcaatagatatggttctgagttacggttcacacaatatcagccatttcgcggaggtacctgaacactattttttacctcatcacgttacgctaattaaagtggttggtgataaatccgggccttatcgttcttcattaccggttctttatcatctttcttatcatattcccaatgctcatttacatcattatgccaaacgtaacagagaaaaactgacagtaaataatatagagatggctttgccgggtaaacttagtgctctcggtgttaataaccaacatttagcgcgaaattctattcattacgccgatttgtgggttgcggctaatgaaattaaaacaccgtgggatgttgcttgctctattgtgttttcccatccggaattatctaacagtcaggcttatgcagcatcaattgtcactcattcacatattgccccaccggaggcaatagacccactgcaatataaccgagtttatgaactggctatatcaatatcgagtcagggacccgcgacagaaacaggcggttttgccacttatgggcaattggttgaccctgatggcaacgcaatgttttacgaatttgactgggtaggtcaagacggacaggtgattttcgccgaaggtgatccggtgatgcaatataacctatcggatgatacggagaattattccggctcgccaacatctaatgcgctgaaaacttcgcataatgatggtcgcctgcaaaatcataactggagtgtcagccaaagtgcgtctctggacgttgccgaatacggattttactcaggcgcagatggatggcgttaatctgagcagccagaagctggatcaagtcatatttctgatggcgtcgatgaaaaaggcaaatctggattatacgtcactgaatggcgcagttctggttggtgctaatctggccggtgccactattctggggaatgtctctttagtcggcgcgaatttatctaatgcgagtctggagaatgttaatttaactggtgctcaatttggtgctttatccacagtgacacatttggataaagccgatgctcagacactggataatcagcaactgcctgaacggttacgtcaaatgttgtatcagggaaagatattagttaatggtcaggcagaggtgttggttcgtcagccgggccagaactggctggtggaacatgatggtaaaccattatttattcactatcaggatgggcaattaaacgttgcgcaagataatggcggtaatgcggcaattcttgccaacacatttatgcctaatgctatcctgactggcgctaatctgtacgcggttgatatgtctggcgctcattggtacggcagtaacgccagagccgataacgccaatttggaacaggtcaatttgtcgaatgctaacttagcgacaatgaatttcactcaggctcgattgtttggtgcgaatttgtcctatgcgagtctggtgaatactgatttcagcaaggcaatgttagaacccaccgaaggtcttaagccggcatctctggcctttgcttcaattcaaggcactatctttacggaagctaaattgaccggcgctaatctgaccaatggcgcggtggctttaccgtttgaggaaacaggcaataagttaacaggtgtgcctttattcagtgcggcgcttgagctgatgagttcattaaatagtggcacagtctcaaaagagttgcgtcaggtattcactgataacggctacagcctgttatctaatgccaaactcattgaaaaacaaagtgatcaatattggattatctccaaccagccgccagacaccgatctgaattatcgaggatattgtaactttatggtgattcgggtgagtgaggtcggtaataaccatctgcaagtttgtggtggatcgccattacgtatcatccgtactgcggctgacaatacattgcaaccggttaatgtcgcttttggggtgacagttgatatcactcaggcaatggatggtgccaccacctgcccaagtggtttgcgttatcagctactcaatacgggtatcagctatcagtcattgatgacgccgggattaccacctcatccgccaaaatgtattcccagtccgacgacttggtgttgataagtaagcccgatgatctggcaaataactaatcggagtaaagaataccactatggatatcaatatgatgagaagcgataatatgccgattgccattatcggtatgagttgccgtttcccgggaggtgttagctctccagaggaattctggcagctgttatgtggttcaagtaacgcaattaccccagtcccccctgaacgctggtcaactcaggcttatagttaccgagatcgcaatttgccggggaaaatggtggcgcgagaaggcggatttatcgctgatgttaccggcttcgatgcggcggtgtttgatatcagtaatacagaagcgccttttatcgatccacagcatcgtttgatgttacaggtgacatgggaaacgctggaacgggcgagaatagcgccaaaatcgttggcgggtcaggcggttggtgtctatatcggtgctttcactcatgattatatgcacctgcaatttactgatttgcgtcagactaccggttatacctcaaccggtgcaatgggaaccatgttgtcaaaccggatatcccatgcgtttgattttcaagggccatccttgactattgatagcgcctgttcatcgtccctgttagcggtccatttggcttgcgaaagtttgcggcgcggagaatcacaactggcgctagcgggtggaagccagttaatgttgatgcctgatttttcgatagtagaaagccgtactggttttctatcattgaccaaccgctgtcatagcttttcagctaacgctgatggttatgtgcgtagtgaaggagtcggtgctgttttgctgaaacctttgaatgcggctttacaggatggcgatcccgttttggcggtgatccacggttcagcagccaatcaagatggccacactcccacgattactcagccaagtagcagcgcacaacaacgagtgattcggatggcctgtgctcaggcggggatttccccggaagagattgattatattgaggcccatggtactgggactggagtaggtgatccgatagaagcagaagcgctggggcttggggcctgnnngnccnaaccgacngaccgcccattgttgattggtgcgtgtaaatccgtaattggtcatacggaagctgcggcgggcattgctggattaattaaagcggtattgtgtttacaacgaggacaggtaccgggcaatttacatgccgaaccgcctaaccgccacattcgttttattgagttgggattgcaagtcccacagcagttaactccactgtctgaaggaaaagtgatagctggggtgaattcctttggttttggcggaacgaatgtccatgtggtgttaagtaataatgcagaaccttccgtacaacttcggacgacgcaagggcaagctttcatgctgccattgtctgcgcagtctgagttttctctgaagcaacaagctcagagcattgctgatttgctgcaacagcagccagatattgcccttgatgatttgtgctatagcttggcgacgactcgtcactgctttccgttacgtaaggggatcgcattcagtaaccgggaacagttgcgacagcggttgactaatctgaatgtgtcgtcggagcataacaataaaaaagttgatcgtctggcttggatatttgcgggtattggcagcgaagattggcaagactctatcgcttggtttcagcaatttcccgaatttactgaacaattcgagcgttgtgaggcaatttggacgggattttctgcaccttccttatatgcggcattgatctctgccgatgaactgatagagccgccaatgcagtttgctgtacaaatctcaatggctgcgcagttgcagaagtgggggttcaaaccagcggcgttacttggtcatagttccggtgaaatggcggcttgttatctggcgggaatttatgatctgacgcaggcactgacactgttacatcagcgttatcattatctggaacgtgtgttgaataaaggcggcggattattaatcgtggcggcgacagttgagcagatattgcctcatttgtctgcccccggtgtcgagcctgccgtggtgatagcaggtcgtaatagtatcaatcgttgcttactgtctgggccgataagtgaattaaccgctgttgctgagcgcttaaagcagcagcgtatcgccagtagttggcttaattatagaattgcttctcattcacattatatagagtcaatcagggctggattgactgcggatgcggcaaccgttcccgcagcagaacctttgttgccagtgttttcatcagtcaccggggagttgattaatggaaagttgaatcccgagcattgggctgacaatgttgtctcgtcactccgttttgacgatgcggtagaaaacatgctcaaagcgggtttccaccattttctggaagtttcacctaaatccctactgagttcaggattaaaggactggagccagccttatcgagggcaggtgtttgcttgtcgctcagggcagaactggccacaactgttaggacagctgtttgaatctggcgttgaaccggactggcgggctctgatgcctaccgcttgcccaattgatctacccacttactcctggcatcagcaatcttattggcatgaaccagaaattagccgtcgccgccgattacgtatattgagcggtgtattattgggcgaagctcagccgggcagcgagagttggcaagctgagttgactgtagaacaagtgccttggttactcgatcatgttgtcatgggaaatgcaatgtttccggctgcgggctatattgaaatcatgttggcggcggctcgtatctgttttcctgacgttggattagcgcttgataatattgtgttgcaatcggctttactgctagagccaggcatagaattcaggttaaagacacagctagatcgccagcgaatggaagtgcaagtacacattacccgtaatctggatgagagtgtacattaccaacttgcagccagtgcacaggtgaacatcgttgtaccgggtgctactgcttgtgctattcctccattagcggtaaatgatcgctatccttgcatgtggaaccaagagatgttgtatcaggcatttcaacatctacatttcagttatagtggtgttttttgtactctgcgccatgcgtttgttggtaaagaagaaacaatctgtgagattgaattaccacctgcaccggagggaatgaattttcacccagcggctttggatggcatcttccaatcattgttggcgattcagtctgctgatgttcacgcgccaattcctgccaacgagttccgtatcccggtcagtattcagcatttgcgtatcaatggtaaattgtcaggtcgggttcatgtccatgcccgaaatactaagcagacgcaacaacaatggattggtgatattgacgtctatactgatagcggtatgttgctttgtcagattagcggattttgcgttcagcttgttggtaatagaaaaaacagcttgtctgccaaattgcacaatctggttgtcggccaaccacagtggcgtaaattgcccgctcagccgtcaacagagtctgtgacgcaatgggctatccttgggggtgaaaacgctctggcagaagagttagttgatgagttgcaacgccgtggtgggtgtgcctcgttgtattctggtctgcctgacagttatcagaaaattcaggaattagttgatactcttcctgttgaaacagaaaggatcctggtcctctggccgttgcaggctccgcggatggcttatcattcgttgatacatttgtgtgcggcgctggccgaacggtcgataaaaccacgtttgtggatagtgactcaatgtgctcatcaaatcactgagcaggatcagcccgacccatttgccgccgcattatggggaatgatgcgcgttattggtcaacaagaagcaactgcattatggggtggattactggatattgacagtatcacggctccagccaaatggtgggatgcgctattgataggtgacgacgaggatcaattagctctgcgccatgaccagcgttatgtgctacgccttgcgccattacctgaaatacccgcgctaccaccagtacgttttcgtccggatggctgctatctgctgactggtgcttttggtgatattgggcgtcaattgattccctggatggtacaacatggtgcccaacatttgttattgatagggcgtcgtcttgcccttgatgcggctgatcaaaagttattggaaatgttacatcaacaagggatagaggctaattatctgccggttgatcttggtgatgtggaaagcacccgcatttgtttggctgagtatcgacaacaagccagccagccgctgcgaggggtgattcattgcgctgcgcatgttgaagatcagggatatcgtgaactcagccccgaggcgtttgatagagtatttgccactaaagcattagctgcctggacattgcatcaagcattggctgatgcacctttagagcattttgttatgttttcctcgttggcggcattattggctttaccgggtatggcatcttacgcagcggctaacgctatgttggatagtctggcttgtttacggcgtcagcaaggtttacctgcgttaagccttaattgggggccatgggaagctgggatcgctttgcgggatagtcgaacgctgccaatattggaaaatagtggcttacagccatttggttcagaggagggattagctgttttagagcgcttgtttgctcggattgagccgcaactggtgccattcctggcgaattggtcaaatttgctgtccagccagatgcgtcatttaccgctcttgcgtgatattcagcaagaaaatgtggttcagactttacccatagaagcggcgcttgcagtgagtgatctggacgatatcgttagcttgctacaaactttttgtggtgagattgttgggacgtcaacagaagtattccatcccgatctacctttgactaacaacggtattgattcattgaatggtttaatgttggtacaaaaaatcaacaaacaattacgtttggatattccgctggaattgttgttaagtgataagccgctggctgaacttgcatcattgattacatatcgattgcaagttaaggaaattacgaagtagaaacaaccttcgaattgtttaagaatagctaattcagagacacgtagttgcgatttggtttcaatactttagagca

SEQ ID NO: 1532 - DNA, 8757 bp, Xenorhabdus sp.; identical to SEQ ID NO: 1531
  CDS (2114)..(3487)
  unsure (1)..(8757): unsure at all n locations

SEQ ID NO: 1533 - DNA, 8757 bp, Xenorhabdus sp.; identical to SEQ ID NO: 1531
  CDS (1366)..(2172)
  unsure (1)..(8757): unsure at all n locations

SEQ ID NO: 1534 - DNA, 8148 bp, Xenorhabdus sp.
  CDS (6316)..(7776)
aatatgattgggtgtaataatacatttagggtgttttaaatgcttatcgtcaccttcgactgtcacctgaagagtacacgtactagtaatctcagaacctttaagagtatatccatatctcaatccatatatctcaatataaataattaaataaaattaaagtgagtgagtagaatgatactataagaggtataaatgatctgagatacaggatttattagtcttataataaataagcgtaaaaataaaaaaatatatcaaattatctgtttatattgacttaatatatagctttgaatttcaagaacgatattttctatcgataaggccgcatccacaatgaggtgcgcacattcacaatagagtggttccctctctgccaatactccggttatttcttctgttatggattttccggtcaggctgggacgctgtgaattctccggattaagagagagccgctctaccaaaacggaagcgggtgcctgcaaataaaccacaataccgttttgccgcatatactgccgattttccgctgctaacaccattccaccaccggtagacacaactctgtttcgctgactaaccgctttcagtgtttcactttccagctttctgaaataatcccagccacgctgttcaacaagctctgcaattgtcattccacaagaaatctggacatcttcatcagtgtcaacaaattgatacgataatacttcagccaacacattacctattgtcgtcttccctgtacctcgtgcacccacgataaatagagtctgtttcatttcgttgctttcctgaagttttgtgttgttaaacctaaatacaaagtatagtaactaaacatttacacctatgtaaaaaatatatgttcttgtatataaaaagccacactttacattaagtgtgacttactctgattaaatattacttaaaatgaatattgtcattatcgacgggaaaggtaatctccgtaaccacatccatttgtaagtcgtcagagcatccagacccattgggcctctggagtgtagtttctgagtactgacagcaacttccgctcctaaaccaaactggccaccatcagtaaagcgtgtgcttgcatttacatataccgccgaagagtcaacacgatgaacaaaataatcagcatgttgtaaacactccgtcagaatagcatccgaatgggctgtaccataatgacgtatatgctcaatcgctttatcaatattgctgacaatttccacattcatgtccaaagaaagccattcatcacaatagtcttcttctgtcacggcaaccacttttgccgggccatcctgcaacagtgccattgctgacgcacctgcatgcagtgttacgccctgcgctttcattctggcactcagttccggcaggaaatcagcggctattttttcatgtacgagcaaagtttccaatgcattacatgcgcttgggcgctgaattttagcattagtgataacttccagtgctttttcaaaattcacatgctcatccacaaacgtatgacaaacgccaattcctccggtgattaccggaatagtggactgctcacggcaaagtttatgcaacccggcaccaccacgcgggatcaacatatcgatatagcgatccattttcagcatttcggcaaccagctcacgatctggtttattaattgcctgtactgctgaggctggcaagccactttgttccagcgactgctgaatgactttaaccattgcctgattggtatgatgagtttccttaccaccacgtaatatcactgcattccctgttttcagacacagtgatgcgacatcaatcgtaacgttagggcgggcttcataaattaccccaattaccccaagaggaacacggcgacgactcagttgcaacccgctatccaataattgtccgtccatcacttgaccgacaggatcagccagacggcaaacctgacggacgtcattagcaatcgcactcaaacgctccggagtcagtaataagcgatcaagtaatgcttcattcataccctgtttacgggcttgttccatatcctgctgattggctgtgaggatcacttgtgcttctttttcaagtaaatcagcaatgtgactcagagcctgatttttctgactagtacttaattgagccagttgccatgatgctgccttggctgcttttcccatctgctctagcatggtggaatccttaacttacgatcatatcatcacgatgcacagcaactgcaccatattcataacctaatatctggctgatttcctgtgagtgacggcctgcaatcaggcgtaaagcatcactgttgtaacggcatacaccgtgagccagtttcttaccggataaactacagatgcgaaccacttcaccacgggaaaagtcgcctgtaatacttttaatacctttcggcagtaaagagctgccttttgcgagaatagccgcttctgcaccatcatcgacaataatttcgcccgcagaaggagcaccgaaaatccagcgtttgcgattttccatcgggctggttaaaccatgaaaacggggtcctactgatttttcttcaatcacatcagcaatcacattttttctgttaccggcagcgatgatgacatcaatgccggcacgaccagctatccctgccgcctgaagttttgttgccatccctcccgttccgagacctgatacactgtctccggccatcattttgagttcatcgctaatatcgtgtacttcacggataagtttagcatcaggattattacggggatcagcagtatacagaccttcaatatcggtcaggagcaataacttatcagcagtgcccagaattgccgccagtgcagaaagattatcgttatcaccgactttaatttccgccgttgctaccgcatcattttcattgataatcggaataatgtgattatcaagcagtgcatgcaacgtatcccttgcattcaggaaacgttcgcgatcttccagatcggcacgagtcagtaacatctgcccaacatggatgccatagatggagaaaagttgctcccatagctgaatcaggcggctttgccctacggctgcaagcaattgctttgaagcaatggttgccggaagatccggataacccaagtgttcccgacctgctgcaattgcaccggaagtcacaataataatacggtgacctttctcgtgtaactgcgcacattgccgaaccaactctactatgtgagcacgattcaaacggcgggaaccccctgtcagtacactcgttcccagtttcacaaccaatgtttgtcggccattcatcatatttctgccattattaatttgaaaaagctaatttgaaaaaacaataaattcaaaacacattcaaaaaacagtgctcagttttagcaggagagaagcattatgccaactggcataacacaaaattcaaaaaaagttgatttataccctgccaatttcaagatacagccaaaatccggcctctggtgataggcaggaaagtatcagcacaccccggcaacacagacaactctctagccgggggtgtagctatccaaaaaaacagcgcagccagtaaggctgcaacttaaaatctggcagggataaaataaacccggttaatagacttaattttgtggggtgaaggtattttcagatgggctaagcgtgagtttaaggttacccaaagaatcagacaggcgttgatgaaatgcctgtaatgtcaattcaagctgcctgagatctgcttcttttttgatattcataggcagccactcaccatgtttatcaaacagacctatctgataattataaacgaaccctttttcctgtcgttccaattctaaccaccagccccagaactcccgtttttctggcgctgctttcgcactaacgcagaccgccagacaatcaaagaagaaatagtcattttggcattttaattcgcgtaaataaggccctaatgcagaaaaactcttcaacaacttatttctggaataatttacgggtacagtcatacaaaggtctcctttataaacagaagaacagttgtatcaaatgattaaaaaatatcaatgattaaatttcagtttagttaactttatctttcaaccatacacttgctgcgtgtaatgccttactgaaaccactataagcaggcatagcaggaatagctaataaagagccatccagcgaagatctggcaatcagttttgaatcttccgccgggctaaaaatgtcatctttccaatacactgagaacattggcacagaacaacgacgacccagtaatccctgattttttaatgaataacaattcagttctgaacgcaaaactgcttcatccacatgatagatacccaaacgactggcgagtatatcgatatacattgacggaattttctgctgcaatctctcattatgcagcaattcatgaacaaccgggctgaccactgccacacccttaataagactggattccagataggcaagacgaacggcaatattggcgccgaaacggaaaccaaaaatacctattcttgtgtgatcgatccacgggatgctatccaattgctgcaatacctgctgatggagagcgcaggtatcctgtgtcagcgtaaatctcgctgaataacctacggaaggcatatccaccgttagcatcgcaaaaccctgtggtaagaaatgatcccgaaacagtcgccagcaatcactttgcaggctatcaataccagagcaaaccagtattgttgggcatggttcctgaactccgggaggaatatgcagtaaaccggtaacagttttgccatcttccagctgaaatttcagttttttcagttgatagtcagagaaatgtgctgcattttcataggctttattagccagaacaaccgcctgatcagccagctcatcaccgtgcagatgaggataggcggcaatgctgtataacattgaagctcttaaccagcactgactggcttcagacgactgctcaacatgttgtgctttctgttgccagagcatagcctgctgagaccattcatatacccagttccctttgcgataaccaattaccgtatccaatagatggtcataactgcgttcagcatctgttacagcaatcctgctgaggatttcctgaatctccagcggattgatgcccctccagatccaggcaagccagttaatcatgcgataccagcgttcctgatgttcgccaccgagcattttattatcagcatgagctgatgatggcaaaacgtattttaccagtgtagacgtttcctgctgtttaacctgcggtttaaacagtgattctgaaaggttctgtttagtcatgacaaagaaatttattactgcttattacaagatatccaataaattctgagctgcattgcgataataaaagaataccagattcgtcggaacgaatttgctcagccaaaggctggcctccggtgagaagcaagagcctctctcattaaaatccccagtggcatagataactatgtgactggggcgtaattatgtaaagcaaagcaaccagcaaagaaataactggaaaaatgaagggaataattactgatcgcaaataggtggtacgaacattacgcccatatcccacggctgttcaatccatgtattctgtgggatatcaatcacataatcatctactaacggacgacctgctggtttggcaaagatcgtcacaaaatgcgcttttggatacatttcacgaattgcctgagcagtgccgccggtatcaaccaaatcatcaacaacgataaagccttcgccatctccttcggctttcttcagcactgttaattcacgctgattattgtggtcatagctggaaatacagactgtatcaacatggcggatacccagctcacgggccagcaaggcacccggcacaagacctccacgacttacagcaataatgcctttccattgctctacaggaagtaaacgctgcgccagtttacgggcatgtatttgcaacatatcccacgttacgacatatttttcgctcataaaatttgatcctggaaactaagaatattttcagaaaagagtttgttgcggaataaaggttgcgcgggattatagtgatttgagcccgcaaaaaccagcaaaaacaaggaacatcctgatcctgaaagcgcattactaatcagaaaatggtattctcaggcataacatagacactgggcagctcaagatgacaaagccccccgagatgtcaaacattacacttatatttcatcaagatgaagttacaggagattcgccgtgtccgaattatcaacattatccccccaaccattatgggatatttttgctaaaatttgctccattccacatccatcctatcatgaggaagaacttgcttctcacatcattgaatgggctgaggataaaaacctccatgttgaacgtgatgaagtcggtaatattctgataagaaaaccggccacaaaaggcatggaagaccgtaaagcggtcgtacttcaggctcatcttgatatggttccgcaaaagaacaatgatacacagcatgatttcgcgaaagatcctattcgtccttacattgatggtgactggataaccgcagaaggtacaacactgggcgcagataatggtattggtatggcttccgcgctggcagtactggccgatgaatctgtcaaacacggccctctggaagtgttactgacaatgactgaagaagcgggtatggatggcgcatttggtcttcaaccgggctggttgcaggctgatattctgatcaataccgattcagaagaagaaggcgaaatctatatgggttgtgccggtggggtagattatgtttcaacactaccactttcccgcgaacctctacctgcaaactatcaaacactacaactgaccattaaaggattaaaaggtggtcattccggtggtgatatccatctgggattaggtaatgccaataaattactggcccgtttccttgctgaatacagtgatgaactggagctgaaactgatccatttacagggtggtactctgcgtaatgcaatccctcgtgaaggttctactatcattgccgtcccaacagctcagctgccaaaactacatcaggtaaaagataattatctggaaatactgaagaacgaatatgcggtcgctgaaactaacctgactcttttgttggatgacgtcaaaacctcatcacaggcattaacggcagattgtcagtcccgctttatcgctatgctgaatacaatgcctaatggtgttattcgcatgagtgatgttgcaaaaggtgttgtagaaacatccctgaatgtgggtgttgtcaatatggaagaagaccacgtcgaggttatctgccttatccgttcattgattgaaagtggtaaggcttatgttgtcgggatgctcaactctctggccaaactttccggcgcagaagcaacagcaagtggtgactaccctggctggcaaccggatgccgattctccggtaatgcacttagtgcgtgaaacttatcatcagctgttcgacagcacaccaaacattatggtaattcatgcaggtctggaatgtggattatttaaaaaaccctaccctgatatggatatggtttccattggcccaactatccgtggtgcccactcacctgatgaaagggttcacattaagagtgttggccagtactggcaattattgacagctatcctgaaagctatcccagtgaaagaataatacagtttctcccctgtccacagacctgtctttcatacacaaatcccccgataaaaaatcgggggattttttgaatctttttccactttaccgatctgagtaataacgatttcattgaggtacggtaaaatgttccaaactcacgcagaacaatgggctgatgaaactttttctcgcgcaaatttgggcgatagtcggcgtacaaaacggcttatcaaattcaccgcctcgttagccaatcatatcgggcaatctattgtgcaatcactcaaaaccccagcggatattgaagccgcttatcggtttacgcgtaatcaggccattaacgcaacctctattgccgaggccggatttgcggcgacggctgaacac

SEQ ID NO: 1535 - DNA, 8148 bp, Xenorhabdus sp.; identical to SEQ ID NO: 1534
  CDS (8035)..(8148)

SEQ ID NO: 1536 - DNA, 8148 bp, Xenorhabdus sp.; identical to SEQ ID NO: 460
  CDS (7361)..(7891)

SEQ ID NO: 1537 - DNA, 8148 bp, Xenorhabdus sp.; identical to SEQ ID NO: 460
  CDS (5942)..(7225)

SEQ ID NO: 1538 - DNA, 8148 bp, Xenorhabdus sp.; identical to SEQ ID NO: 460
  CDS (4825)..(5931)

SEQ ID NO: 1539 - DNA, 8148 bp, Xenorhabdus sp.; identical to SEQ ID NO: 460
  CDS (2791)..(4038)

SEQ ID NO: 1540 - DNA, 8148 bp, Xenorhabdus sp.; identical to SEQ ID NO: 460
  CDS (2092)..(2550)

SEQ ID NO: 1541 - DNA, 8846 bp, Xenorhabdus sp.; identical to SEQ ID NO: 386
  CDS (2376)..(3482)

SEQ ID NO: 1542 - DNA, 8846 bp, Xenorhabdus sp.; identical to SEQ ID NO: 386
  CDS (8338)..(8829)

SEQ ID NO: 1543 - DNA, 8846 bp, Xenorhabdus sp.; identical to SEQ ID NO: 386
  CDS (1532)..(2089)

SEQ ID NO: 1544 - DNA, 8846 bp, Xenorhabdus sp.
  CDS (2907)..(3569)
gtgcacggttataatgtaggcattattatattatatgttcgctgcctcaaaaacccggtagattctttgcatatttgatttatagtagtaaaatttttcagaaataacttaattgaatcgttataatcaccatttttataagccagcgaattttttatgatattacagtctataccatattctttagcgagctctaacaatcgagtttctgccatttctgagaatgaagaaaaaaccccaaatggatctggaactttgtttaccggcagccccagatagtcctttaatttttctggattaggtacgttagacggtattttcctaaatggatccaaatcatctgaaataaggtaaaaattatttttccttcctaaattagttagttcttttttaactaaaccagttcggataatttcacaaagcgttcctatatgtggaattcctgttggaccaaatccagctccaatattaatttctttttcggggataactttattatgtatttctaatgattcagtaacataccacttcataaataatcacctcctatacgaatgattatattcaattgctgcggataaaagtcacataaaccagattttaagctcgacaaatccctttccaaatcattactaatggaaagtaataataaaactaaactacattatagtaatttgaattagaccaaaaaaaataatactcttatgtttattcaagtcaacggatgcttaattcatctcgttattattttttataatataattttattttttaaaggtaatttcttaaatcttattcatataaaaaagaaaaataaattatatatatttcaaagcattgaataatagaaaaggaaaaaataaaaataaataaccctctctatataaagcaattagagtgaatgtacgaagtcaacaacaaaatgaaaatttgaaatgtaacagtcatagaactcaacaaccaccgactaaagtcggtgggttagtgattaacggactgaaagtccggatacgcatcggctaaacgatgcgtcaattatccagcctgaagtgatcattcgggttcggttcaaaatgatgcgccagataggcctttatcatctcttccgttaactgacctaccgtcgcacaaaaatagcctctgccccaaaaatgctgaccccagtaacgctttttcaagtgagcaaactcttcaaacaacttacttgctgtccttccctttattcgcctcatgatttctgagggcgctaagctcggaggacaactcaccagtatatgtacatggtctttgctcacgaccccttctactatcctgatttcgaacgcttcacaggtctgacgaactaactctctcacccgtaaaccaacttcacctattagcactttgtgcctgtattttgttacccacacaaaatgatactcaatctgaaataccgtgtggctgccatatctgtaatccatattgcacctctcgtgcaacacagtatcgcagctaaagctgaccgactaaagtcggtggttttaaccttttatatggaaaaataaattccctggagctggcgacgaaacaagataattaatgattttattcatttttggaaacgttgaaagcgtataaaatactttgataaacatcatttacgtggttcaaattaaagccagccataatttaataacaattagttaatatttcaaaagatgtaaatataaaaaccttgatctttatatccctgaaagatttatcaccgttagtagtaaaaaatttaactgattatattaatcagacataaaaaaggaatattgatatgagtaagaagtcgatcatttcacctcaaataattaatacgctagcaataagtaatgacccttggggtatcaaggataaaaattcatgctttatctatggtaacaacgcattgaataagattaagggattttcagattcatttgattttgaggggctctacgatcacgaacttccctgggatggtgcagagtttgctgaggcgtatattcatcatgaccaaaaagtcatgaaagaagaaaaatcatacgtttcactagaaacccatgtttggggagagactcaaactttatcatcttacttttgtgaaaagtcacctatttatcatgataatggtgactgtatagggatcatctatcatttatggaaagctcaggacttttcactgacccgcttatatcatgggaaactgcctgcttctattatgttccagcccccaactaatttgtttactcaacgagaatgggatgtgattttcctctctttacataaatacactagcaaacagatcggaaagatactaaatatctcctaccgtaccgttgaaaactacaccgcccaaatatataaaaaagttggtgtcagctctgctcaacaactggaagaatactgccgattgaataatttcgatctttacgtaccagaaaaattcttacagcccggaagtcgtatcttaatttgattatcaataaataataatatccaaaagtagaattgttaaattgaattataatttcaaaatacagtaaaaatatcttaaattaataccgatagttaacaccatataatgctataaatggcgttaaaaatatcggtttaaccctttttcatttccaatgattccgataagaaatccatccaatcagtgatctacctaccatttttacaatccaatgcagatttacattgatcattctttgaacgcaatatatttattgttcaacaataaaaaaaaattagccaacaatgaatgcaaattaaatcaacaataaaacaacaataaaacaacaatccatttatgcagagggaagtaaaatatgcagcatactgtcagtttttggcccctaatcgggattgcagtcatcatcattggttttattatcaggtttaatcctgttctggttgtaacaattgcagggctggtcacagggttagctgccaatatgccacttctcgatattctggaaaagctcggctctggctttcttaatacaatgaacctatcgctgactattttattacctttggtcatcattggattgctggaaaggcatggtttaaaggagcaggctcaacgtgccattgcccatattaaaagtgccacaaccgggcgtttattgattgtctatctgtttatacgtgaaatctctgccgctctggggttaaccagcctgggagggcatccacaaatggttcgtccattattggcgccaatggctgaaggggctgccgaaaatcaatatggtgatttacccaaaaatgtccgctatcggatccgcgctatgtccgccgcgacagataataccggattgttttttggcgaagatatttttgtcgcattcggcgccattatttttatgcacaattttatgttgaactccgcgggtattgagactgaacccctacatattgcactatggggaattccgactgcgatttgtgcgttcttcattcattcagttaggctatataggctggataacaaacttgccaaagaaattgcctccctaagccataaaaaacacgccagcaaggaggctatataatgtttcagttacagtatctctattatctggcaggcgctattttgcttattgtgacagtgatgtcctggcgtgataaagccaatccccgtcgtttgactacagggctattctgggggctttacggctttatttttctgctaggaaactggagctatcgtctgactgatctctggctcgataatgaagttctggcaacaagaatcgtacatatcggagtagggattttagtggttgtgatggcactgctggctggatttggcggggttcgtttaggtaattatcatcagccaacgccagagcaacggcaggaaagtgcaacccgtctcggtaatcggttatttttacccgccttacttattccgattatcactatggttggggttcttgcgtttaaccatattcccggattagaacgtgcaatttttggcgaaggcaatcatacaacgctggcaaccctcttctctatcactctcggctgtcttatcgcactgataattgctatccgtatcactcgcgagaaaattatacaacctatgcaggagactcgccgcttactggactctataggctgtgtattcattctgccacaaattctggctacgctcgggttactgtttacagcagccggagtgggaacaattatctcttacctgacagagagttatctggcggttgataatcggtttatcgcggtcatggcttatgtcttttgcatggcactcttgaccatgattatgggaaatgcttttgccgccttccctatcgtaacagccggaattgggatacctattcttgtactacaacatggtggtaatccggctgtaatggcagcaatcggcatgttttctggttactgcggtacattgatgacaccaatggcagcaaattttaatcttgttcccgcagcgctattagagctacctgatcgaaatgccgtcatcaaggcacagatccctacgggatgtactttgctgatcgccaatgtgttttcgctctattttctgatgttctgacaacaaatgacaggaaacagctatgaaaacaattttagtgactgcttttgagccttttggaggcgatgccaccaacccttcatgggaagcgattaagcgactacaaggcaaccgagttgctgatgcaaacattgaagttcatcagctcccctgtatctttgatacatcactggcgcagctttataccattattgataattatcagccggaattagtgatttccgttggattagcgggaggcaggcctgatattacagtagaacgggttgccattaatattaacgatgcaagaattgccgataatgcaggtaatcagccgattgatacacctattattgtcggtggccctgccgcgtatttttccagcttgcctatcaaggcgatggtcagggcgttaaatatgtctggtatccccgctactgtttcccaaacagccggcacgtttgtctgtaaccatgtaatgtatggcttattacattaccttacacaaaaataccctgccgcacgtggagggtttatccatgttccttatttaccagagcaagccactgaatatacaaatatgcccagcatgtctttagagataataacgtcagcattaaaaacggcaattgaagtggcctgggaaaataaatcagatattgctgttatgggtggagcgacgcattaaactgactacgcaggtatgactcaatattcatactctctgaatttaagtttacgctttattggcggcaacactaactctgccgccatacaaaatattaagatttattgggtacagacttgttaggaagcaaatatgaaaatacgaatacgagcccaacagtaatcaatataattgtaaatccttttgcgttgaatatatccattgctacacctgttattaaaggccccataagactgccaatgccccaaataatgccaaatagagaatttatggtaatcaatgtctggcctgaatatttttttcctgctctcaccaatgataaggtgtaaatcccacctccgaatgcacccataataatgatattaacccataaaaacatagagtttatactaaatggcaatgccaatagagtaagaataaaaactaccccacaaataatgtgcattttctgatggttagttttatctgccagccaacctataggcatctggaagattgcatctcctaaaaaaattaatgttatcaatgtaatggtgatcttttcggatattcccaatgataaaccatatatcgggaacatagataacgttgctgaatcaaaaaaagaaaaacaaaaaacaccaatcataaggctgggtgccgatatgagaagtggtaagaaagaaccttttatttcttcattttgttctgtttgttgtgatagtgctgatgaagggtttcttactataagagcaaggcaaagagtagaaaatatgctcagtaaaattgcagggatcagagagacaataccaaaaatagaaattaacaatggccccagaagttgacacccagtgaagacggaagtgtatagccccatgaatgtccctttgtatttaccactggtattatcactaatccaggattcccctataaccacaatgacaccacaagcaaaccccatcagaaatcgtggaatagtaaggtaatatacctgatttaaataagtagaaaaaaaagtggaaacagccagtaataataaactaaaactcaataatttatttaagttaaataaacgagtaagtattggaacaattatggaagagatcagcattcctagcgcaggtaatgctgacattatacccattattgttgaagcacgattttgctctgccagctttagactgaccattggtaatgtatatcccatcgctaatcctacgagcgatgcacccaatatgatggaaaccatatatgatttattaaagctggcattcatttttatctttttaccttttgtatggttcaactagatattggtatatatctctttgtggtaatgtacttccattaattctgttaccatcatgccaaaggcatgatgctgcgggtccctgtccaccatatgggagataaccatgctcttctaaatgtaaatcagtattaaggaggatactgtctggtaagtgtaaccttttatttaattgatgactaatataatcacttgtaccaaacaaagaaatatacatcgcattagcagaatagtttgaatgagaaaaataatctgccaactcttgatcgccctgatatctttgcaaaaagaaaacaggagcaaaaaactctttgtaatttccacctaaaacgagaggcttttcaaatactgtcggctttatcatgccatctatagggtttatttccccaccataggtacaataacttctattaagtttaaatagagaggctatttttatactatgatcaacatcactgttaggacctacaatattattgtaatcagaataagaacctacctttccttctatttcttttaaacttaatattaatttatccctgaataaatcatatatatcgctgtgtactagtatagaattaggaccagcacaatcctgaccttgattgtaaagcacaacccgtttcgtactttcgatagctaaatctatatccgcatcttttgatataacaagagggttatgccctgcaccatttaagataaacaatgtgttttttctgaaatgttttctgaccttaactgcattttctggcgtaccggtaaagataacagcatctgttattttcactctttgacttaaaaataattctttttcttcataagaaactgaaaaggattcagatatcttcgacatatcaataacattttcaaattttttgtaatggtaatgcattgccgtaggtggacgtatacaaacattttcagccataagagaaggtatgaaaccaaaacatacagatgcgtaaattggctgattcaaaggtagaaatgatgtaatgccataaattttttcctgaaaatacgcttcattttccccaatattttctagaatatcaactgaacgggaaatctcatcttcagtgacaactttacattgatattcagatagcgcctctatcaaagaactactctgtttttttaattcacgggataggatctgacacttttccttaacttgattaaagttaattttaccgaataactttggcatatgtaactcttcatttttatctatatttatcactatggatgaatttgatgggtttgttttaatatcaatattatctagtgagtcattttcttttttctgtatatatgggttactaaaacagtcaataatatctttttcatcatttaactctatccatgttttaattctggggccacaggtatcgccaaacaaccctctatacagtaaattccatatttgtgcgctatctttttctggaaagatgttttcataggaatcaaatatcaatttgaacacttcttctttattaaaatacatttcttttttcattaagtttgtaataatagaaaagtactgtctttctttatctgttgctaaaccagcataacgatttttattggtttttaaataataattataacttatagttaattcttcttctgatatcacttccccatcgattaggtataaatcaagaaatttctttgctgagagaagagttataggatttgatgcttttaatattctggcaatcttaagaaaagaaaggcgttttttgttttttttcaagacattaacttgatcatttaatctggtggattgttctatataaaatttagtggattttttagggtcttttgataaaaaaatctggatagcttctcgtgtcagaaggcttttggcatcttgcagagaaaaaccatttccttttgacttagatatttttttcccggaagaatcaagaaacaacccatatttgtaaaggcgagggctaggtcgatttaagacactaaaaatctggcgaacaactgtagctgaatctattagatcttccccatgcatttcaaagtggatgtttctatgcagtaaccgcatgctccagtcagctttccattggagtttggattttccgtttaatactgaaattgtttgttcctgatcaaatatttcaccctgataaagctcctgaagttctacaccatattcatacccaggtttattcacaatttcatctgatggtatataataacttatctcaccattgtcaggatctacatttgttatgatgatatgctcaaggactttcccggttatttcggaaatagctttagagcac

SEQ ID NO: 1545 - DNA, 8846 bp, Xenorhabdus sp.; identical to SEQ ID NO: 1544
  CDS (3626)..(4582)

SEQ ID NO: 1546 - DNA, 8846 bp, Xenorhabdus sp.; identical to SEQ ID NO: 1544
  CDS (4605)..(5252)

SEQ ID NO: 1547 - DNA, 679 bp, Xenorhabdus sp.
  CDS (60)..(677)
gtaaatatttcatacaagtgatctttcgtgtgggtcaccactgtagataaggattttaaatgcctgtaattactcttcctgacggtagtcaacgtcaatttgagcacgccgtctctgtgatggatgttgctcgcgatatcggtgctggtttggcaaaagcgtgtatcgctggtcgtgttaatggcgaattggtagatgcgtgtgaattaatcgaaacagattccacactggccattattaccagtaaaaatgaagaaggtctggaaattatccgccattcatgtgcgcatttgctgggtcatgcaatcaaacaactgtggcctgacaccaaaatggcaattggtccggtgattgataatggcttctattacgatatcgatttggatcgctctttgacgcaggaagatatcgagctgcttgaaaaacgcatgatggagcttgccaagaaagattatgatgttatcaagaaaagggtaacctggcaggaagctcgtgatgcttttgcagctcgtggtgaagagtataagatccagattctggatgagaatatcagccgtgatgatcaacctggtttgtatcatcacgaagaatacgtagatatgtaccgtggcccacatgtacctaacatgcgtttctgccattatttcgaattgcagaaaggtgcctttagagcacatgg

SEQ ID NO: 1548 - DNA, 8635 bp, Xenorhabdus sp.; identical to SEQ ID NO: 64
  CDS (36)..(1985)

SEQ ID NO: 1549 - DNA, 8635 bp, Xenorhabdus sp.; identical to SEQ ID NO: 64
  CDS (1990)..(3102)

SEQ ID NO: 1550 - DNA, 8635 bp, Xenorhabdus sp.; identical to SEQ ID NO: 64
  CDS (3115)..(4131)

SEQ ID NO: 1551 - DNA, 8635 bp, Xenorhabdus sp.; identical to SEQ ID NO: 64
  CDS (5665)..(5928)

SEQ ID NO: 1552 - DNA, 8635 bp, Xenorhabdus sp.; identical to SEQ ID NO: 64
  CDS (7688)..(8317)

SEQ ID NO: 1553 - DNA, 8635 bp, Xenorhabdus sp.; identical to SEQ ID NO: 64
  CDS (8462)..(8623)

SEQ ID NO: 1554 - DNA, 8635 bp, Xenorhabdus sp.
  CDS (1216)..(2595)
tttgcacgtcctctaaagaatgcggctggaatccgcaggaagtttgattttcatccactcaggtttacgcaagagtgcttcacgttctgtaaccactgttttcacagggattaaagccatcttatctgcgtcgcggtatttgacaccacgttccatctgaattggtttactcataatcgtgctggttccagttatattcttcagattgtaatttattgcctgattgctattttgctgattaataaaataaattcagcgtcaggtttatcggggcaataagactattcaaatttttttgaaaaatgttaaaaaattatatcatctttcatcggtgagttggaatcccaagatctggcagaatttttgtgccagaacgggctgtacatcttcaactgtgatcccggtaacgaggtcactgagctgggtcatttgcatacctgcatatccacatggattaatgcgcaaaaatggctgtaaatccattgcaatatttaatgccagcccatgaaaagagcaccctttgcggatacgcaatcccaatgaacaaattttactaccattgacatatacccccggcgcatcagcccgggcataagattcaacgccaaaatgagctaacgtttcgacaacggtattttcaatcgcagtgacgagctgacgaaccccgagcttagcgcgtttcaagtcgatcaaaatatacatgacttgctgcccgggaccatgataagtgatttgcccacccctgtcggactgaataacaggaatatcacctgcggcaattatatgttctgctttacccgcctgaccttgtgtaaacactttctcatgttggacaaaccagatttcatcggtagtttccgctgtccgctgctcggtgaactggtgcatggcttcagaaaccggctcgtagggctgaatacccaactggcgtaaaataacggtgttatgttgcaatggactgtcatcatcggttaacaaaaattgcccgccagtataacgctctaaaaggattctcaccagttcacaatgcgctaatacacgaataatgttaattagacgaatatattcaaattttatattatcatagttatatattttgatgatttcccccttgttttctgtttgagctaacagatggtcagaaaaaaccaacttttgattgtagggcatctttgcagttctctggtgctcctttacagcctctcaatgttgctgcctacttttgttgccctaatttataaagaaaaaagcgtttttgcttttttagaaacttttataatcgggttgatttttggcggcgttgggtggtatttcactcgaaaaacaaaaatacaacccagtactcaggacggattccttattatcgtcctgttctggttgctcttttcgttgttgagtgccttgcctttcgtactggataaaagcctgaatatcaatcttgttgatgccatgtttgaaggtgtatccggtattacaaccaccggagcaacagtactgaatgatgtttctaccctacctaaatccgttctttactatcgtgcccagttaaattttatcggtggcttgggcgtgattgttcttgctgtggctatcctgccgctgcttggcattggtggcgtaaaactttatcagtcagaaatgccgggcccatttaaagaggagagattaacgccacgtctggctgatagtgctaaaagtctatgggtagtttatctgttattgggtggactatgttcgttcagcttctgggctgccgggatgtcttggtttgatgccatttgtcatgggatatcaacggtttctttgggaggattttcgacccgcaatgaaagtcttggctattatgacaactccctgattgaaatggtgggcggtgttttctcaatattgtcggcagttaacttcacactttattttgtcattctgacccggagaagccttaaaccgttactgaaaaatgcagagtttaaatttttcctgttggtacttttcatcgtagtttgcatcatttggctggagttataccgttccggtatgtatgggctgaaagactcgtttgtgcatggtttctttatgaccagttcaatgatgaccgataatggtctgtcgacttccgattatgcacagtggccaccccatacgatgctgatgttattggctgtcagtttctttggtggctgtgttggttccacttgtggaggcatcaaagcattacgtttcctgatcctgacaaaacaaagtttcagtgagattaatcaacttattcatccgaatgcgatttcaaccattaaagtgggtcaggcacctgtgcaggaaagggtactgcgttcggtctggggttttttcttcttatatgttttttgtagctgtttctttatttgggcgctaaatcttcttggttatgatttggtgacttcatttgccacggttgctgcatgtatcaataacatgggagtaggttacggcgatacagtacaaggttttggcaaccttagtgcagtagcgaaatggatgatgtgtgctgctatgttattgggaaggctggaaatctatcctattttgatcctctgttcgaaagcgttctggcgtttttgagtggaggttaacagatattggataaagtcaggttagatagagcagatagagaaaagcgctggttttttgccagcgctttgtcgaaataatcacagattaacaaagtgatgtattacagcacgacacgcaccagttccagtgcgcccaactcttcatacagtgtttcaacctgctcaatgtgagttgcattgatggtaatagaaacagagtggtagttgcctttgctgcttggtttcacatctggggagtaatcgcccggtgcgtggcgctgaaccacttcaacaacatggtccaccagctcaggctgagctaagcccatcactttgtaagtgaatgagcaggggaactcaagcagttcatttaatttcgttttcatgggcactcctgatttattcgccacggtaaaatcaggcattctaccgtggcatgactattttctgacaagttatatgaatatgtggtttaactttaatttttcaagatatcagccaagccagtgatgaaacatcaaacggatataatcaatcagacggctaaagaaaccaccttctttcacttcctgcatcacgaccagtggacgttgctcaattgttttaccatcaagctggaaattaatggtgccaacaacctgattctggggaagtggggcatgtaactcattgctgttcagaacatagctggctttcaggtctttcagacgaccacgaggaatagtcaggtaaacatctttttcgacgccaagttgtactttatcgttatcaccaaaccagacaggttcagaggcaaattctttacctgcctgcaaaggggaaacagtttcaaagaaacggaagccccaggtcagcagttttttactgtctgtttcacggcctttgaaggtcgggctgcccatcactgtagcaatcagacgcatattaccttccgtggcggaagagacaaggttatagccagcaccgctggtatgccctgttttaataccatcaacattcaggcttttatcccacagtaagccgttacggttaggttggcgaatgttgttgtaagtgaattctttttctttatagatggagtattcatctggtacatcgcggaccagcgcctgaccaatcagagccatatcatgagcagagctgtattgacccgctgcatccagaccatgaactgtctgaaaatgagtgttttttaatcctaagctctgaacatatttgttcatcaggccgacaaacgcgtcctgactacctgctacataatccgccattgcaacacaggcatcattacctgattgcaggttaataccgcgggagagcatggcaacagaaacctgatcgccgggttttaaaaacatcagggaggagcctttgaatacagggtttcctgttgcccatgcatctttacccacggtaacgatatcattcgggctgattttcccggatttaatagcctgaccaataacataactggtcatcatttttgtcaggctggcaggatcgcgacggacatctgaattcttttcagccaatatttttcctgaattgtaatcaatcagaatataggcttcggcatcgagttgtggaacaccggggatcatggttttgaagctatcatcggtgttggcgaatgcagaagcactggctgccagagcaatgctcagcgtggcatttttaataaaacgggaagtaactatgtatttcatgattgattagataacatccgtgaagaagcattgataaaagataagtcacatcataacaaatgacgaaaagagtgacattaaacaaaattgggacagaagtatatttgcacttttttactcgattgcgctgtattcgatgactgcctgtattttacttggtttctccccactgataatggcctgaataaaggcaaatatcagcgggggatttgctaatcacggagtagtaataaaggaagattgttgcatttgatccgttaatttcttttgtaactctacggcctgctggcgggcattgaaaggccctagctgcacgcggtaaacatgaccaaattgaatcactcgaccgggagtattaaagcgtttacttaacgactgctgccactctctgcctttagcttcagtgctgaccgcgccaacttgtaccataaagcctgatacgttagcggattctggggtaacagaagatgtgacaactgactttgtttgtgccggaggctcctgcacggtttcctgcacagaagcaggcttatcaggttgtgaaacgctttgactatcaatgctgacagtatttgaggatggattctgttctgggggagtttgctcagataaaccggagtccatgcctgtgacagaagctgatgagttcagcgcaggtctgtcaggtagggcgtagctttgtttgacaatagttgaaccttctgtacccaaacccgcaagtgagccatcaggagtaacctgaacgccatccagcttaactttactttgtggcattaaattcagacgatcagcaacagcccgtgataattcgataatttttcccggcttattataagggccacgatcattaaccctgacaattatcatacgtccattacttaaattagtgacccgtacatagcccggtattggcagtgtcggatgggcggctgtcagtgcatagggagtatcccgttctccaattgcggtcaattttccggtagattcttcaccaaatacactggcataccctgtctgagtaaattgggccggatccttgacgatgtgataattcacaccgtcttttgtgtaatcctgattggcactggggtgataaggctcatagacaggctctgcacctaaaacatcacgggtcggaatgggcagaacggaggtggcgcctttttcattttttgttgtacagcctgaaatcagtacagccactatgccgagaataagccattgttgacgcatgaaatctcttcctcatagacttttggataataacttgcgatgggtatgtatcgacatgataatgccgaatccagccattaagacgattaatgccgagcctccatagctgactagtggcaggggcacgccgaccacaggcaagataccgctaaccatgccgatgttaacgaaaacataaacaaacagtatcaatattagccccccaaccatgactcggccgaaagtattttgtgctttggctgcaataatcagcccacggataatgatcagtaaataaagggcaagcaatacgatgacaccaactaaccccagttcttctgccagaaccgcaaaaataaaatcggtatgacgctcaggtaaaaactctaattgtgattgtgtgccctgtaaccagccttttccaaataacccgcccgagccaatggcaatctttgattgaatgatatggtagccttttcccagagggtcgctttccggatctaacagcatcatgactctggcccgttgatagtcatgcatcagaaagaaccacaatatcggtaaaaaacaggctgccaatacaacggcaatcgcgattaagcgccagttcatgccagccagaaacaagataaacagcccggatgcggcgatcaggatagatgtacctaagtcaggttgtgctgcgacaagcagggttggcaagaaaatcaggattaatgcaattcccgtatttttcagggaaggggggcaaaggtcccggttcataaagcgggccaccattagagggaccgcaattttggcaatttctgaaggctggaaacgtacaatgcccagatccagccagcgttgtgcccctttacttatttgcccgaaaacatcaacaaggataagcaggatcacacagacaatgtaaaggtaaggtgcccaactttcatatattcggggtggtacctgagcaagggctaccataaccaccagcccgataagcacctgtccgactttacgttccatcatgccagcatcctgtccgctggcgctccacataatgaaaaggctgtaggcaagcagtagcagaatgcacaatagcagcggggtatctatatgtatcctgttccagaaaggaacttttttctgcgattctgtcatagcattactcattaattcgtgtcccgctggctggcttccctgcgggtagtgacctgtttttatcagcaggctcagtaggtgaaggatctttatcactcttgattagcatatgatccaaaatctggcgcacgatggcaccaataggtttccgctcagcaccgccattttctaaaataattgatatggcaacagttggattatcataaggagcaaaagcaatcattagccagtggtcccgcagatgttctgcaagtttacttgcattataggtttcatacctgaacacctgagctgtaccagttttgcctgcggctttgtagggagtaccagcgaaaaacctgcgtgccgtaccgttcggagcgttggcaacgccatacattccctctttggcgatttcccaatagccggaatgaatatcgccgataggttcaatgactggaggctggtaaggatggacgctattgttcagatgagtcctcagcaggaagtgtggtgttttcacctcgccgtcattaatcaatatcatcagtgcttttaccatctgcataggcgtagcggtccagtaaccctgaccgataccgacagatattgtatcaccttgataccaaggttttttatagcgtttttgtttccactcacgggttggcatattacccgcagtctcttctttcagatcaataccggtaaactgaccgtatccaaattttgtcatccactcggagatcttatcgatccccatattataggcgagctgatagaaaaaggtatcagccgattcaacaatagccttatgcacattcagcagaccatgcccataacgtttccagtcgcggtaactcatattggagttaggtaattgccatcttcctgtgtcgtggatagttgtattctttgtaatgacaccgctgcttagcgctgcaacagaaataaatggttttactgtcgaagccggaggatatgcgccttgtgttgcacggttaatcaatgggcggtcagggttattgagcagcgctttataatccttactggaaataccatcaacaaacagattggggtcatagcttggagtcgataccatcgccagcacttcaccagtccggggatcggtaacaacaacggcggcccggctggttgtcaggattttttcaatgtaagtttgcagctctaagtctattgacagataaatatctttacccgcttgcggaggttgttcgtgtagctggcggataactttaccacggttattaacttcaacttcttcatagccgggtttgccatgcagaatggattcgtaataacgttcaatacccagttttccgatatcatgagtcgccgcataatccggtaatatcccttcctgatcgagccgttctacatctttatcattaattttagatacatagccgataacgtgggtgagggcagagccataaggataatagcggcgttgatatcctcggatttccagaccggggaaacggtactgattaacagagaaccgggcaacctgtacctgagtcagtggtgtcttcaggggaattgaggtaaaacgacgggcacgtcgccgttctttttggaaattttcgatatcttcatcagttagcccgacgatagaacgcagctcattgagtgtcttatcaaggtcatcaactttttgtggcacaatctccaattggtaaattgtacggttagctgccagaagtatgccgttacggtcataaatgagcccacggcttggcgcaatgggaacaagtttaatacggttcccatttgagcgtgtctggtaatcttcgtgccgggtgatctggagattatagaggttggcaatcagaacccctgttaaaaggataacgccaacaaacgccacgagtgcgcggcgtataaagagggctgattcagccgtataatcgcgaaaaggagttcgtttattcttcatcccattaccagaattcacggtgatagattacctgatttattcccgatataagg

SEQ ID NO: 1555 - DNA, 5174 bp, Xenorhabdus sp.
  CDS (10)..(447)
attacctagaaaaatagcggtcatggacgaagagaatgtctccatgtcatgcaaattcaagcggcattgcatgaagagtttcagcaacagtggccttcaatacagagtgtgattgaagtggtcagtgaacgcagcacgaaaggtcagcctgcccacctcgactcacgctggtatgtcagctctctcccgttagatgcagaaaccgcagctaaggcaataagaagacattgggcggtggaaaatgagctgcattgggtattagatgtggcctttcgggaagataacatctcactcaaagaccctgatggggctgcgcaaatggcgctttttaaccgaattgcgttaaatgtgattaaacagaataccagtataaaggatagtcaagcggctaaacgccgaagagccacatggtctggggaattccgcagtcagcttatctttgattaaattaaagacaaagtggaatcccgccctgatggatagactcaatgaacagtagtggagtatttatttttattaaatcacaaacaataaaaatgtttattgtggataattaaaaataaagttaagactttatttctttagtgtgaagacatatcccataaagcccggaatcatcagggtgagaaacattgagaaagaataactgtcactgtttttaataaatcaaaagagggattttatttttgtttatgttctaatttcaacctcatataatattttgatctagcttatacttttcaatttgaaaattgtttgatgaatttttcatgtgctatcttcatctgcgtggattaacaattaaatatgacgagcgaatagttaatgaatataaatatacaagacaataatattagtatactcgctggcaattcacgtgtttatcttgatcaagagggtaaaatagttgtcgaagcacaactaaaagcctttgaagcagcgcttgtattagcaaaaaaaatccaagagaaatgtggtcaattaccaaaaatatctatagctttcgatcaccgtggaatatttcgtttacaattcttggcagataatctatctaactctcaaaaaagaaatcctcgtttgagccaactccacacctcaattgtaaacatttttttacccatagctgaaaagcatcaaatatcacttagtgaaatacgagttattcacgaagattctgccaggcagcacttagttcacattcttgcctctgaggaaatccccgaaatactcaagcaacgtatggttgccaaaagcacatcagattctaaaccatcaatgtctgatgtttcttatgaagagccaactcaaaaactcacctgcgcagctattacaaaagaatattttgaaaaagcggcaggtaataatacagatacccttttggaagtattctttgaagattgtgtgtggtccagagcactcgcatatgctcgcggactccaacttagccatatgttaggtgtttccagcgctattcgtcttaacctcgttagcgaaactggtgatgcgagccagggtgatataacaattgcctaattattttaaataatataattccatcttcacattataaaatggaacattatgcaaactctatccaagttaatatatctagataataatgctacaactgcattagatcctgaagtgcttcaatctatgatgccttatcttactaatgagtatggtaatgcatctagtatcagccatgcttttggctggaaagccagaaagtccgttgagcatgccaggaaattaatttcatcatcaatcaatgcggtaagtccatcggatattatatttacatctggctcaaccgagtcgattaatcttgccatcacaactcttcagcataaaagtaaaaaagggcatgtcatcacatcaatgattgagcacaaggctgttcttgattgttgcgctaaacttgaatcaatgggaatagacgtcacctatgtgcaaccacaaagtgacggtgttgtatctcctgcttcaatacatagtgcattgagagatgatacttatctggtttctattatatcggcaaataatgaaattggttcattgcaaaaaattgaagaaataggcgctatttgtaaagagcgggatataatttttcatactgatgctacacaggcgcttggtaaaatagagtttgatgtacaacgtctgaatattagtctggcctcattttctgcacataaaatatatggtcccaaaggtattggagcactttatatcaactcgcgtgataaaaatattgttttatctcccctcattgttggtggcggacatgaacggggtctgcgctctgggactcttaatgtcccagggatagtagggtttggtcgtgcagttgagttgtctgttaaaaacttaccagacgaatcacagagattaggtcacctgagaaatatactgcgacaatatcttattgaaaatgtggatggtattcggataaatggtcatctaaccgcatgtctgccggggttacttaatgtaacgtttgaaggaatagatgcagactcgctgttgcttgagctttctgatattgcactgtcctcagggtctgcatgcacgtctgcaaacagggcttcatcacatgtgctgaaggctataggtgtcagtaatgagcaagctcaagccagtgtacgtttcgggttgggaagatttaacaatgaagaagaaatagactatgtttgctataagttgaaagaagcaataaataaactgaggtctatggttccaagagcattcagttcttagtgatataggatttgatttatgcgaacgacatcagcactttttctcctcttcggcacgacttttactgcgggtggatatggagcgactttcttaatttctgaattttttcggtcacaaggagggagtgatattgacgcaggaatgacactgagtgtggctttaatcggcactttgattggtgttcctttagtcggatggtttgccgggaggctggaagcatcgcgtttcgcagccttagcagctttatcagtgtcatgtggttatttttttctcagcagttccgcgggtgatctgagttacatgccacgtataggcgcgtttttgattggtcttggttggggtatgttctatatcagcggaccgatggcgttgtctgaacgtatttctgatgcagatagaggatactggtttacacgtttcagtgctttccagatggcaggaatttgtggtagccccattttactctatatcgttgttgaacaggtaaaaatacctatcctgatagcttttcttctggttggtattgttgctatttttgcatcgctatttttcatggtatttgggtttagagaacctcaggctcaacgggaattatcattaagaccctggataaagaatatatcgaagattgcgactactagtgcaatccgtccgattattatggtaggactgggaggctgcgtgttttctggcatgatgtcgttccagagttcaatagtggaaggaacagattcaagagccagcacattttttgctgttcatgtagtgactgtggttatatcacggcttctgctggctcgctatttatcaactgtacctcgtattccacttgttatcacacttatgtcatttttagttctgggtattttatttttgttcggtgtacctgttcattcagcctttcagattatagccgctattttaacgggtctggggtatggattggtatatcctgttatccaaacgtgggcgataaatgaatctgctcttgagaatcgccacgcagctcttacttggttcgttgtctcttactttgtagggatattcggttttccaataataggtggttggatattagttgaagcaggtaaatccttatttatcactacgctcgctgcaatagccattcttgagcttgttatagcgttaccaaggcaacaatcgggtggggttgtcctagagaaataaaaggttctgttggattcaatcataaccacccatatagcgagtggttatggttatctcttgctttatattgcctgattacctgatattgtttttctactcagataaagccctaataacacgccaatcgcagacagcatcagcatatagtatgcgggagctaattgcgtatattgcattaacagagtgatgataatcggtgttagcccgccaaaaatggcataggccagattgtatgaaaaagaaataccgctgaagcggacttccggtggataactatggaccataataaaaggtacagcaccgataactcccacagagaaccctacgattgcataagcactgtatagtctgatggggtcatggctgatattgtgatagaagaaccaagcggctgcgcccagtaataagctgcctgccaataaaactttgctggcaccccatttatcgcagaaatgcccgactaatacgcagctaataaaaagtgacacaattgccagactgttggctttcagcgtcatggattgttcaagatggaaaactgtctgcatataggtaggagtcatcagaatgacgacgacaatacccgcagaaagaagccaggtcagcaacatggaaacagtaatagctcgtttatgattctgaatgacggatttcaggggtaaaccatctgataatgccttacgtgcctgcatttctttaaatattggcgtttcatgtagccagcgacgcaggtacatggcacataggccaaagagaccaccaaggaaaaaaggcagacgccatgcccagtccaaaacttcctgtttgctgtaaaccgaagtaattgctgttgcgaccagagagccaagcaaaatgccgagagtcaatcccgccgttaatattccgcaggcaaaaccgatatgtttacggggaacatgctctgcaacgaatacccatgcaccgggaacttcaccaccgattgccgctccttgcataattcgcataactaacagaagtaatggggcgatgatgccaattgtagtgtaggtcggtaacatgccgataattaatgtaggtaaagccattagcaggatactgagagaaaacatttttttgcgcccggccagatcaccaaaatgcgccatgatgatcccgcctaaaggccgtgccagataaccggccgcaaaaattccaaaagtctggagttgtcggagccatcaggaatgtctgcaggaaatttagagcac

SEQ ID NO: 1556 - DNA, 5174 bp, Xenorhabdus sp.; identical to SEQ ID NO: 1555
  CDS (1276)..(1533)

SEQ ID NO: 1557 - DNA, 5174 bp, Xenorhabdus sp.; identical to SEQ ID NO: 1555
  CDS (1573)..(2760)

SEQ ID NO: 1558 - DNA, 5174 bp, Xenorhabdus sp.
  CDS (37)..(1164)
gtgctctaaatttcctgcagacattcctgatggctccgacaactccagacttttggaatttttgcggccggttatctggcacggcctttaggcgggatcatcatggcgcattttggtgatctggccgggcgcaaaaaaatgttttctctcagtatcctgctaatggctttacctacattaattatcggcatgttaccgacctacactacaattggcatcatcgccccattacttctgttagttatgcgaattatgcaaggagcggcaatcggtggtgaagttcccggtgcatgggtattcgttgcagagcatgttccccgtaaacatatcggttttgcctgcggaatattaacggcgggattgactctcggcattttgcttggctctctggtcgcaacagcaattacttcggtttacagcaaacaggaagttttggactgggcatggcgtctgccttttttccttggtggtctctttggcctatgtgccatgtacctgcgtcgctggctacatgaaacgccaatatttaaagaaatgcaggcacgtaaggcattatcagatggtttacccctgaaatccgtcattcagaatcataaacgagctattactgtttccatgttgctgacctggcttctttctgcgggtattgtcgtcgtcattctgatgactcctacctatatgcagacagttttccatcttgaacaatccatgacgctgaaagccaacagtctggcaattgtgtcactttttattagctgcgtattagtcgggcatttctgcgataaatggggtgccagcaaagttttattggcaggcagcttattactgggcgcagccgcttggttcttctatcacaatatcagccatgaccccatcagactatacagtgcttatgcaatcgtagggttctctgtgggagttatcggtgctgtaccttttattatggtccatagttatccaccggaagtccgcttcagcggtatttctttttcatacaatctggcctatgccatttttggcgggctaacaccgattatcatcactctgttaatgcaatatacgcaattagctcccgcatactatatgctgatgctgtctgcgattggcgtgttattagggctttatctgagtagaaaaacaatatcaggtaatcaggcaatataaagcaagagataaccataaccactcgctatatgggtggttatgattgaatccaacagaaccttttatttctctaggacaaccccacccgattgttgccttggtaacgctataacaagctcaagaatggctattgcagcgagcgtagtgataaataaggatttacctgcttcaactaatatccaaccacctattattggaaaaccgaatatccctacaaagtaagagacaacgaaccaagtaagagctgcgtggcgattctcaagagcagattcatttatcgcccacgtttggataacaggatataccaatccataccccagacccgttaaaatagcggctataatctgaaaggctgaatgaacaggtacaccgaacaaaaataaaatacccagaactaaaaatgacataagtgtgataacaagtggaatacgaggtacagttgataaatagcgagccagcagaagccgtgatataaccacagtcactacatgaacagcaaaaaatgtgctggctcttgaatctgttccttccactattgaactctggaacgacatcatgccagaaaacacgcagcctcccagtcctaccataataatcggacggattgcactagtagtcgcaatcttcgatatattctttatccagggtcttaatgataattcccgttgagcctgaggttctctaaacccaaataccatgaaaaatagcgatgcaaaaatagcaacaataccaaccagaagaaaagctatcaggataggtatttttacctgttcaacaacgatatagagtaaaatggggctaccacaaattcctgccatctggaaagcactgaaacgtgtaaaccagtatcctctatctgcatcagaaatacgttcagacaacgccatcggtccgctgatatagaacataccccaaccaagaccaatcaaaaacgcgcctatacgtggcatgtaactcagatcacccgcggaactgctgagaaaaaaataaccacatgacactgataaagctgctaaggctgcgaaacgcgatgcttccagcctcccggcaaaccatccgactaaaggaacaccaatcaaagtgccgattaaagccacactcagtgtcattcctgcgtcaatatcactccctccttgtgaccgaaaaaattcagaaattaagaaagtcgctccatatccacccgcagtaaaagtcgtgccgaagaggagaaaaagtgctgatgtcgttcgcataaatcaaatcctatatcactaagaactgaatgctcttggaaccatagacctcagtttatttattgcttctttcaacttatagcaaacatagtctatttcttcttcattgttaaatcttcccaacccgaaacgtacactggcttgagcttgctcattactgacacctatagccttcagcacatgtgatgaagccctgtttgcagacgtgcatgcagaccctgaggacagtgcaatatcagaaagctcaagcaacagcgagtctgcatctattccttcaaacgttacattaagtaaccccggcagacatgcggttagatgaccatttatccgaataccatccacattttcaataagatattgtcgcagtatatttctcaggtgacctaatctctgtgattcgtctggtaagtttttaacagacaactcaactgcacgaccaaaccctactatccctgggacattaagagtcccagagcgcagaccccgttcatgtccgccaccaacaatgaggggagataaaacaatatttttatcacgcgagttgatataaagtgctccaatacctttgggaccatatattttatgtgcagaaaatgaggccagactaatattcagacgttgtacatcaaactctattttaccaagcgcctgtgtagcatcagtatgaaaaattatatcccgctctttacaaatagcgcctatttcttcaattttttgcaatgaaccaatttcattatttgccgatataatagaaaccagataagtatcatctctcaatgcactatgtattgaagcaggagatacaacaccgtcactttgtggttgcacataggtgacgtctattcccattgattcaagtttagcgcaacaatcaagaacagccttgtgctcaatcattgatgtgatgacatgcccttttttacttttatgctgaagagttgtgatggcaagattaatcgactcggttgagccagatgtaaatataatatccgatggacttaccgcattgattgatgatgaaattaatttcctggcatgctcaacggactttctggctttccagccaaaagcatggctgatactagatgcattaccatactcattagtaagataaggcatcatagattgaagcacttcaggatctaatgcagttgtagcattattatctagatatattaacttggatagagtttgcataatgttccattttataatgtgaagatggaattatattatttaaaataattaggcaattgttatatcaccctggctcgcatcaccagtttcgctaacgaggttaagacgaatagcgctggaaacacctaacatatggctaagttggagtccgcgagcatatgcgagtgctctggaccacacacaatcttcaaagaatacttccaaaagggtatctgtattattacctgccgctttttcaaaatattcttttgtaatagctgcgcaggtgagtttttgagttggctcttcataagaaacatcagacattgatggtttagaatctgatgtgcttttggcaaccatacgttgcttgagtatttcggggatttcctcagaggcaagaatgtgaactaagtgctgcctggcagaatcttcgtgaataactcgtatttcactaagtgatatttgatgcttttcagctatgggtaaaaaaatgtttacaattgaggtgtggagttggctcaaacgaggatttcttttttgagagttagatagattatctgccaagaattgtaaacgaaatattccacggtgatcgaaagctatagatatttttggtaattgaccacatttctcttggattttttttgctaatacaagcgctgcttcaaaggcttttagttgtgcttcgacaactattttaccctcttgatcaagataaacacgtgaattgccagcgagtatactaatattattgtcttgtatatttatattcattaactattcgctcgtcatatttaattgttaatccacgcagatgaagatagcacatgaaaaattcatcaaacaattttcaaattgaaaagtataagctagatcaaaatattatatgaggttgaaattagaacataaacaaaaataaaatccctcttttgatttattaaaaacagtgacagttattctttctcaatgtttctcaccctgatgattccgggctttatgggatatgtcttcacactaaagaaataaagtcttaactttatttttaattatccacaataaacatttttattgtttgtgatttaataaaaataaatactccactactgttcattgagtctatccatcagggcgggattccactttgtctttaatttaatcaaagataagctgactgcggaattccccagaccatgtggctcttcggcgtttagccgcttgactatcctttatactggtattctgtttaatcacatttaacgcaattcggttaaaaagcgccatttgcgcagccccatcagggtctttgagtgagatgttatcttcccgaaaggccacatctaatacccaatgcagctcattttccaccgcccaatgtcttcttattgccttagctgcggtttctgcatctaacgggagagagctgacataccagcgtgagtcgaggtgggcaggctgacctttcgtgctgcgttcactgaccacttcaatcacactctgtattgaaggccactgttgctgaaactcttcatgcaatgccgcttgaatttgcatgacatggagacattctcttcgtccatgaccgctatttttctaggtaat

SEQ ID NO: 1559 - DNA, 11162 bp, Xenorhabdus sp.; identical to SEQ ID NO: 65
  CDS (2852)..(3019)

SEQ ID NO: 1560 - DNA, 11162 bp, Xenorhabdus sp.; identical to SEQ ID NO: 65
  CDS (3603)..(3923)

SEQ ID NO: 1561 - DNA, 11162 bp, Xenorhabdus sp.; identical to SEQ ID NO: 65
  CDS (4965)..(8870)

SEQ ID NO: 1562 - DNA, 11162 bp, Xenorhabdus sp.; identical to SEQ ID NO: 65
  CDS (10492)..(10668)

SEQ ID NO: 1563 - DNA, 11162 bp, Xenorhabdus sp.
  CDS (8146)..(9330)
tgctctaaagctaactcgggatcatcttcatcaaggttttctatataaccacttttcctaaagcccgccttgtttaataatgatcgcatcggtttattagattggttcgtagacgtgaataattttggacaagaacaaattgattttaggtagttgataagttgtaatccagcgccctcccttctgtttctttctccaaccaccagcatctcaataaaagcataatcaaaaaaattataatgcagtacgccatacgcaatcacttcactatctaactctaccaaatagcaaaattgactcttgacccaatttttaatttgatctaaccggcgattatcatacagaacaactggatcgattccggtaagaatatcgatatcaggaatatcagcacgccggatgtagagtattttgttttttcggtcatcgtccagattcatcataatgtcccacctttagagccttcacctttcaaacgatataatagtaattatttaataaccgactctcttacatcttcctaatacagcattcaccgggctaaaaggatcattactactcaaagtagctaccactcccgattgtttagtgcctaccagataggaaaaatttatattgtccttaacggaatcataaataacctctttattgtttcttgaaccaagccccaccttagtaccaaaataaccccatgctccctcaggtcttactctcgatggcatattaggataaaggctaacacctatgtattttccgtttccttccaccctcaccttcatcatgactttaggaaaatacccgggaggaaattttttgtggtttttgggctccctgaatatgtatgccgggtacaagtaacaggaataattaccatcacggatatcgagcttaccatcagcaatggtataaactccggtatctgccagcaagtaacccggaaacagcagtaatgcaacggcaattgtctttaacatctgtcaccacctatcatgactcaaatgattcaagtatagccttgaggttaaataacatataactcgatactagggctttatgctctcaactaatcacaaatttctatcatagactgcactcaaacagtattacgagaaaatgtaggattttattttttagataactggaaagtaaaggtaatcaagtgatcgaacattatgcggattggaaacgatctgccgataatcccctgaatagaggacagattattctttgagcccgttatctcatcaaagaatgggtaaataaatattgactttagttttatgtgttaactgttcgttaaaatcgttcacttattattaggtagagataaggttattagccttatcaattttctgataataacgttatggatagtgaaatgaaaaaatatcttcttctttgcttgttggcaggttctgctattctggcttcaatgcaaacttatgcaaaaacatctggcgatagttgcacaatagatgtcaatacaggtgagataagttgttttatctcataaaatcataaccacccgtataacgggtggtttgctcttgccctataagggcttgttaccgactgcgcctaaatgacgctgctttctcttcgttcaagctaagtgtctttgctgctttggcctaccccttgaaggggtctacatgctctttactactcaatttatccgagattaaatccgacttttcttgctctctgatatacttttgaattgtcgcttcatttagccctaccgtactgacatagaacccttccgcccaaaactttctgttgccaaatttatattttaaattggcgtgtctatcaaagatcatcaacgaacttttacccttcaaatatcccataaagcttgaaacgcttagctttggtggaatactcaccaacatatgaacatgatctggcatgagatgaccttcgattatttccacacctttatacttacaaaggtctctgaggatctctcccacacttgaacgaatattattaaaaatcactttccgtctatatttcggcgaaaagacgatatggtatttacacagccactttgtatgcgctgagctttgtgctttaatgcccataaacacctttccttatttgagttacgaatattagcttgtacatctatatcgtaacggaaaggtgtttttcttggtataacctttgaactccacccgcaaagcgggtggttttatgtttaagacgctaacgcgacttaaactggctaaagccataatataggggcctatagtgtattaataattatacactataggccccgaattattacgctgcgatattctccatagcctgcaaaatgcgtttatcagatattggatatgcggtacccagctgttgggcaaacaggctgatacgcagttcttcaatcatccagcggatttcttttacttccggtaactgtttttgctgaacagaaagtttcgctaaccattgttgccattgttgctgaatatattcaatccgactcatatgcgtcctatccctgtttatatcaatagccagtttttccaaccggcgttcaataccattcaggtaacgcaatacatctgccagacgtttccaaccgtgggcggtgacgaaacctctaaagaccagaccggagatttgcgctttgatatcagatagtgccaatgccagagaaatatctacccgccctttcagacgcttattaatggcgaataccgttgtcaggatctgctcgacctgtttggcaatgtcgaccactgcatcattcaaatcagcccggactttatcctgcaaatctgaaaatgcctgttcattccatgccgggccgccattttctgcaattaatttgtccacaccgcaggaaatacaatcatcaatcaaatccagaacttttccatatggattgaaatatagtcccaacttggatttattcggcagtttttcatgcaggtatttaatcggtgatggaatattcagcaacagtaaccgacgcgttccttcccacattgcattaagctgttcggattcagtttcgaacaatttaataccgatactgtctttttcatccaccagcgccgggaatgctttaaccgaatagccacctcgtttctgctcatagcgttcaggtaattcgccaaaactccagatatgcagcccgctttgttcaataccatcatccgctacggctgaaagtgtttcctgtactttatctttcagtttcagcttcagtgccgaaagatctttcccttccgccagcgttttgtttttctctccaataatacggaaagtcattttcaaatgatccggaacctgctctaattgccagtcatcacgtgacaatgtcactcctgtcatgcgacgaaattctttttcaagactttccagcaatgttgcctgtggctgagttacccgctccagaaatgcctctgcgtagttaggtgccggtacgaaattacggcgaagcggcttcggtaacgatttaattaatgccacgaccaattcatgacgaattcccggaatttgccagtcaaacccctcatctctgacctgatttaatactggcaatggaatatgcaccgtgactccatcagcatctgtccccggttcaaactggtaagttaaacgaaattttaaattatcctgataccagtaattggggtaatccagcgcactgactttattagcatcccctttaatcaacatgctcttttcaaaattgagcaattccggttgatctttgcttactgttttccaccagcggtcaaaatggcgggatgaaactacgtccttgccaatccgctgatcatagaagctgaataatgtctcatcatccaccaaaatatcccgacggcgggatttgtgttccagctcttcgacttcttcacgtaatttgagattagcccggaagaatgaatggcgggtttgccagtccccttccaccagcgcatggcggataaataattcgcggcacagcatcgggtcaatctgactgtaattgaccagacgccccatcactatcggcaatccatataaggtgactttctctgatgccattaccgcaccctgagatttttgccagtgtggttcactgtaatgacgcttgatcagatgcgatgccagaggctctatccattctggttcaatgcgggcagcaatgcgtccccagaggcggctggtttccaccagctccgccaccattccccatttaggcggttttttaaataatcccgaccctggaaagatggaaaaacgggcgttacgggcaccggtatactcctgcttctcgacatctttctgaccgatatgggataaaagcccggtcagtaacgcaatatggatactgcggtaatccgcttcctggctgttaaccggaataccaatttctttgactacctgccgcaattgcgtgtatacatcctgccattctctgacacgcagataattcagataatcctgacgacaaagtttgcggaactgagaactggatagttctttttgctgttctgtcagaaaatcccacaatttcaggaaagcgataaaatccgaatctttatcagcaaaacggcgatgtttttcatccgaagcctgctgtttttccagcggcctttcccgaggatcctgaatggataatgctgcagtaatcaccatgacttcacgcacacaaccatgtgttcgggcttccagcaccatacgggccaaacggggatcgatcggtaactgcgccaactgccgccccatttgcgtcagctggtaagtgccatcggttgaagactctgtatcgatagcacccagctcttccaatagtcggacaccatcctgaatgttacgtttatccggcgcttcaacaaatgggaacgcactgacatcccccaatccaatcgaagtcatctgcaaaataacggatgccagattggtacgcagaatttcagggtcagtaaattccggacgggataaataatcatcttcagaatagagtcgaatacatatcccgtcagaaacacggccacaacgaccttttcgttgattggctgatgcctgagaaataggctctatcggcaaacgctgaactttggttcgataactatatcggctgatacgcgcatagccagtatcgataacatatttaatgcccggtacagtcaatgaagtttcagcgacgttagtggctagaataattcgccgcccgacgtgcgactggaagatccggttttgctcgttattggagagacgcgcaaacagaggcaaaatttcggtgtgcttaaaattctgtttactaagggcatcagcggtatcacggatttcacgctctccgctcataaataccagaatatcaccggcactttcgcggcctagttcttctactgcatcaatgatagcttctaactgatccctatcgttgtcattatcgtctcctgctattggccgataacgaacttccaccggataagtacggcctgagacttcaataataggcgcattactgaaatgacgggaaaaccgttcaggatcaatggttgccgaggtaataatcactttcagatcgggacgcttcggcaataactgacgcagatatcccataataaaatcgatgttcaggctacgttcatgggcttcatcgataatcagtgtatcgtattgtaataacaatctatcctgctgcaattccgccagcaaaataccgtcagtcattaatttgaccagtgtattctcactcacctgatcattaaaacgaaccttataaccgacggctgaacccagtgatgtttccagttcatcggcaatacggctggctactgaacgagccgctaaacggcggggttgggtatgcccgataagccctttaacacccctgccaagttcaagacatattttagggatctgggttgttttaccagatcctgtttcaccagcaataataacaacctggttatccctgatcgctttatagatatcatctttcttctggctaacgggtaggttttcagggtatttaatcgtagggcatgccgtttgacgattaataactttttgttttgcggtagtaatatccgcagcaatagattgtgctacagcctgcaaggaagcctgattttttatttttgcagctccctgcaaacgttttcttaaacggaactggtcacgtaacggcgtgtactcaagttcagcgtataattcagcaatcgtcgctgttaaaggtaattccactgtgataaatccttgtgacgttcttaattgagtagtgctgtttttctgaaacgcactttattgtcaaaatttcttttactatcaaggtattctagtaaattgagttataggatagggttttagtactgggctatcagaagtgtaacatatcttgagtatttcaatgtactgcatataaacgcatttatttccctcatctttcaggttaaaaccgatgactcaaactgatgttcaataattttgaatacaaacctcgaaatattgcgctatttactgaatgactatcccattaaaatgcctgacctatagaaaccgttgacaatgtattagttacagtaacaaattaaggaattaaaaatgagtaacttactggttctgaaatccagcattatggcgcaaaactcacaaagcaataaaatggcggataattttattgagcaatggtccaccagccatgcagatagtcacatcaccatccgtaatttagctgaaggaccagttccggtgctggatggggaactattaggtgctatgcgtccaagcggtgcggaactgacagagcgtcaaaaaacggcgatggcactatctgatgaattgatcgccgaattaaaggctcatgatgttattgtaatcacagcaccaatgtacaacttctctattcctacccaattaaaaaactactttgatttgattgctcgtgctggtattactttctgctatactgaatcaggcccagaaggcttgttgaaaggaaaacgtgttattgtgctaaccacccgtggtggaatttatcagcaaacaccaaaagatttgatcactccgcacttacagattttcttggagtttattggtattactgatgttaaattcgtctttgcagaagggattgcgttaggcaaagaactggcacatcaggcacaccaaaactctcacaatgcaataattgaaattatagaaaaaataaagcaggaacaatctgaagaaattgcagcctgattctgttgttactaacggtgcgtgccagcctaaaaatggcacgctttatttcttcaaccagttaccattaataccacgcacatattcccctgctcctgcacgactaaccagcttttcaccggctattctcgccacttgatcggtagttatattattttgcgccgcaatctccgcataccttttttcccgttcactattgatttgcttaactacggaaagtgcatcctcagtattcctgactggagccagatatccgctgaatgtttcacctaccagaccttgttgttttgcttcatccagcgtcatactcattgcaaaagagctaaacagcaggcttaaccaaagtatcactcctgtttttttcatattctcactccttagaataagtcagagttatttttgagcatatcttcaatctgccgatcgactttaatatgaatttcatgttcaattttcacattcatattaatatttatgggcttatccggtgttgcaacttccagcctgatacacccaaccaaacctacgcagattaacgccatgccaccaatgaccatcgttaatctgaacccacgctttgttatcatttattattactcccggttaaaaacaccaaactattccagttcagcgataattctacggtacagagcaaagtattaaaacacagtaatctcttagggaattcgaaactcattggatatagaactttttacctataatttccacttgcttttttctatgcagattgctaaaaacttaaacattatgaaaattaaatcaatcttcattctggccatgccagctcaacaaactaccaccaccgaaaccactaggttgttcggggggtagtctcgacagaattttaaaaaaccctctgagcgactagccagagggttttttcatacctgccttacgcgtttcgctcagagtttcataacaggagaaactatgaaaactcatcgtgagattgcacaacaacttgatttatttcattcagaacctcaagggccgggaatgattttctggcatccgaacggctggcggctatttcaaaatattcaacagcatatgcggaaaatttaccaacagcatggctttcaggaagtccgtacacctcagtttttgaaaaaggagttatggcagacttccggtcatcttgctatgtacgaagaagatatgtttttcggtggtggtcaggacggcatatcggattatgctttaaaaccaatgtcctgcccggcgcatattttactgtttaaacgtggtgtacatagttacaaagaactccccataaaactgttcgaatttggtttagtccatcgtaatgaaccctctggcgctttgaatggctgcctgagattgcgccaatttactcaggacgatgcccatgtcttttgtgcgtggtcacaaattcaggtagaggtaattaattttctgaatagagctaagcttgtgtacagccagtatggttatcatcaacttttggtcagaatttctactcggccagagtctgctctcggcgataaacttttatggcagaaagctgaacaaatattaattgatgtatgccaggaacaatctgttgatttcgaaatacaaatcggtgaaggcgcattttatggtcccaaaatcgaacttgctcttaaggataatatagggcgtgagtggcagtgcggaacaatacagctggattttaacctcccggaacgctttgatattgcttatacaaattcgtccggcgagaaagaacgcccggtgattttacatcaggtcatatatggctcaatagagcgctggatcggtgtgttactggaaagcactcagggcgccctgccagaatggatacatccattaccggttgcaatcgcaacagtgagtgaagcagctattgattatgccaacgcactggtttgttcactcaattctgcggatttgcctgtattagctgatcatagtaatagttctgttgctcataaaatcaggcgattccatcaattgaagatcccaaatattctgattatcggagaacaggaaatgaaaacagctcaggttgctctgcgtcgggggaaggttatctctatcgtagggaaagaacagctggttgagcagttaatggttaatagaaatagatgatggttcttaattgtatccggtcattgaattctcaatgaccgtttttttaatctgtgaatgttcattccggtaacgcaatatttttctctaaccattcttccaaactgctgccaaatcgcagactgcgccatagctgaaaaatattctcttcatgccggtagctcagcctgacttcacgctttttatccacgactggattaacaccgtttatctctgagtgcatgaccaaaatacccagattatccagtgttacattcgctttagagtggctgatttccaaataacgtagccaatccattgctacaccagccgttaaatcattttttcctattgaatcaaccgtatctttatcaagccttaatgtcaggccgccatcgttagcgatccagccttgcttaataagccactgtttatcatttaataacagcggtaattcaccactgattcttcctgacatagcaagttgcttcactttcaatacataaaataatttactcacattcagatgattaaaactcagtaccgcaggctgtttttgtgggagctgtaatttatctaatttgagagcaccatccagcatatcaatattcacattggataaagttaatggctgaatctcagtcgggggataaaaaccttgcaaatcggcagaaacattattcatctcgaataggctattgattgttttaacccgtaactgaacaggcgatgtaacgcctaattgccaggtctgttcctgtaaacgccacggtaatacaaaatccagtccgtcaatacttccatctttcagccagatgccggcatttttgactatccagtgcccaccagcacgtaaaccttgcccttttgcggcagaaaatgctgcctgcgcatagatattcccgctacgcacggtaatccccaaatcagcaggaatgagagtctggaacgccagcaatgactgccttggccaacgagcctctcctcttagcctgactccatcccaacgaccataaattggaatcggccctattcccttagcctgcaatttaccgttcaacataaaattatcaggtgactgaccggttactgttgccctgaaattaaccggcggtaaaaagcctccggagcgaaaatcagttcgcaaggcagaaagttgcagttctcccgctaattctggctgggttatggaacgatcccatatcagcggttttatcagttgcaaacgaggggctttcatttttacaaggccataattgatagtatcaaaccctgtattgagtgcatttaccgctatctgtgactgattccagcttcctttacctgatatatcccatttagcctgcaacggtggtaaatcaccgtttccccagtaacgccagttccagtttccatggtcgggaataaaatttttggccattccatcaaaatggagtctgaaagttccccaatagtgctcttttgcagttactattgcctgtaaacggcccgtaaaaccattacgggtcaggtaggttcctgccaaaggtaatctggcttctttgatagtaaaattttcgctgatttttccccagacacggaacagagaaccggacttgaatgttatcttcggatcaactaatgagcctgttatgactgtcggcaatgacatcgtcatgatcattttcccgctattcatttgccctgtcagttggagaggaatatgtgtatttgttaggcttacctttgtcggttgcatggaaagaaccacattgcccttgccgaattcaccctgcgtgatcaggttcacttttccacttatctggctaccattaaagcctttcttccagtcttcgagagtaagattcctttag

SEQ ID NO: 1564 - DNA, 11162 bp, Xenorhabdus sp.; identical to SEQ ID NO: 1563
  CDS (6556)..(7194)

SEQ ID NO: 1565 - DNA, 4737 bp, Xenorhabdus sp.
  CDS (114)..(644)
ctgtatcgatttgccgaagaatttttgccttcgttgaaaatttccaaaaatgccatccgttattatgctgatatcgtggaacaatatgccgcctaccggcttcgacgcctcggaaaataccagcaatggctatacgcattgtgttttatctttcaccgttaccagcaaatcacggatatgcccggttgagagctgccctgtatgaatacaacagaatattcaaaagcacccatgtgctcaatctgattgatgatatgcatctaagaaaagcaatacggactgccaggaaccgtacggagtcgtaccatcaattacaaagcattatccgtaaaatctacaacaacgtgttcaaaggcaggaaaatcaccgataaccgagtcagcgcccatgctgccaggttagtcgccaactgtattgtggcgtacaacgccatgatcctaaatcgagtgtataaaaagatggtatttgaaggtgtgccggaagaaatactggaaaaatttgcgagaatatcgccgattgcctggcagcacttgttctttactggtcgttacagtttcaagaaggcgagcaaaacatccattgatgttgctgcactggctgagctgttggaacaacacttaaaacaggcattctggaagtcatgaccgcagaatcgtcacttttgggggttcttcggcggaacccgtctttaatttgacatacacaccctacttgagaaaataacctgactgaattaggtcaaacaataatcgtttgattgtcatctatttatctttaataactcaattaattgaggagtgacttatgctttcaggtatagaacccatcacgaaaaaggaaatcagatatgacagaatgctggcttttttaccccgtcattttggtcattattttatgaatgcagagacctatctttataactggatggatagatacgccgaggattataacggggattcttattcatattatgaactatccaaccaatcaatattaatttgtcctgatagtggctattcgttatggtcagaaaatggttcatcttttaaagatttatcaccagaacaagttggtattacggcaaccctatttttactgaatcatttcatttttaagacctatgaacaggaaccgaaaatgtcagagcaatttagtcaaaaatacgagggtttaatggattatggtgcaggcttagggcaagaaatctggacaccaatacgcgctttaattgattagttgctcccttctgacaaaacgtcctttcataaaataaaaacagcacctatctcattaattttatgggttatattccacactcatttgacataggtgcatacaaaaagagaatgatattcatcgaaaataaatattatttatctgcgaggtctgaatatgacacctgctattttcgtcacgacaaaaaaacgtttcgcacaagatcctggtcacggacgctggtttgatctactggattatacggatgaagacgactttttagagaacgttaagactttttacggggaactggatgaagacgatagttacttttttcccgattggacggatatccccaaagaagcacttaaaaaagaggggcatgtgaactgggaatatatagacgtattatctgagttaagtggcgatagccaagacgcctattatgaatactgtacgaatcttctttatatcgttgatagagaaacatttaaaggcgcatatattaccacacttacgctgtatgaatcagaatgtgattttattatacagtatgccagtaatattttagagaatgagtcgatccctgagatatgcaggttatattttgattgggatgcctatacacgggatcgatttatagatacctacacacgttacgggcaacatattttttatcaaatataattaacgtaggcgataacaggagaaaaagtgatggcaagatttattactttgccagctggtcaggttgtgaatacggcaaatattgtttatataacgaatgtaatgaaagtacagcgcgacgcatcaggtcagattgttgcaatgactctaaaagaaattgagaatgccccagagcagcactggtatgcgtttcgcgtaaatatgatcgattatcatatttgggtattcggacaaaatgttacttctgagcattccgctcagaacgttcgaaatagtatcaccacgcaattaaccaccgtctaggaataatgcctatgccagagcttcaattcgaaacgagaacgtcggctgttgtctctaccgcacacttatcacagtcagacatagaattactcacacagtacagtcagaatgcccccgacgaaggggatatagtggtacgtatccataaggagggagtcgagatctgtctggcaacagacgcacatttagcgtgtatggagaacatagcagatactcttgacttatctgatggctttctcaataatctccagcgagtgaaagaaactttgccagacctttattctatcatgtttgatcaagatgctttcttagtttccggtttagtcgaatttgagtggtagtccaaaagttgggtgatgaattattcattcctattcagacatttttagctccatcatgatggggctattttttttgtccgtcatttgacatacaagccgtacttgagaaaatagagatatctttttaagaggagaaaactatgtctgattattataaagaatcgagaccgcgttgtcttgtttgtaaagggcacggttgttttatttgtaatgaaacaggtttaatatccgaattaagttattacaaggacaaatctgtgctggcaaatactgtattcagtacatctgatgtggatggttttattatggctatctgcgcaaaaataaagaaagtgatacaaacgggcataaaagtatcttctttagaaaaacaaccattggttgaatttatgtggcaattaaaaaaggagattagggtggatatcaatgacaatatatcacattcggatattgcgacatggtggatgctcaatgaagaggcattacccacaaaagaagcaatagaagaatgttatcttttaattgaacttcgaacagagtgtgacatgggtgaagcatggtgtgaagagcgtagagtgattagagatgattattttgatgattattgtatcgaagagttatatgaattagggtatctcacctatcgaaatggaaataataaaaatccagcatggttggaacaatttattgacaaagaaaaattaataaatgctatacaatacgattataaatcgattactttatcaaatggagatgaatattgggtctataatcaatagatatttatagaataaaataaatagtctaaaaataggattgatatatgaaaattaaatctgagcattatcaagaattaaaaaggttatatgttagcacaataaaatccgtggcttcatcagatgaaattaatttatatgatacttattctcgttatttagaacaaatagatgccccgactgaaaaaagtaaaaacattcgtttacgctggttgatttatttcaccgtgataaataaacccagtgtttactctaactattataaaaatggtcagcgtggatttaatggcgtattacattcttatttgaatgacgatcacattgatatcgcgcttaaaaaaatagtaacagaactgaattttgaacccatttaatggtatttttacagctatttatttcacatacacaccatattgaacaataataaaaaggaaacaaaaaaaacacaaggaaaatagatgatcattaaaaccttttctgttgtcacacaaaagcaaattagaaatagacatcaatatttccagagcatattctgtttagatcggcatatgtaaaggtataccgttatgcaacacacactaaaagaagcctatcccacacaggaaaaggcacgtcatgttgcacaaaggatggctagtgcggcaggtgtgcctatttggatttatcatcgaaaacacaaatggtttgtcagtggaacagtgaatttatatggacacagaccgctcattccaacggtcaaagaattcaggcgcaaacatccgatttatacttactggaaacgaactgatatccctacagtccattacatcagtttatatgctggaaaatattatatgcttgtagataatgtgattaccacagtcccgttttatacgctagtctatttattatcacaagtagggcaaacgggtctaaattgaacagttagttcagtgatgtgccttcagtacataaaggtaggaacattgatgatcgtttgtgatttacaatccgttttctgtcaatgataaccgtagaaaccgtcatgaaagcaaccaccctcagcaatacctttggacacctcactgatccccggcttaatcgtacgaaacagcatttgttgatcgacattctcaccatctcgatttgtgcggttatctgcggttgtgagagtttcaatgcgattgaagaatacggaaaatccaaggaggactggttcagacaatttctggaactccccaatgggatccccagccatgatacctttaacgatgtgataaaccggctgaatccccaagaattcggggaggcttttatcgcatgggtgaataagttagccaaaatctccaccgacattattgcattggatggcaaaacaatgagaggcacactcgacaaagccaacggctctccggtatcctttagagcacgtggct

SEQ ID NO: 1566 - DNA, 4737 bp, Xenorhabdus sp.; identical to SEQ ID NO: 1565
  CDS (1138)..(1236)

SEQ ID NO: 1567 - DNA, 4737 bp, Xenorhabdus sp.; identical to SEQ ID NO: 1565
  CDS (1393)..(1902)

SEQ ID NO: 1568 - DNA, 4737 bp, Xenorhabdus sp.; identical to SEQ ID NO: 1565
  CDS (2044)..(2205)

SEQ ID NO: 1569 - DNA, 4737 bp, Xenorhabdus sp.; identical to SEQ ID NO: 1565
  CDS (2217)..(2546)

SEQ ID NO: 1570 - DNA, 4737 bp, Xenorhabdus sp.; identical to SEQ ID NO: 1565
  CDS (2963)..(3325)

SEQ ID NO: 1571 - DNA, 4737 bp, Xenorhabdus sp.; identical to SEQ ID NO: 1565
  CDS (3433)..(3696)

SEQ ID NO: 1572 - DNA, 4737 bp, Xenorhabdus sp.; identical to SEQ ID NO: 1565
  CDS (4374)..(4736)

SEQ ID NO: 1573 - DNA, 6528 bp, Xenorhabdus sp.
  CDS (1)..(972)
gggctgaccaaaaaactgattgaacttggctatcccggtgtggttgcggtggatttcaaagaagcctacagcctgagtcaacacggtataccgctatgtcacattggccacttagtacagacacccgctcatctgatagaaaccatgctccggtgtgagcccaaaattatcactgtattttcgctggagaaagctcaggccatatcagatgcagctgaaaagctgggacgtattcagcccatcatgctgaaagtctttgctaaacgcgatatggcttttacctgtcaggaatcgggtttcctctttgaagagctagattcagctattgatgctttaaaacagatgccgggtattaaactatgcggtctgactcattttccctgtctggcatggcatgcccagtatcagaccacgttaccaactgttaatttgcagacgctgatcagagcacgaaacaaactcaggcaacgcggcatttccctcactcaaatcaatgccccctctgcaaccagctgcagcaccattcccctgttatcaaaatatggtgcgactcatttagaaccgggtcatgccctgacgggaacaatccctgcaaatagtattggccgggagcctgaacagatcgcgatggcttatgtcacagaaatatcccatcactatgaggacaaaagttattgttatggtggaggctactaccaacgcagccatatgaaacatgcactggtttttccagaacacaacagttcatacaaaacagcacggatattacggttaggtgaaccctgtattgattaccacttatctctatatggattacatcccattggtagcccggtgatcatgtgcttccggactcagattttcgtcacccgcagcgatgtcgccctgatctcaggtattcagtcaggaaatccgaagcttgaaggcatttatgacagtcagggcaactggaaaaacaacggttactcttaataattactcaacataggtattacatttaatattaactttccctcaaataatgttattttcgctctagtcaatttaccgcatgatgctgcgcgactatttatttacggaaataatttttacggaatagttatgctttatttatggaatagttatggaatgccagaaaaatctcaggaatacacccatacattccgctctgtattccccacccaagattgatacatcaggttacacctatgttcatgagcacttgcatattgatctgtccgaagccaaaggcacccttgactgtcgtctggatcagtatgaactgattgttgatgaacttcgccatctgcatgcgcttggtctgcgcaatattgtggaggtgaccaaccgttacatggggcgcaatgcctcctttttactgaatctggtatgtgatacccacatcaatatcattgcctcgacaggctattacaaacggccattcttccccgctcatttcagtacattaagcattcaggacattgctgaagagatgattactgaaattgaaacaggcattgacggtacggagttaaaagccggtattattgccgaaattggctccagtcttgaggtaattaccgaagatgaacaaaaagtctttgccgcagccgctctcgcacatcatgctaccgggtgccccatatccacccacaccaccttaagtacaatgggacgtgaacaactggcgctcctcaaagggtttggtgtttctcctgaatctgtggcgattggtcattgtgatctgaaagacaatctggacacgattattcccctgcttgaagaaggtgcctgggtacaattcgataccattggtaaaaacaattactatcctgacagcgggcgcattgcgatgttacaggcgcttgccagacgtgggctactcgacagagtcatgctctctcaggatataacccgccgttctcacctgaaaagcaacggaggaattggtttcgattacttactcacggtattcgttccgatgttgctgactgccggctttacccaaacacagatagaccgaatgttacgcgataaccctgcccaattcttccggcaccgctattccaaataactaagcaataattcgacagaaaataagaaagagagggataacaacatgaaatttgtcgttggtggacaaatagaaaaagaaaaaattgccgaatgtatccggcaactggccggagacaaagccgcctccgtcgtcattatgaatgacattgaagcctctatggcgattaaaaatggcgatgccgattattattttggtgcctgtaatacaggcggtggcggcgcgctggctatcgcgattgcccttatcggtctggatctttgcgccaccattggtatgccgggaaaaattttatccgacgatgagattattgctcatgtcaaagcaggcaaaaaagcctttggctttacggggcaggatatcgacattgttcttccggtgatcattaacacgatcatttctcaataaggagcctgtcatgcaacattttcatgagttcctgatgagactgatggaagtcgatccttttaaagcgggattactggcttccattggtgcgattgccgccatgatggcaaaccgtggtatcgccgttttccatgatggcctgcgtccgctgctcccggaatacctggaaggacgaatgagccgtaaggcgctggcagcaacaagttttgccctgagcatcggtctggtcgtcgggtttggtattcccttctcgctgacagcccccatcgtgctggttcacagcctgttgctcggtactgatatgattggtatctggtgtgccaacagccgcagaggattcgtggcttcaggtatcattggagccttatacgccattgccttactggccggattacgttctgttgttgaactgtttgcgatgctgccggttaatttcaccgatgacctgaaaaaagtcggtgatccgattgtcgcctgctttgctctgttccctgcgatggtcgtcggctatcaatatggctaccgcaaagggcttttagtcatgctcaccgctttagccggctatgtagcgaccaaagccgcaggcccgctcagttttggggggctaatcgaaaaaccggtcagtgtcgatccgaatggtgcggctttgttgctttcgatgattgccatgttctacttcgccatgcgtgaacgtccgaataatgccccatccgcaaatcaatcctccgcagcaccaaaaggtgccaatgaaatgttagtcgggctgttctcaacccgcatcgaacgtattcagaaaaataaatggctactaatcctatgtggtggcctgactgcaagtgcagcgaccatgtctttcagcctgctggcagaagggccggtatccctgcaattaatggcgcaggatgagcagactagtgccctgctggtggcgctggcacgtgccatcgggtttgtcccgctggtcggtacaacggcaatcgctactggtgtctacagccccaacggaatgaaattcgtgtttgtggcaggtctggcaaccagcaatccgtggctggcttttgtcgccggtggcctgacgatgtttattgaaatccagctactggcaaaaattgctatctggctggataaatatcccggcgtcaaagcgtgtagcggccatattcgtaccgcgatcaccaaaatgctcgaagtcgccctgttggttggtggtatgatcgcttccaacgccattctgccgggtatgggctttatgattgttgcggggatttatctgcttaaccgcacgtctaaacgtcctttggttgaaatggcaatcggcccgatcgcaaccattgccgtaggtattcttgctaacgtactctatttagtcggaataaattaacaggaacaaagtgagagaatgaaaaccgcgccgttacaaagcatgacgatggcacaggcccagaagcagcagtttaagctggtggatataatctgtcgtcactttcccggcgctgattttctctcacagggagatctgggtttagtcccgggtctccagcaacccagaatgacgtaccgtattgaatctgttctcgccgaatattttaacgcagaagccgcagcttttgtgaatggtgccggaacaggtgccttacgggccgggttgggggcaatacttcgtccttgcgagacattacttgtccacgacgcaccgatttatcccacgactaaaacatcgattgaacaaatgggtcttaatgtcgtttatgcagatttcaactgcacaaagcagcttgaaactgccattcaacagcataagcctacagcttgtcttatccagcatacacggcagaaaattgatgatcgttattccttgaaagagattatttctatcctgaacaaacatcacattccttcactggtagatgacaactacgccgccatgaaagtgccccacatcggctgtgaatatggagcaacgctttctgccttttcctgctttaaattacttgggccacagggagtaggcttagttatcggtaagcagacaatcatcgataaactgcgtcaaaacatgtactccggcggttgtcagattcagggctatcaggcgatggaagcattacgtgggctggtatttgcaccggtcatgcacgcagtacagtctgaagtaaatgaagaattagtgttccggctgaatcagggagaaataccccaggtaaaacaggctattattgccaatgcccagtccaaagtagttttagtcgaatttcatgaacccattgcggatgcggtactgaacactgcgcatacattgggcgcattaccttatcccgttggggcagagtcaaaatttgaaatcccgcccctgttttaccgaatttccggcacattccgtcagaccgatcccacgctggagaaacgtatgatccgcatcaatcccaatcgcagcggagccgaaactatcatgcgtatcttgcaggcaagttgtcggaaacagacatccggctgatattctgccaatcagggctagctaccagccatcaaatattttcccttctggatcagccatcactcttcccatagaatcaataatagctatccaattgaataaattacataaatgataataaacaggggaaatattatgatggaagagccgattcgggaagcctctcttgctgcggttaaaacagccagtgatatcgcatatcaatatgtcagtgaaattcgaaaccagcgtgtctatcccgattctgatgccttactgggtctgcaaaattttgacaggccactacctcagaatggcactgattgtcaggaagtgttggcacagcttcacaaatacggctcaccggccacagttgccagcacgggcgggcgctatttcgggctggttgtcggcggctcaactcccgcagcaatgggggccaatattgtcaccagtgcctgggatcaaatagcgctgatggagtcctcctctcccgttgctcatcaattagaaaaaattgccggacgctgggtattggagcttttgaatttaccctcagatgcattcgttggtttcgtctccggcaccacgatggcacatgtcagtgcattaggtgctgcgcgccagtatctgttccaaaagcagggctatgatctggcagaacagggtttgcataatgcaccaccgttgaaagttgttctgtccgaagaaacccatgtttctgttttaaaggcactgaagttactcggtttcggtcgctcacagttcatttttgtaccctgtgataatcagggacgcatcattgccagcgctgttcctgaactttcagataacatgattctggtattacaggctggtaatgtgaactctggcagttctgatcctttccagtccctgattccacaggctaaaaaagcaggctgttgggtgcatgtcgatggtgcctttggtctctgggcacgggcatcaaaagaaaaatctgagttagccggaggtgttgaaggcgcagactcatgggcggtagatgcccataaatggctgaacaccccctatgactgtggcatgtgtattgtacgcaacaaacaggcactgagagatgtcatgacaacctctgccgcctatgttgagactcaggaagtatggcaggcaaaagacatgctgccggaattttcccgcaaagccagagccgtcgaagtgtgggcggctatttctgaactgggtgttcaagggattgaagcattaattgatcgctgctgcctatatgctgaaatgctggctgatggtcttaaatcactgggtttcactattcttaatgatgttgttcttaatcaggttgtggcctgtttgccggatatcactttgcagcgcaggatgctgcaactggttcagcaatccggtgaatgctggtttgggcagacaacatggcagggtcaggaagccataaggctcagtgtcagttcgtgggcaaccacagaagccgatattcagcgcagcctgaaagcaattgcagcagcaattgatgaggcaaataaagacatcaataaataagaacacctccatcaactttagggca

SEQ ID NO: 1574 - DNA, 6528 bp, Xenorhabdus sp.; identical to SEQ ID NO: 1573
  CDS (1124)..(2074)

SEQ ID NO: 1575 - DNA, 6528 bp, Xenorhabdus sp.; identical to SEQ ID NO: 1573
  CDS (2096)..(2482)

SEQ ID NO: 1576 - DNA, 6528 bp, Xenorhabdus sp.; identical to SEQ ID NO: 1573
  CDS (2493)..(3863)

SEQ ID NO: 1577 - DNA, 6528 bp, Xenorhabdus sp.; identical to SEQ ID NO: 1573
  CDS (3882)..(4976)

SEQ ID NO: 1578 - DNA, 6528 bp, Xenorhabdus sp.; identical to SEQ ID NO: 1573
  CDS (5115)..(6503)

SEQ ID NO: 1579 - DNA, 8883 bp, Xenorhabdus sp.; identical to SEQ ID NO: 189
  CDS (428)..(1681)

SEQ ID NO: 1580 - DNA, 8883 bp, Xenorhabdus sp.; identical to SEQ ID NO: 189
  CDS (2187)..(3212)

SEQ ID NO: 1581 - DNA, 8883 bp, Xenorhabdus sp.; identical to SEQ ID NO: 189
  CDS (3341)..(3943)

SEQ ID NO: 1582 - DNA, 8883 bp, Xenorhabdus sp.; identical to SEQ ID NO: 189
  CDS (6625)..(7206)

SEQ ID NO: 1583 - DNA, 8883 bp, Xenorhabdus sp.; identical to SEQ ID NO: 193
  CDS (8596)..(8883)

SEQ ID NO: 1584 - DNA, 10496 bp, Xenorhabdus sp.
  CDS (2230)..(3147)
caagtattctttatggcagtcttacgattaatttcgtgcatcaaaataattactggttaaatattaaagctgcctgaataaatcatctaagaaagttttaaactttgatctgatgcacaaaaaagcacccttgaggtgcttttttgtcaataaagttgaaaaaggaatgaggtgaagatttaatcgttggctaaatcggcaaatagtgctgtgctcaggtaacgttcagcagaagaaggcagaatgacaacaatattcttattcttgtactcgtcttcctgtgagagtttaatggccgctgcaaccgcagcacctgaagaaatgccagaaagaatgccttctttttcagtgacttctcgggctgttttaatggcttcttcgttactgattttaaatacacggtcaactaatgttaaatccaggttatcagggatgaaacctgcaccaatgccctgaattttgtgtgggcctggtttcagttcttcacctgccagtttttggctgattacgggggaatcttcaggctcgacggcaacaatttttacttgcttaccttgtgtattcttcagatagcgggcaacaccggtaatagtgccccctgtacctactccagcgacaaaaacatcaacattcccatcggtatcttcccaaatttctgggcctgtcgttttttcgtggatttcagggtttgccgggttactgaattgctgtagcaaaacatagcgttcaggagcactgtcacggatttcattcgctttatcaatagcacctttcatgcccttagcgccttcggtcagcactaattttgctcccaacgcttttagcagcttgcggcgctctaagctcatggtttccggcattgttagtgtcagtttatagccacgagccgcagcgacataagcaagagcaatacccgtattaccactggtcggctcgataagctctttatcctttgtcaaaatgccacgtttttctgcatcccaaatcatgttggcaccgatacggcatttcacactgaaactcggattacgggactctattttggccagaatacgaccatttccgaaatttttcaggcgtaccagtggagtgtgaccgatggtcaacgaattatcttcataaattttgctcattgtccgattgcccttaagatgctcatgagttgtgattaattaaccatacgcgaacagcttatgaatggaaataaagtttcagtctattcttattatataaaagaatatttaacgatttcttagaacatgttgagctcggtaacgatcaacccacatagccgtagcgccacaaactgcaacaggcataatgaacaaattgatgactgggatcatcgttaatatacttactgccgctccaaattgaaggttgtcaattttgtcctgtcgcagggtattacgcatacctataaaactgaccttatggttatcaaaagggtaatcgcaatattggatagccagcatccaggcactgaaaataaaccagagaacgggggctacagtttgcccaacacccggaataaaatacaataataatagagcgatagcgcgagggaggtagtagaggattttgactatctcacgtttcagaatacggggaacatctttcagtaaatcaaaaatgcctgtatcgggagcaggaatgccagttaattgcgcttccagtttctctgctaataacccgttaaagggcgatgcaataaaatttgccagtgtgctgaaaaaataggtaaaaataagcaaaacagaaataacagccagcggccatattaaatagctgagccattgcatccagtccggtactttatctagcgcccattgtatccaaccatccattttctgatatagccaccagaaagcaccaccaatcaataaaatattagccagtaaaggcaataaaacgaatcttttaatgcccgggcgggttaccagatgccaaccttgtacaatataatgaaaaccgcctagatgttttggcaattttgtcgaattcgtcatattttcttattctctcctgagtgattgagacggtatgatataggcaggattttccactgaccagtggtttaatgtgtaaaaaacattcgaaaaaacaggggatatctctctttatgataagaaaagtacgcagaggcttgcacttgtgctatttgacaaatactcttatctaaagaatattcagccgtggtggcaattaatttaaacaacagagatagcaatgatgcaggatttgcgtctgatattaatcgttgttggtgcgatagccataatagctttgctattacatgggttgtggaccagccgtaaagagcgttcgtcactctttcgtgatcgcccagtgaaacgtcgtaaacaggagcgtgagaaagagtcagaggataatgatggcgatgagctgtttaataatccgtcaaattcacctgttcatgaatcagcgaaatctcgccgtgaacatcgtgaagagccggttattgagcgtaatgcacctgatttgtcagatgtaacatcggataatggaatcgatcctttactctcaaaacaacaacctgaagcaccagtggcaaaagagaatgccattgatgaaagccagaaagaatcgcagcttggcctgtttgaatctgctgagcaaaatggtacggaaggcaaagaaaccgaagctggcaaccaacacattcagttggaaaatgccgcgaaagctgaagctgagcaagctaaaaaagagactgtgttggtactgcatgtagcggctcatcatggtcaggagctgaatggcgaagtgttgcttcagagcattttacagtccggtttccgttttggggatatgaatattttccaccgccaccttaacccatcgggtagtggtgcagtactgttcagtctggctaatatggttaagccggggtcatttgatccagaacgtatgactgatttcagcactccggggatctccatgtttatgctcgttccttcatatggtgattctaatcagaattttaaactgatgttgcaggcagcacagcgtattgcttctgatgtaggaggagtggtgttagatgccgagcgtaagatattaacaccgcaaatgattgagaattataaggcacgtattcgtaatacactcagtgctcaggagtaaattttctttttagtattaagcccccgctcagtcgggggtttttcatctctggtgagaagtcatgaaaaatattattcaaaaaattaacgaactaagaacaacattgcgtcatcatgagtatttataccatgttatggatgcaccagagatcccggatgcggaatatgatcgcttaatgcgggaactaaaatcactggaagaacagcacccggaactgattactgcggattcacctacccagcgggtcggagcagcgccattaactgcatttgagcaggtgcgtcatgaaatcccgatgttatctctggataatgtttttgatcaagaaagctatctggcgtttgataaacgtgttcgtgatcgtctgaaagacagtcgtgaactggtattttgctgtgaactcaaacttgatggtctggctgttagcctgctgtatgaaaacggcgagttagtgcgggcggctacccgtggcgatggtactacgggagaaaatataaccgctaatgttcgtacgatccgcgcaattccactgcgtttgaaaggagacaatattccagcccgtgtcgagatccggggtgaagtcttcatgaagcaggctggttttgaaaaacttaacgaagaagcccgtcggacaggtaataaagtatttgccaatcctcgcaatgccgcagccggatcgttgcgccaacttgatccgcgcattacagctaaacgtccactgactttttattgttatggtgttggcgttattgaaggcggagattcagaaaacgggcagctgccagcaagccattacgggcgcctgatgcaattcaggcagtgggggcttccggtcagtgacaaagtgaaattatgtcagggaacccagcaggtattggatttttaccgtgagatagagcaacagcgtcctgagctgggttttgatattgacggcgttgttatcaaagttgactcccttgaattacaggaagcattagggtttgtagccagagcacctcgctgggcgacggcattcaagtttccggcacaagaacaaataaccatagtgcgggatgttgaatttcaggtagggcgtacgggcgctattacgccggttgcacgtctggagccggtacaggttgcaggtgtaatcgtcagtaatgccactttgcataatgcagatgaaattgagcgtctggggctgcgcataggtgatactgttgttatccgtcgtgcgggtgacgttattccacaggttgttggtgtcattcaggaaaaaagaccaacacagagccaggaagttgttttcccggagcattgccctgtttgtggctctgatattgaacgtgttgaaggggaagcggtagcacgttgtaccggtggattattctgtggtgcacagcgtaaagaagcattaaggcatttcgtttcccgccgtgcaatggatgtggatggaatgggagaaaaaattattgagcagctggttgataaggaatatgtcaaaactccggctgatcttttccgtcttaccgcagggaaattaacgggtcttgagcgtatggggccaaaatccgctcagaacgtggtgaatgcgctggaaaaatccaagaaaacaacctttgcccgttttatttattcactgggaattcgtgaggtcggagaggcgacggctgctaatttagttgctcatttcgggacactgggaaaattgtgtgtagcagatacgcaagctctgattgctgttcaggatgtgggagaagttgttgccagtcatgtggttaatttctttaatgaaccacataatcaggcagtcattgatgatctcgtcaataatattggtatccactgggaatcggcagaagtaccacaagccgcagatattgatagcccatttgctggtaagactgtggtgttaactggatcactaagtcgtttatcccgggatgaggctaaagacaaactggctgctttgggagctaaagttacaggcagtgtttccaaaaaaaccgatctggtgattgctggtgaagcagccggttccaaattagcgaaagctacagagttagggatagctgtcattgatgaagaagaaatgcttcgtcttttaggtgagtaataagtagggacgtaatcttcagaaaggcgctattgaggtttcagtagcgcctatactttgcatacatgatagccatgttttggttaaaagtgtgatccggtttgctaaatttaggttttgttgcctcttgcataataaattaatgtgataattatcacgatttattatcgtatattacgaaatgcggttataaatttgcacctcgtcagatttggagttccttttatgtctcatatttttcattttgtcctcgccttagtgctcattggtggcctggctattttggcgagtaataaccggaaggatataagggtccggtatattattcagttacttgttattgaacttgttctggcgtggtttttcctgaattcgaatgccggattagggatcgtcaaagggtttgataacctgtttgttcacttgctgtcttatgccgcagaaggtactaactttgttttcggtggtatgattgacgcaaaactggcatttttcttcctgaacgtactttgtcctatcatctttatttccgccctgattggtattttgcagcacattaaaattctgccgattgtcattcgtgctattggtacagttctgtccaaagtgaatggtatggggaaactggaatctttcaatgcagtcagttcattgattctgggccagtcagagaatttcatcgcttataaagatgtattggacaaaatgtctgaacgccggatgtacaccatggctgcaaccgcgatgtctacagtatctatgtctattgtgggtgcttatatgacgatgctggatgcaaaatatgtggttgcagctctgatacttaatatgttcagtacctttatcgttctgtccctcattaatccttactctgttaaaagtgaaggggatattcatatgagcaacttgcatgaagggcaaagtttctttgaaatgctgggcgaatatattctggcgggtttcaaagtagcattgatcgtatcggccatgctgattggttttattgctctgattgcggctatcaatgctgtctttgatatggtatttggcattacctttcaggaatgtttgggctatgttttctacccgtttgcctggattattggtattcctgctgatgaagcactgaaagtaggcagtatcatggcgactaagctggtttctaatgaatttgttgctatgcagggcttacaggaaattgccgggcaattgagcgagcgttcaaaaggaattctgtcggtatttttagtttcttttgccaacttctcctctatcggaattgtcgccggagctatcaagggattgaatgaaaaacagggaaatactgttgcacgttttggtctgaaactgttgtttggttcaacactggtgagtttcctgtccgcagccattaccggactggtaatgagtttttaaattcacagtgacctgtgtttcagaatgaaaatggcatctcacaggtgccattttttacataaagaaaaggcttaaagaatggataaagaaaatctactggaaattgctaacacagtaatgccatttggaaaatataaaggaagaatgttaattgatcttccggaagaatatctgctctggtttgcccgtaagggggaatttccacaaggcaaactggggacactaatggaaatgacccttgcaattaagattgaagggctggattcattggtaaaaccattgaaaaaatcctaactaaccgtaagttggatcaagtggcgctatcggtgatgaaatatcgattagtgcaccacttttatataaatctatacgaacatttataatgtatgtttaagtattctcttaaattttaaacctaataccattgagagagttatacagtttattaataagccaaaaacaagcccataccaaaagccaatcaagcccattttctctgtaaccaagtttgttaaccctaatgtaaaagccaaaggcacgccaataaaccaataaccgaaaagaggaacatagaaaactatttttgtctcatgaaacccacgtaaaacccctgataatatggagtgtatagaatcaaatagctgaaagaagaataaaaagatgattactccaagagctatatttattacaagggtatcttttgtatataaactgataatatgttcagcataaaggaaaaacatgattcctagtacaagagtaataaatgtagtggatattaaagagagtaaactaaatcttagtgttgatgagtaatctttcttagcactcaagtagcttatttttactgttgtaacagcagacaatccaccgccaatagttattatcatggatgatattataattataatattattagctgcaatatatacggtgcctaaagttgcaatgccaagtgaaatggcatcaataaatatcacttcaacaaagagtgctaatccacttgggataccgatcaaaaacaatctttttaatcctgagttgagttttagagataatttaaatctgtatttttcatattctttttttcgtaaaaaatagatgatcagcaaaatagcactgagagtgttgattatcgcagttgtgatccccgctcctactccgcccatttctggtacaccaaatttaccaaaaacgaaaatgtagtttaaagggatattgactattagagcaaaaatagagatatacattgcaactttggtgttttcaaatgcttgcaacaaagaacgaaagacattgaatatcatcactcccggtacaccaaatgccatagctgtaatataatcttttgtgatgtgtacaacatcttcatcaataccaataagcgataaaagctgaaccgctaataacaagaaggcaacgataggaatcgataaaatcaatgcagcagatatgtagttattaacacaatctttgatgccttcgatatcattatttgcccgaagttttgcaacatcagcagatagcatcagaataacaccaaaacccaatacaaagatggggaaccaaatactactcctcagcgatacggcagcgagcgcatttgtcgagtagtggcttgatacgataacatccacggcactcattgctattctggtaagctgcgttactatgattggggttgatagtaaaaaaagatactttatatcgttcaataagacatttttttgcatagttttccctgtaaaaatattatttttttaattaccctgtattaattgcaacataatagaatgattgtataagtggctacggtttttatttttttgaaaatttattactgagtggctgagataaatagtagaatatgttattaggactgaaattttttagcttaattaaaactaatactgattataatcatcaaataaaaattaatgtaacatattgttaacactttgttcgtaatatatcacttttattaggttttgagagtatggctactttggggattccattaactatttgatatatagttgattaattcttttattctatattaatgacggaaggtttttgttgtaagggtagtattttaacttttgtaattgtatttttaggtgataactatttttcattatcaaaataatttatgtttttttaatatgttttatggtttttctttacattgaagatgatatggaagtttttattttatcggttttatactaaattattttaaggtggtaatatgaatattgataataatatagttttttctgagaaaaaagaagagttgtcacctattactgtatctatacctgatggtgctgatgttattgttgggcaacatatatatctagtcgtaacagtgaaatcaccacaggttaaatctattaagagtatttcaatagaagatccccaaaaaaacatttcagtactaaaaatagtggaagattggaggttaatagatgatacttccggggaagctatgtttatgttggaagttgatgatcaactgtcaccaaataaaacagttagctatactgttcatgcatattcggataagaatgaagatgtgcatggaattgaaccattgatgatcaattataaaacgaagaaaataaatgaatggaattttgtttcattaaaaacagatatagaaatcattgaaattccagttggttctacttataatcctaatggaaagtatattctttattcaggaaaggttattgatgaaaataataatccactgaaaaacacacaaataatagtttcatctgctaattaccctggcggtgaattggagatgctttatatcactacagatccaagtagtggtaaatctcctgaaattgttgaaatacaaaaacgggaaaaattttctaatttctttgttattaatagtgatgaaaatggtaatgtagggtttcgtatttatccaaaaagattgactttacgaatcgaatttattgttgaaatattgggaatgaattttgcgatacctatagggtttgcttatgtaataagcgcttctgattcaaatccgagcgtcccgccaccacaaattattggtatattaccgggaggaataattaaaaaagaaacagaggttaaagatttaatattaactgttccaaaatatagttatccggctgggggagatgtgattattttcttaattaaagatgaaaataataaattaattcaacttagcccaacatattttgtgaaagataattcaaaggaaggtaattataatgctcgtatttcatacgaaaaaataccatttaacaaaaaattagtgttctattatttagtgattcgtttaggtggggatagtatgtattccaagagattaaacgttatctttgaagatgattcaggagctggaactaatcccaataatggaggaaacacaggaaatggaaatcactgcgacaacggtctctataacaaagtcgatgtagactcaaattatgaagatggtaaattcagtttaaaaataaaaagcatcacactgatttaatgtttttaaaacacctgagtatcaaaagaaaagtagggcgatttttctatacacgaccataagaaaaaatccctgaaaacttgcgtcttcagggattcagaattttggtggagctaagcgggatcgaaccgctgacctcttgcatgccatgcaagcgctctcccagctgagctatagccccacaaatgtggtgttccgaatcaggatattttggtggagctaagcgggatcgaaccgctgacctcttgcatgccatgcaagcgctctcccagctgagctatagcccccaatccaaatcctggggac

SEQ ID NO: 1585 - DNA, 10496 bp, Xenorhabdus sp.; identical to SEQ ID NO: 1584
  CDS (3209)..(5242)

SEQ ID NO: 1586 - DNA, 10496 bp, Xenorhabdus sp.; identical to SEQ ID NO: 1584
  CDS (5468)..(6658)

SEQ ID NO: 1587 - DNA, 10496 bp, Xenorhabdus sp.; identical to SEQ ID NO: 1584
  CDS (6737)..(6952)

SEQ ID NO: 1588 - DNA, 10496 bp, Xenorhabdus sp.; identical to SEQ ID NO: 1584
  CDS (8910)..(10190)

SEQ ID NO: 1589 - DNA, 10496 bp, Xenorhabdus sp.
  CDS (9364)..(10317)
gtccccaggatttggattgggggctatagctcagctgggagagcgcttgcatggcatgcaagaggtcagcggttcgatcccgcttagctccaccaaaatatcctgattcggaacaccacatttgtggggctatagctcagctgggagagcgcttgcatggcatgcaagaggtcagcggttcgatcccgcttagctccaccaaaattctgaatccctgaagacgcaagttttcagggattttttcttatggtcgtgtatagaaaaatcgccctacttttcttttgatactcaggtgttttaaaaacattaaatcagtgtgatgctttttatttttaaactgaatttaccatcttcataatttgagtctacatcgactttgttatagagaccgttgtcgcagtgatttccatttcctgtgtttcctccattattgggattagttccagctcctgaatcatcttcaaagataacgtttaatctcttggaatacatactatccccacctaaacgaatcactaaataatagaacactaattttttgttaaatggtattttttcgtatgaaatacgagcattataattaccttcctttgaattatctttcacaaaatatgttgggctaagttgaattaatttattattttcatctttaattaagaaaataatcacatctcccccagccggataactatattttggaacagttaatattaaatctttaacctctgtttcttttttaattattcctcccggtaatataccaataatttgtggtggcgggacgctcggatttgaatcagaagcgcttattacataagcaaaccctataggtatcgcaaaattcattcccaatatttcaacaataaattcgattcgtaaagtcaatctttttggataaatacgaaaccctacattaccattttcatcactattaataacaaagaaattagaaaatttttcccgtttttgtatttcaacaatttcaggagatttaccactacttggatctgtagtgatataaagcatctccaattcaccgccagggtaattagcagatgaaactattatttgtgtgtttttcagtggattattattttcatcaataacctttcctgaataaagaatatactttccattaggattataagtagaaccaactggaatttcaatgatttctatatctgtttttaatgaaacaaaattccattcatttattttcttcgttttataattgatcatcaatggttcaattccatgcacatcttcattcttatccgaatatgcatgaacagtatagctaactgttttatttggtgacagttgatcatcaacttccaacataaacatagcttccccggaagtatcatctattaacctccaatcttccactatttttagtactgaaatgtttttttggggatcttctattgaaatactcttaatagatttaacctgtggtgatttcactgttacgactagatatatatgttgcccaacaataacatcagcaccatcaggtatagatacagtaataggtgacaactcttcttttttctcagaaaaaactatattattatcaatattcatattaccaccttaaaataatttagtataaaaccgataaaataaaaacttccatatcatcttcaatgtaaagaaaaaccataaaacatattaaaaaaacataaattattttgataatgaaaaatagttatcacctaaaaatacaattacaaaagttaaaatactacccttacaacaaaaaccttccgtcattaatatagaataaaagaattaatcaactatatatcaaatagttaatggaatccccaaagtagccatactctcaaaacctaataaaagtgatatattacgaacaaagtgttaacaatatgttacattaatttttatttgatgattataatcagtattagttttaattaagctaaaaaatttcagtcctaataacatattctactatttatctcagccactcagtaataaattttcaaaaaaataaaaaccgtagccacttatacaatcattctattatgttgcaattaatacagggtaattaaaaaaataatatttttacagggaaaactatgcaaaaaaatgtcttattgaacgatataaagtatctttttttactatcaaccccaatcatagtaacgcagcttaccagaatagcaatgagtgccgtggatgttatcgtatcaagccactactcgacaaatgcgctcgctgccgtatcgctgaggagtagtatttggttccccatctttgtattgggttttggtgttattctgatgctatctgctgatgttgcaaaacttcgggcaaataatgatatcgaaggcatcaaagattgtgttaataactacatatctgctgcattgattttatcgattcctatcgttgccttcttgttattagcggttcagcttttatcgcttattggtattgatgaagatgttgtacacatcacaaaagattatattacagctatggcatttggtgtaccgggagtgatgatattcaatgtctttcgttctttgttgcaagcatttgaaaacaccaaagttgcaatgtatatctctatttttgctctaatagtcaatatccctttaaactacattttcgtttttggtaaatttggtgtaccagaaatgggcggagtaggagcggggatcacaactgcgataatcaacactctcagtgctattttgctgatcatctattttttacgaaaaaaagaatatgaaaaatacagatttaaattatctctaaaactcaactcaggattaaaaagattgtttttgatcggtatcccaagtggattagcactctttgttgaagtgatatttattgatgccatttcacttggcattgcaactttaggcaccgtatatattgcagctaataatattataattataatatcatccatgataataactattggcggtggattgtctgctgttacaacagtaaaaataagctacttgagtgctaagaaagattactcatcaacactaagatttagtttactctctttaatatccactacatttattactcttgtactaggaatcatgtttttcctttatgctgaacatattatcagtttatatacaaaagatacccttgtaataaatatagctcttggagtaatcatctttttattcttctttcagctatttgattctatacactccatattatcaggggttttacgtgggtttcatgagacaaaaatagttttctatgttcctcttttcggttattggtttattggcgtgcctttggcttttacattagggttaacaaacttggttacagagaaaatgggcttgattggcttttggtatgggcttgtttttggcttattaataaactgtataactctctcaatggtattaggtttaaaatttaagagaatacttaaacatacattataaatgttcgtatagatttatataaaagtggtgcactaatcgatatttcatcaccgatagcgccacttgatccaacttacggttagttaggattttttcaatggttttaccaatgaatccagcccttcaatcttaattgcaagggtcatttccattagtgtccccagtttgccttgtggaaattcccccttacgggcaaaccagagcagatattcttccggaagatcaattaacattcttcctttatattttccaaatggcattactgtgttagcaatttccagtagattttctttatccattctttaagccttttctttatgtaaaaaatggcacctgtgagatgccattttcattctgaaacacaggtcactgtgaatttaaaaactcattaccagtccggtaatggctgcggacaggaaactcaccagtgttgaaccaaacaacagtttcagaccaaaacgtgcaacagtatttccctgtttttcattcaatcccttgatagctccggcgacaattccgatagaggagaagttggcaaaagaaactaaaaataccgacagaattccttttgaacgctcgctcaattgcccggcaatttcctgtaagccctgcatagcaacaaattcattagaaaccagcttagtcgccatgatactgcctactttcagtgcttcatcagcaggaataccaataatccaggcaaacgggtagaaaacatagcccaaacattcctgaaaggtaatgccaaataccatatcaaagacagcattgatagccgcaatcagagcaataaaaccaatcagcatggccgatacgatcaatgctactttgaaacccgccagaatatattcgcccagcatttcaaagaaactttgcccttcatgcaagttgctcatatgaatatccccttcacttttaacagagtaaggattaatgagggacagaacgataaaggtactgaacatattaagtatcagagctgcaaccacatattttgcatccagcatcgtcatataagcacccacaatagacatagatactgtagacatcgcggttgcagccatggtgtacatccggcgttcagacattttgtccaatacatctttataagcgatgaaattctctgactggcccagaatcaatgaactgactgcattgaaagattccagtttccccataccattcactttggacagaactgtaccaatagcacgaatgacaatcggcagaattttaatgtgctgcaaaataccaatcagggcggaaataaagatgataggacaaagtacgttcaggaagaaaaatgccagttttgcgtcaatcataccaccgaaaacaaagttagtaccttctgcggcataagacagcaagtgaacaaacaggttatcaaaccctttgacgatccctaatccggcattcgaattcaggaaaaaccacgccagaacaagttcaataacaagtaactgaataatataccggacccttatatccttccggttattactcgccaaaatagccaggccaccaatgagcactaaggcgaggacaaaatgaaaaatatgagacataaaaggaactccaaatctgacgaggtgcaaatttataaccgcatttcgtaatatacgataataaatcgtgataattatcacattaatttattatgcaagaggcaacaaaacctaaatttagcaaaccggatcacacttttaaccaaaacatggctatcatgtatgcaaagtataggcgctactgaaacctcaatagcgcctttctgaagattacgtccctacttattactcacctaaaagacgaagcatttcttcttcatcaatgacagctatccctaactctgtagctttcgctaatttggaaccggctgcttcaccagcaatcaccagatcggtttttttggaaacactgcctgtaactttagctcccaaagcagccagtttgtctttagcctcatcccgggataaacgacttagtgatccagttaacaccacagtcttaccagcaaatgggctatcaatatctgcggcttgtggtacttctgccgattcccagtggataccaatattattgacgagatcatcaatgactgcctgattatgtggttcattaaagaaattaaccacatgactggcaacaacttctcccacatcctgaacagcaatcagagcttgcgtatctgctacacacaattttcccagtgtcccgaaatgagcaactaaattagcagccgtcgcctctccgacctcacgaattcccagtgaataaataaaacgggcaaaggttgttttcttggatttttccagcgcattcaccacgttctgagcggattttggccccatacgctcaagacccgttaatttccctgcggtaagacggaaaagatcagccggagttttgacatattccttatcaaccagctgctcaataattttttctcccattccatccacatccattgcacggcgggaaacgaaatgccttaatgcttctttacgctgtgcaccacagaataatccaccggtacaacgtgctaccgcttccccttcaacacgttcaatatcagagccacaaacagggcaatgctccgggaaaacaacttcctggctctgtgttggtcttttttcctgaatgacaccaacaacctgtggaataacgtcacccgcacgacggataacaacagtatcacctatgcgcagccccagacgctcaatttcatctgcattatgcaaagtggcattactgacgattacacctgcaacctgtaccggctccagacgtgcaaccggcgtaatagcgcccgtacgccctacctgaaattcaacatcccgcactatggttatttgttcttgtgccggaaacttgaatgccgtcgcccagcgaggtgctctggctacaaaccctaatgcttcctgtaattcaagggagtcaactttgataacaacgccgtcaatatcaaaacccagctcaggacgctgttgctctatctcacggtaaaaatccaatacctgctgggttccctgacataatttcactttgtcactgaccggaagcccccactgcctgaattgcatcaggcgcccgtaatggcttgctggcagctgcccgttttctgaatctccgccttcaataacgccaacaccataacaataaaaagtcagtggacgtttagctgtaatgcgcggatcaagttggcgcaacgatccggctgcggcattgcgaggattggcaaatactttattacctgtccgacgggcttcttcgttaagtttttcaaaaccagcctgcttcatgaagacttcaccccggatctcgacacgggctggaatattgtctcctttcaaacgcagtggaattgcgcggatcgtacgaacattagcggttatattttctcccgtagtaccatcgccacgggtagccgcccgcactaactcgccgttttcatacagcaggctaacagccagaccatcaagtttgagttcacagcaaaataccagttcacgactgtctttcagacgatcacgaacacgtttatcaaacgccagatagctttcttgatcaaaaacattatccagagataacatcgggatttcatgacgcacctgctcaaatgcagttaatggcgctgctccgacccgctgggtaggtgaatccgcagtaatcagttccgggtgctgttcttccagtgattttagttcccgcattaagcgatcatattccgcatccgggatctctggtgcatccataacatggtataaatactcatgatgacgcaatgttgttcttagttcgttaattttttgaataatatttttcatgacttctcaccagagatgaaaaacccccgactgagcgggggcttaatactaaaaagaaaatttactcctgagcactgagtgtattacgaatacgtgccttataattctcaatcatttgcggtgttaatatcttacgctcggcatctaacaccactcctcctacatcagaagcaatacgctgtgctgcctgcaacatcagtttaaaattctgattagaatcaccatatgaaggaacgagcataaacatggagatccccggagtgctgaaatcagtcatacgttctggatcaaatgaccccggcttaaccatattagccagactgaacagtactgcaccactacccgatgggttaaggtggcggtggaaaatattcatatccccaaaacggaaaccggactgtaaaatgctctgaagcaacacttcgccattcagctcctgaccatgatgagccgctacatgcagtaccaacacagtctcttttttagcttgctcagcttcagctttcgcggcattttccaactgaatgtgttggttgccagcttcggtttctttgccttccgtaccattttgctcagcagattcaaacaggccaagctgcgattctttctggctttcatcaatggcattctcttttgccactggtgcttcaggttgttgttttgagagtaaaggatcgattccattatccgatgttacatctgacaaatcaggtgcattacgctcaataaccggctcttcacgatgttcacggcgagatttcgctgattcatgaacaggtgaatttgacggattattaaacagctcatcgccatcattatcctctgactctttctcacgctcctgtttacgacgtttcactgggcgatcacgaaagagtgacgaacgctctttacggctggtccacaacccatgtaatagcaaagctattatggctatcgcaccaacaacgattaatatcagacgcaaatcctgcatcattgctatctctgttgtttaaattaattgccaccacggctgaatattctttagataagagtatttgtcaaatagcacaagtgcaagcctctgcgtacttttcttatcataaagagagatatcccctgttttttcgaatgttttttacacattaaaccactggtcagtggaaaatcctgcctatatcataccgtctcaatcactcaggagagaataagaaaatatgacgaattcgacaaaattgccaaaacatctaggcggttttcattatattgtacaaggttggcatctggtaacccgcccgggcattaaaagattcgttttattgcctttactggctaatattttattgattggtggtgctttctggtggctatatcagaaaatggatggttggatacaatgggcgctagataaagtaccggactggatgcaatggctcagctatttaatatggccgctggctgttatttctgttttgcttatttttacctattttttcagcacactggcaaattttattgcatcgccctttaacgggttattagcagagaaactggaagcgcaattaactggcattcctgctcccgatacaggcatttttgatttactgaaagatgttccccgtattctgaaacgtgagatagtcaaaatcctctactacctccctcgcgctatcgctctattattattgtattttattccgggtgttgggcaaactgtagcccccgttctctggtttattttcagtgcctggatgctggctatccaatattgcgattacccttttgataaccataaggtcagttttataggtatgcgtaataccctgcgacaggacaaaattgacaaccttcaatttggagcggcagtaagtatattaacgatgatcccagtcatcaatttgttcattatgcctgttgcagtttgtggcgctacggctatgtgggttgatcgttaccgagctcaacatgttctaagaaatcgttaaatattcttttatataataagaatagactgaaactttatttccattcataagctgttcgcgtatggttaattaatcacaactcatgagcatcttaagggcaatcggacaatgagcaaaatttatgaagataattcgttgaccatcggtcacactccactggtacgcctgaaaaatttcggaaatggtcgtattctggccaaaatagagtcccgtaatccgagtttcagtgtgaaatgccgtatcggtgccaacatgatttgggatgcagaaaaacgtggcattttgacaaaggataaagagcttatcgagccgaccagtggtaatacgggtattgctcttgcttatgtcgctgcggctcgtggctataaactgacactaacaatgccggaaaccatgagcttagagcgccgcaagctgctaaaagcgttgggagcaaaattagtgctgaccgaaggcgctaagggcatgaaaggtgctattgataaagcgaatgaaatccgtgacagtgctcctgaacgctatgttttgctacagcaattcagtaacccggcaaaccctgaaatccacgaaaaaacgacaggcccagaaatttgggaagataccgatgggaatgttgatgtttttgtcgctggagtaggtacagggggcactattaccggtgttgcccgctatctgaagaatacacaaggtaagcaagtaaaaattgttgccgtcgagcctgaagattcccccgtaatcagccaaaaactggcaggtgaagaactgaaaccaggcccacacaaaattcagggcattggtgcaggtttcatccctgataacctggatttaacattagttgaccgtgtatttaaaatcagtaacgaagaagccattaaaacagcccgagaagtcactgaaaaagaaggcattctttctggcatttcttcaggtgctgcggttgcagcggccattaaactctcacaggaagacgagtacaagaataagaatattgttgtcattctgccttcttctgctgaacgttacctgagcacagcactatttgccgatttagccaacgattaaatcttcacctcattcctttttcaactttattgacaaaaaagcacctcaagggtgcttttttgtgcatcagatcaaagtttaaaactttcttagatgatttattcaggcagctttaatatttaaccagtaattattttgatgcacgaaattaatcgtaagactgccataaagaatacttg

SEQ ID NO: 1590 - DNA, 10496 bp, Xenorhabdus sp.; identical to SEQ ID NO: 1589
  CDS (8488)..(9255)

SEQ ID NO: 1591 - DNA, 10496 bp, Xenorhabdus sp.; identical to SEQ ID NO: 1589
  CDS (2130)..(3416)

SEQ ID NO: 1592 - DNA, 8152 bp, Xenorhabdus sp.
  CDS (2769)..(5321)
tttaggattaatgcttgcctgttccggtgttaaacaaaatagcgtgtgtgtgtaatatgaccagcctaattcagcataggccacacccacatcataacttgatgaaagctctaaaccacgccactcagctttatcaacattgatcattgtaagctgagtctcatactgaccacgttttgcgttgtttattctggtcagataatctttaacctgtgtatcaaaatagctcagtttagtacggaatttatcgccatccatcaacagatcattcttcaatacattgaccccgacttcccatgacagggagcgctcaggtgataacaggaggtttgtattcggagtctgagaccagcctttagttgtttcaaacaggcttggtaaccggatagcagagccatacttgccatagaattgaagaccttctaaaggctcaagggtcatattgataatcggagaccaaccaccggcagtacgttccaatccctctccgtaggtaaccttgtgagataggggtatcattttcccatccacataatcgaattttgggaatataggattattatcatgggatttgaaatatgaataacgcaaaccaccatcaaaagtcaaccaatccagaggcttccattcggcattagcaaaaatattataatcattacgccatccttccctaaaagaaccgctcttaagcacgtcataggtctcattcttcggataaccagtagtttcatacgtgtaagatgcgccataggtaaacaaaagatccccataaggaaacaggatctctgatgtattattaatacctactccccatttatctgtctgactataagtacggtctactgttattcctgataaagggcttgagctattaatatggctcacagcctggctataaaacgcattagcttttaaatcgaccagataattaccttctggcttaaaacgatattgtgccgtatatgaagtaacattaattttattcataaaccttcataaggcgcaccgaaacgcgctattgctgatggcattatttcaccatagcgactgatatattcgtttctagccagttcaaggccatgaccttcgaacttcaattttcctttcagtaaataggaaatattatccatcgaggtgttaagtatttcctcactcgccctataaggcgtgaatctctcagacgtagcaaaactcttaccattactagatggtgtaattgttatctgaggaacattttctcctcttttgcccgcataatagttgccattatgtcggcgggcaaaagcggcaaccatatccagatattcgcttttgatccccaatgcaatactgccattccctcccgttggacggaatccaccatgtcgctccattccggcaggtttaccatatgctttataaatttcgtcatttttataaacatcagatttgggataaccgccaatcgtacccacttctggaggccttgtactgttgttattaaacccgccggtcattctcacaccgaatgtctggccgtgtaaaacaacatcattcacattaagcgtacttaccctgaccactccgccaatagcgccattagcgtcagcccctgtactcgggcctttctcaatatccactgaactgatcaagtccggatcaatataagtgcgtccggcaactcctgaatatccccggtaaatcgttgtctcctgcatagctccatcaacaataaccggtgttcttccctgcccctgcatcccacgaatattgacatccagcgcaccagagttacggttctcactattcagtacacccggcgttcccttcagaaaatcacccacggatgtaccacggcgctgttctacctgctccgctgaaatatgagtactggaaccgggtgtcatataaggtaaatccgcgtttagctgtgcttcactgaatccggaaactttaagctctttaagtaccacggtttctgacttatgaggattttctggcgcggttttcgatgttttatcagtgtctgctgcgtaagatggaaaaactgtgtttcccagtagtgctaataaaatccctgttctcaggttcagtggggagctgaacgagtttgttgatgattccacttttaatgcttccatgttatggctattagttcagtgtgataattagttcaatttgaatttaattggggtaggaagtaactgatgagcaccagaatcagcgacatatagacaaccgatgagtaaaagcgatccaactaaaaataataatgaaaagccgcccaaacgcggaggattaggtcggaaaataataggtatactcattatttgttgtgtgctgctggtatatttgtatcattcttataagggcggtaatgataattaatactaaaaacaaatgcaaacaataacaattatcattaccttatgacttatctctacagcaccattgaatccaaaacaaccaacatcgatacatcagggaaaaagatttaaatcgagccgcttcgcaatcctatttaatagtcaaaaaatccgatacattcccgatcgcaatcctgataacctaccgtatgactcttcctcttaatatcagccatcaaatccacagatgaatcgcacagattatcagtgataagatagtgttttcgcccagcagaggttcactagcgttctatccttagctgattatatttaggttttgtcatttagatgggttgactgagtgtcgatagcccagccgagtcaacaggaacaataaaattgaatcaaatcaacatgaaagaatctccagcaaaggatgtaagcacccacactcccatgatgcagcagtatctgcgcctgaaagcgcaacaccctgatattttgctgctttatcgcatgggagatttttatgaattgttctatgacgatgcgaaaaaggcagcaaagttactggatatttctctgaccaaacgtgggcagtccgctggccagccaattccaatggctggagttccttatcatgcaattgaaaactatctggcaaaactggttcaactgggtgaatctgcggcaatctgtgaacaggttggcgatcctgccaccagcaaaggccctgttgagcgtaaagttgtacgtattgtgactccggggacagtcactgatgaagccttgctgcaagaacgtcaggataaccttctggcggctatctggcatgacagtcaggggtttggctacgctactctggatatcacttccggtcgtttccgtgtttctgaaatggctgatgaagatacaattgctgctgaactccagcgcacccgtccggctgaattactctatcctgaagcctttgagcacatggggttgatcgaacgctatcacggcctgcgccgtcgtcctatgtgggaatttgaactggatacagcaaagcagcagctgaatctgcaatttggtacccgtgatctgatcggctttggggtcgaaaaggctccacaggcactgcgcgcagcaggctgtctgctgcaatatgtcaaagacactcagcgcactgctctgcctcatatccgcaatatcacaatggaaagccagcaagagacggtcatcatggatgccgctacccgccgcaatcttgaattgactcagaacctgtcgggaagcactgaaaacacccttgcctctgtgctcgatcagtgtgtgacgcctatgggcagccgtatgttgaaacgctggctccataccccaatccgcaaccgggatatactggaaaatcgccagcaggctatttctgcgcttcaggagataggctttgagctacaaccgttcttgcgtcaggttggcgatttagagcgtgtgctggcccgtctcgctctccgctctgcccgcccccgtgatttgacaagaatgcgccatgctttccagcaattgccagatatccaccagatcatggattcttctgattccccatatattcaggcattacaacaacgtattggtcgttttgacgagttacagcaactgctggaaaatgcggtagtcgaaaccccgcctgttctggtgcgtgatggcggtgtcatagcgcccggttataatgctgagctggatgaatggcgagcattggctgatggtgccagtgattatctcgacaaactggaaatccgtgaacgtgaaaaactcggtattgataccctgaaagtcggcttcaatgcagtacatggttactatattcaggtcagtcgcgggcaaagtcaccttgtgccgattcattatgtacgccgccagaccctgaaaaatgcagaacgctatattattcctgaattaaaagagtatgaagataaggttctgacttccaaaggcaaggctctcgccatcgagaaagccctgtatgaagagctgttcgacttattacttcctcatctggcagccctgcaaaccagcgctgaagcactttcagaactggatgtactggcaaacctcgccgaacgagctgaaacactgaattatacctgtccgacattaacagacagaaccggcatccaaatcacgggaggccgtcatccggttgttgagcaggttctcagtgaaccctttatctctaacccgttaactctctcttcacagcgtcgcctgttaatcattaccgggccgaatatgggcgggaaaagtacttatatgcgtcaggccgctttgattacattgctggcgtatattggtagttttgtcccggcagaaaaagcggtgattgggcctgtagaccgtatttttacccgtgtaggagcatccgatgatttggcatccgggcgctcgactttcatggtggaaatgactgaaacggctaatattttgcacaatgcgacagaacacagtctggtgttgatggacgaaatcggtcgtggtacgtcaacttacgatggcctttctctcgcgtgggcctgtgctgagaatctggctaatcgcattaaggcgatgacgttgttcgccactcactattttgaattgacgacattgcctgaaaaattggaaggagtggtgaatatccatctggatgcggttgaacacggcgataccattgcctttatgcacaatgtgcaggatggtgccgccagcaagagctacgggctggccgttgcttcactggccggtgttccccgtgatgttatcaaacgggcacgccagaaactaaaagagctggaatcactctccaacaatgccacagccggtcatgtcgacacaccacaactgacactattggcggaagaaacctccccggcagtagaagcactggaaaacctgaatccggactccctaacgccacgtcaggcactggaatggatttatcgtttaaaagacatggtgtaaagcatgacggatttacagatgacagggaccagaacaacaggtttgtccataaaaggtgataccagcctgttagaacccatttatcaatttttacagtgtgaaaccccggatcaatgggtggagaaagcaaggcagccggagaaccttccggttttgctgcgtgatcatcttttatgtgagctaaaagcagcacagagcgcaatgttcctgatccgaaaatatgctgttgatccggcgagcgcggatgcgctgctggcatggtttcagccctatgaagattttgcctataaaaaaatcggcagcatccattcgttaaagggcaaaagccaaattacgaaacaaattactgcacgggaaaagtccccttacagccagtcgttaattgataaaatggtgttgctgataaaagaagaactacatcatttttatcaggtactggagattatggaatccagaggaataagctatgacagcatcagcgccagccgttatgctcgatcgttgtttcagcatattactaatcatgagccttatactctggtggataaattgattattggggcatatattgaggcacgttcttgcgaacgtttcgctaaattagcgccttatttcgacgaggaattgggtaaattttatatttccctgctgcgttcagaagcacgccattatcaggattatttaacactggctcaatctatatctaaaaatgatattacagaaagagtgaaatattttggtcaaatagaagctgaacttattcagtcacccgattctgattttaaattccatagtggtatacctgtaaattaaaagtatgccgataaattaagaaaggtgggctttattatcccaccttttaatttaattatccctttatctcaggtgtaaaattctaagtacggaataaggattcgatattcaatccttgggtatgcagaatgtctctgagacggcgcaacccttcaacttgaatctgacgaactctttccctggttaatccaatttctcgccctacatcctctaaagtttccgcttcataaccaagcaagccaaaacgacgagccagaacttcacgttgttttgcgttaagttcaaacaaccatttgacaatactttgtttcatatcatcatcctggatggttgtttctggcccagaatcgttttcatcagataaaatatctaacagcgctttatctgaatccccgctaatcggagtgtcgactgaagtaatgcgttcattaagccgcatcatacggctcacatcatctactggcttatccagtttttcagcaatttcttcgacacttggctcatgatctaatttatgagctaactctcttgcagtacgtaaataaacattcagttctttaacgatatgaatgggcaaacggatcgtacgagtttgattcataattgcccgttcaattgtctgacggatccaccatgtggcataagtagaaaatcgaaaacctctttcaggatcgaatttttctactgctcgaataagaccaaggttgccttcttcaattaaatccaaaagcgccaatcctcggttgctatatcttcgggatattttgactaccagccgcaagttgctttcaatcatgcgttggcgcgcagcaatatctccccgcaatgcccgtctagcgaaaagaacttcttcctctgctgtcagcaaaggagaaaaaccaatttctccgagataaagctgggttgcatcaagaacccgttggttaactccttgcaacaactccaggtcttcatcaaaactggttaaatcatcctcgtctttcagcaacgcttcatcaaagtcatcggcttccgtgccattttcgtctaaatccgcctcttcatacaactcattaactttaagcgtactttggctcatcagctgctcctacccatgataatgcggacaggagttcagattcctgccctggtttatcgctgcggaagataacgcagcgggtttacggattttcccttgtaacgaatctcaaaatgcaatcttactgaactggttccggtgctacccatagttgctattttttgccctgcctgtacatcctgctgctctcgcaccagcatagtatcgttatgagcataagcactcaggtagtcatcatcatgttttattattattagatttccatatccacgtaatgcatttccggcgtaaacaactttcccactggcggttgcaaagacgggttggccacgattacccgcaatgtcaatgcccttattcccaccctgagaatctgaaaaactttcgagaacttttccttcagcaggccatctccaactattgataatcttactcgtgatagccttactcgcatttaaatctgttgcagacgatcctttcgaaggggcatcgtcactatcagaaatcgtttctcttggcaacattttttgtgaattatgcctgtcattatttgcaggatacgcattacctttttgaaaatcaacctgctcaattttagattgtgtgctatttgatgctattaatacaccgttcctggagtttacattgccaattctcaggacttggccaacatttaagccataaggttctgaaatgccatttatgtgagatagttcacgaaaatccttacctgtaatccaggcaatgtaaaataaagtatccccatgtttaactgtgtaagttttaccgttatagctccctttcggaatgctcccataatttcggttatagacgattttcccatcctgtaaattattatttccagcattatttgccggatatttactatttgcggaatatttgcctatttcgctgtttttggagattaccggggggacta

SEQ ID NO: 1593 - DNA, 8152 bp, Xenorhabdus sp.; identical to SEQ ID NO: 1592
  CDS (5340)..(6134)

SEQ ID NO: 1594 - DNA, 8152 bp, Xenorhabdus sp.
  CDS (7166)..(8152)
tagtccccccggtaatctccaaaaacagcgaaataggcaaatattccgcaaatagtaaatatccggcaaataatgctggaaataataatttacaggatgggaaaatcgtctataaccgaaattatgggagcattccgaaagggagctataacggtaaaacttacacagttaaacatggggatactttattttacattgcctggattacaggtaaggattttcgtgaactatctcacataaatggcatttcagaaccttatggcttaaatgttggccaagtcctgagaattggcaatgtaaactccaggaacggtgtattaatagcatcaaatagcacacaatctaaaattgagcaggttgattttcaaaaaggtaatgcgtatcctgcaaataatgacaggcataattcacaaaaaatgttgccaagagaaacgatttctgatagtgacgatgccccttcgaaaggatcgtctgcaacagatttaaatgcgagtaaggctatcacgagtaagattatcaatagttggagatggcctgctgaaggaaaagttctcgaaagtttttcagattctcagggtgggaataagggcattgacattgcgggtaatcgtggccaacccgtctttgcaaccgccagtgggaaagttgtttacgccggaaatgcattacgtggatatggaaatctaataataataaaacatgatgatgactacctgagtgcttatgctcataacgatactatgctggtgcgagagcagcaggatgtacaggcagggcaaaaaatagcaactatgggtagcaccggaaccagttcagtaagattgcattttgagattcgttacaagggaaaatccgtaaacccgctgcgttatcttccgcagcgataaaccagggcaggaatctgaactcctgtccgcattatcatgggtaggagcagctgatgagccaaagtacgcttaaagttaatgagttgtatgaagaggcggatttagacgaaaatggcacggaagccgatgactttgatgaagcgttgctgaaagacgaggatgatttaaccagttttgatgaagacctggagttgttgcaaggagttaaccaacgggttcttgatgcaacccagctttatctcggagaaattggtttttctcctttgctgacagcagaggaagaagttcttttcgctagacgggcattgcggggagatattgctgcgcgccaacgcatgattgaaagcaacttgcggctggtagtcaaaatatcccgaagatatagcaaccgaggattggcgcttttggatttaattgaagaaggcaaccttggtcttattcgagcagtagaaaaattcgatcctgaaagaggttttcgattttctacttatgccacatggtggatccgtcagacaattgaacgggcaattatgaatcaaactcgtacgatccgtttgcccattcatatcgttaaagaactgaatgtttatttacgtactgcaagagagttagctcataaattagatcatgagccaagtgtcgaagaaattgctgaaaaactggataagccagtagatgatgtgagccgtatgatgcggcttaatgaacgcattacttcagtcgacactccgattagcggggattcagataaagcgctgttagatattttatctgatgaaaacgattctgggccagaaacaaccatccaggatgatgatatgaaacaaagtattgtcaaatggttgtttgaacttaacgcaaaacaacgtgaagttctggctcgtcgttttggcttgcttggttatgaagcggaaactttagaggatgtagggcgagaaattggattaaccagggaaagagttcgtcagattcaagttgaagggttgcgccgtctcagagacattctgcatacccaaggattgaatatcgaatccttattccgtacttagaattttacacctgagataaagggataattaaattaaaaggtgggataataaagcccacctttcttaatttatcggcatacttttaatttacaggtataccactatggaatttaaaatcagaatcgggtgactgaataagttcagcttctatttgaccaaaatatttcactctttctgtaatatcatttttagatatagattgagccagtgttaaataatcctgataatggcgtgcttctgaacgcagcagggaaatataaaatttacccaattcctcgtcgaaataaggcgctaatttagcgaaacgttcgcaagaacgtgcctcaatatatgccccaataatcaatttatccaccagagtataaggctcatgattagtaatatgctgaaacaacgatcgagcataacggctggcgctgatgctgtcatagcttattcctctggattccataatctccagtacctgataaaaatgatgtagttcttcttttatcagcaacaccattttatcaattaacgactggctgtaaggggacttttcccgtgcagtaatttgtttcgtaatttggcttttgccctttaacgaatggatgctgccgatttttttataggcaaaatcttcatagggctgaaaccatgccagcagcgcatccgcgctcgccggatcaacagcatattttcggatcaggaacattgcgctctgtgctgcttttagctcacataaaagatgatcacgcagcaaaaccggaaggttctccggctgccttgctttctccacccattgatccggggtttcacactgtaaaaattgataaatgggttctaacaggctggtatcaccttttatggacaaacctgttgttctggtccctgtcatctgtaaatccgtcatgctttacaccatgtcttttaaacgataaatccattccagtgcctgacgtggcgttagggagtccggattcaggttttccagtgcttctactgccggggaggtttcttccgccaatagtgtcagttgtggtgtgtcgacatgaccggctgtggcattgttggagagtgattccagctcttttagtttctggcgtgcccgtttgataacatcacggggaacaccggccagtgaagcaacggccagcccgtagctcttgctggcggcaccatcctgcacattgtgcataaaggcaatggtatcgccgtgttcaaccgcatccagatggatattcaccactccttccaatttttcaggcaatgtcgtcaattcaaaatagtgagtggcgaacaacgtcatcgccttaatgcgattagccagattctcagcacaggcccacgcgagagaaaggccatcgtaagttgacgtaccacgaccgatttcgtccatcaacaccagactgtgttctgtcgcattgtgcaaaatattagccgtttcagtcatttccaccatgaaagtcgagcgcccggatgccaaatcatcggatgctcctacacgggtaaaaatacggtctacaggcccaatcaccgctttttctgccgggacaaaactaccaatatacgccagcaatgtaatcaaagcggcctgacgcatataagtacttttcccgcccatattcggcccggtaatgattaacaggcgacgctgtgaagagagagttaacgggttagagataaagggttcactgagaacctgctcaacaaccggatgacggcctcccgtgatttggatgccggttctgtctgttaatgtcggacaggtataattcagtgtttcagctcgttcggcgaggtttgccagtacatccagttctgaaagtgcttcagcgctggtttgcagggctgccagatgaggaagtaataagtcgaacagctcttcatacagggctttctcgatggcgagagccttgcctttggaagtcagaaccttatcttcatactcttttaattcaggaataatatagcgttctgcatttttcagggtctggcggcgtacataatgaatcggcacaaggtgactttgcccgcgactgacctgaatatagtaaccatgtactgcattgaagccgactttcagggtatcaataccgagtttttcacgttcacggatttccagtttgtcgagataatcactggcaccatcagccaatgctcgccattcatccagctcagcattataaccgggcgctatgacaccgccatcacgcaccagaacaggcggggtttcgactaccgcattttccagcagttgctgtaactcgtcaaaacgaccaatacgttgttgtaatgcctgaatatatggggaatcagaagaatccatgatctggtggatatctggcaattgctggaaagcatggcgcattcttgtcaaatcacgggggcgggcagagcggagagcgagacgggccagcacacgctctaaatcgccaacctgacgcaagaacggttgtagctcaaagcctatctcctgaagcgcagaaatagcctgctggcgattttccagtatatcccggttgcggattggggtatggagccagcgtttcaacatacggctgcccataggcgtcacacactgatcgagcacagaggcaagggtgttttcagtgcttcccgacaggttctgagtcaattcaagattgcggcgggtagcggcatccatgatgaccgtctcttgctggctttccattgtgatattgcggatatgaggcagagcagtgcgctgagtgtctttgacatattgcagcagacagcctgctgcgcgcagtgcctgtggagccttttcgaccccaaagccgatcagatcacgggtaccaaattgcagattcagctgctgctttgctgtatccagttcaaattcccacataggacgacggcgcaggccgtgatagcgttcgatcaaccccatgtgctcaaaggcttcaggatagagtaattcagccggacgggtgcgctggagttcagcagcaattgtatcttcatcagccatttcagaaacacggaaacgaccggaagtgatatccagagtagcgtagccaaacccctgactgtcatgccagatagccgccagaaggttatcctgacgttcttgcagcaaggcttcatcagtgactgtccccggagtcacaatacgtacaactttacgctcaacagggcctttgctggtggcaggatcgccaacctgttcacagattgccgcagattcacccagttgaaccagttttgccagatagttttcaattgcatgataaggaactccagccattggaattggctggccagcggactgcccacgtttggtcagagaaatatccagtaactttgctgcctttttcgcatcgtcatagaacaattcataaaaatctcccatgcgataaagcagcaaaatatcagggtgttgcgctttcaggcgcagatactgctgcatcatgggagtgtgggtgcttacatcctttgctggagattctttcatgttgatttgattcaattttattgttcctgttgactcggctgggctatcgacactcagtcaacccatctaaatgacaaaacctaaatataatcagctaaggatagaacgctagtgaacctctgctgggcgaaaacactatcttatcactgataatctgtgcgattcatctgtggatttgatggctgatattaagaggaagagtcatacggtaggttatcaggattgcgatcgggaatgtatcggattttttgactattaaataggattgcgaagcggctcgatttaaatctttttccctgatgtatcgatgttggttgttttggattcaatggtgctgtagagataagtcataaggtaatgataattgttattgtttgcatttgtttttagtattaattatcattaccgcccttataagaatgatacaaatataccagcagcacacaacaaataatgagtatacctattattttccgacctaatcctccgcgtttgggcggcttttcattattatttttagttggatcgcttttactcatcggttgtctatatgtcgctgattctggtgctcatcagttacttcctaccccaattaaattcaaattgaactaattatcacactgaactaatagccataacatggaagcattaaaagtggaatcatcaacaaactcgttcagctccccactgaacctgagaacagggattttattagcactactgggaaacacagtttttccatcttacgcagcagacactgataaaacatcgaaaaccgcgccagaaaatcctcataagtcagaaaccgtggtacttaaagagcttaaagtttccggattcagtgaagcacagctaaacgcggatttaccttatatgacacccggttccagtactcatatttcagcggagcaggtagaacagcgccgtggtacatccgtgggtgattttctgaagggaacgccgggtgtactgaatagtgagaaccgtaactctggtgcgctggatgtcaatattcgtgggatgcaggggcagggaagaacaccggttattgttgatggagctatgcaggagacaacgatttaccggggatattcaggagttgccggacgcacttatattgatccggacttgatcagttcagtggatattgagaaaggcccgagtacaggggctgacgctaatggcgctattggcggagtggtcagggtaagtacgcttaatgtgaatgatgttgttttacacggccagacattcggtgtgagaatgaccggcgggtttaataacaacagtacaaggcctccagaagtgggtacgattggcggttatcccaaatctgatgtttataaaaatgacgaaatttataaagcatatggtaaacctgccggaatggagcgacatggtggattccgtccaacgggagggaatggcagtattgcattggggatcaaaagcgaatatctggatatggttgccgcttttgcccgccgacataatggcaactattatgcgggcaaaagaggagaaaatgttcctcagataacaattacaccatctagtaatggtaagagttttgctacgtctgagagattcacgccttatagggcgagtgaggaaatacttaacacctcgatggataatatttcctatttactgaaaggaaaattgaagttcgaaggtcatggccttgaactggctagaaacgaatatatcagtcgctatggtgaaataatgccatcagcaatagcgcgtttcggtgcgccttatgaaggtttatgaataaaattaatgttacttcatatacggcacaatatcgttttaagccagaaggtaattatctggtcgatttaaaagctaatgcgttttatagccaggctgtgagccatattaatagctcaagccctttatcaggaataacagtagaccgtacttatagtcagacagataaatggggagtaggtattaataatacatcagagatcctgtttccttatggggatcttttgtttacctatggcgcatcttacacgtatgaaactactggttatccgaagaatgagacctatgacgtgcttaagagcggttcttttagggaaggatggcgtaatgattataatatttttgctaatgccgaatggaagcctctggattggttgacttttgatggtggtttgcgttattcatatttcaaatcccatgataataatcctatattcccaaaattcgattatgtggatgggaaaatgatacccctatctcacaaggttacctacggagagggattggaacgtactgccggtggttggtctccgattatcaatatgacccttgagcctttagaaggtcttcaattctatggcaagtatggctctgctatccggttaccaagcctgtttgaaacaactaaaggctggtctcagactccgaatacaaacctcctgttatcacctgagcgctccctgtcatgggaagtcggggtcaatgtattgaagaatgatctgttgatggatggcgataaattccgtactaaactgagctattttgatacacaggttaaagattatctgaccagaataaacaacgcaaaacgtggtcagtatgagactcagcttacaatgatcaatgttgataaagctgagtggcgtggtttagagctttcatcaagttatgatgtgggtgtggcctatgctgaattaggctggtcatattacacacacacgctattttgtttaacaccggaacaggcaagcattaatcctaaa

SEQ ID NO: 1595 - DNA, 8152 bp, Xenorhabdus sp.; identical to SEQ ID NO: 1594
  CDS (6267)..(7169)

SEQ ID NO: 1596 - DNA, 8152 bp, Xenorhabdus sp.; identical to SEQ ID NO: 1594
  CDS (941)..(1936)

SEQ ID NO: 1597 - DNA, 8152 bp, Xenorhabdus sp.; identical to SEQ ID NO: 1594
  CDS (90)..(887)

SEQ ID NO: 1598 - DNA, 8413 bp, Xenorhabdus sp.
  CDS (26)..(376)
ctcggaccatgtgctctaaacgttttttgaagctgttttggacaggtcaaatacccgtcgggacatttatgcggataaagggtatgccagccagaagcgtgaacgtgtgctgaaggagcagggctatcgtgtgcatattcagagaaaagcggcacgtaataagcccttatcacactgccaaaaaggccgaaataagaaaatagcgaaaactcgggcacgcgtagaacatatctttggctcactctctcagatgggtgaaaaaattattcggacgataggccagctgcgagccaattttgcgatgacgatgaaggcaacctgctatgatttgcaacgtttggtttatttcggaaaatcgggtattcatgctttttaatttcgagatgtgatgaaaaagtgatgcgtttgtttttttcccctgaacaagcaagaaaaagtcatacacaataaggtcagttattggtgagttcaaaattgatcttattttttgtattgagagtttttagaggttccctttggtagataaattgcccgactcttctcttatagcaatatccctactaaaggcgctaatgatgagggatatttttgcgaagcatggaaaaaagctgttgctctgtcttgcatagagacaaaccaccttcagtatgtactttcaccagccacggctgtaccaatccagccagctcaagctgagttttttgcaggaacacggtttcagtgctgccggaactgatcatttctccatttgccagcacatataagccatcgcagatttgataaattaaatctatatcgtgactggaaataatgatccttttaccttcagcagcaatagtgtggataatatctagcatttgttggcgacctgccggatcaagccctgcggttggttcatccagcaataaataatcagcatccataaccagcgcacccgcaatagcgactctttttttctgaccaaaactcaggtattgaattggcttattgcgaaaagtgtgtgcatctacctgtgtcagtgcatattctattcgacgctgaatttcagtttcatcaacacccagattacgcaagctaaaagcgagatcgctgttgatatcggtataaaaaatttgttggtcggggtcctgaaaaactgtcacaacacgctggcgcagagccatcagaccttttttactgtaatccagcggtgtgttattccaccagactgcacctttttgtgggcgcagaataccggaaaggttcataaataaggtggatttgccacagccatttgcaccaataatgccagtaacctgaaagcgactgaaatcaagtgtgagatcttttaagaccggatcatcctgatagctgaaagacagagcccgagtttctaacatattatttcaccttactttatggttttcctattgttaaatggaaattcccctgatatagcttgagttccaatgccacgctcatttgctgataacggttcattacccgcacaaataacatactgattagcattgccagtgagtggtagctcgttcgcaaagtgcggtaaccgaaccgtaatgattgcgcatgatgaattgcggctgcttcctctacaaagataaaaataaaacgccatgtcagcaggagttgttcgattagcaaatgaggaacacggcaaaatttcagtaatctgattatctgttcaaagggcatattcatcatgaaccagaatgttgcagatagcgcagcaaggctgcgccagagagtttggttagctatctgaattccctgcatatcaataccaagccaatattgcccgatacgaaatccccaaagcagtttttccggctgaataccaatggacaacacaatagcaatcaggccgaataccaaaaaactgcaaggaattaacatccatttcaaataacgcagcaggctgatccgcaatagatagcagctaaacatcacaagcccgaccaacaatacggcctgccacaatggcgaaagcaccattgccagggtcatgaacaagagatacagggcgaatttcgccctgggatctttatcacgccagcggctctggtagctgagtttatctattccgatcatgatctttccgattacggtgatagtaaccaaaaatgtagaaaatcacggcagtacccagacttccctgtaaagtaaacaacaggctttcaatctcaccactggcaggttcatagagggattcaaaccacggtgtataatccggcgctatctccataatctgagcttctgcctgtccatctgctccaccaaattccccgccatgctcaatgaaaaacgggataatgcacagtgctgcaacgagggacagtaatatcaaggtctttttcatttgttgttctcctcagaaactgcgagcctgaattaattgtctttttaccagttggtcgtaaatcagtacggttagtaacccttcagccacggcaatgggaagctgagttatgcagaaaatacccatgaatttaaggatcgccgcccccataccgagttgaggatcaggaaaagcaacacccaactgaatggaggtcatggcataagtgacgatatcagcgacaaaagcacacaaaaagacgctaatatctttgcgcattcccatcttgcaggagaaacgccatatcaaatacccggccagcgggccaataactgccattgacattccattagcacccagcgttgtgataccgccatgtgccagcaataacgcctgaaataacaagacaattgcgcccagtattgccacaaccgaagggccaaatagaatcaccgccagcgccacgccggtaggatgtgagcaacttccggtaactgaaggaattttcagggctgaaaggacaaaaataaatgcgccacacagtgccagcaggactttctgattcccctcatcctgcacaatctggcgtaactttactaacccgaccgccagacaaggcagaaaagccagccaccagccaatcgcccacatggggggcaaaaaaccctccatgacatgcatagcaaaaacttcctgcggtgccatcaccaacaacagcgcgataattgcactcaataacgtagagtttgtcagtttctgttgcataactcacctcgataattgccagtttttattaattaaaatcgttgaaaaataagataactcctgtctgcaatctttttcactgaacggcagtgtggtgagatcacgccagcattgttcacccggcaatgtggcatcagccatcatcaatgcatgttccagaagattgtgacgttgtaacaagttgcggatcagggggaaacgggaatagactttcatcaggacaaggcaatcgtgattgagcaatgcctgttctaaagtggtttcagaagcagtacaggaaatcacagccaatgtctggttttccattgccaagggcatcgtactggcggcggcgatggcagaaaatgaagttattcccggaacaatttccagccacggcggaatgaccatctgcgtcgataccagtcgctgcaaaaggtatacccatgtgctgaacagcataggatcacccaaagtgataaaaccgacttttctgccattgaacacttcttcttgcaatgagtgagcaacttcatcccacactgcgtttttagcgtctatatcggctttcattaaaaagtggtaagtgaaaactttggtttccgccaaaagatattcttcaataatggagtgagcgaggctttttgttccttttttgcccgttggggtatagatcacatcaagttcagcaagaatgcgagctgcccgtaccgtaatcagatcactggctcccggccccacgccaataacatacagtttccccatattatccgacgattttttatgcatcaggctttctcctgacagttcagcgcacaagtaaggtggtcgacaaacatctgccgaattttcggattttctcccaatccctgtagccaggggattgcggctattccggccttttccagctgtgatttccacgaaccgtcttcacttgaagccatgtcattgatggcatgatctccggccaccagcatcaatggcatcagatatactttgcggatccggtgctcttgtaatccttttataatcagggaaagttccggataactttcaaccgcacctacccgtgccggaaagtgataatgattcatcagatggtcaagacaggcgtaagcagaaaaagcatggtgttctgtgccatgtcccataaagacgacacattcgttttccgtcagtacaggaagctggtggtgtaatgcccgcatcagttgcagataatcatcaaaatggctgagtaacggagcaccgagcactaatcgtctaaaacgaggacgaaatttttcaacttcatgtaacaccttttcatattcgtcgcccttgataatatgcaaacactgaacagcaacatcgttataaccggcgtggtgcaatctggttaacgcatcatgcgggttatcaatgtgaatatcatcgcgctggcgcaatttgctaatgatcataccggaggtgaatgccctgaagagttccctgtccggaaatacagatgccagttgttgttcacaggcttcaatattatttttcagtgtttcgtgataactggttccgaaactgatcaccaatagtgcttttttcatttcgtttttcctcattggtttattttaatttgccaacaagcacgccatctcttctaatccatgaatctgagtgatcccctcgccttcaaattgttgttccgggcgacaaagcacaatgcagggcagcccaagagaaagacacggttccactttttccctgaaaccgccttgctcacccgactctttggtaatcaccacgtccgcccggcaaaattggtaaaaagcccgattaaaatcagcactgaacgggcctttcagggcaaaaatctgatcgacagataagccgcaggattcacacattttcagcacttctgcggttggtaatacccgggccagtaccgttttctctttcaggtacatcatataatcggccagctgtttactgccggttgtcagcaaaatccgtgtacccagcctgaccgctatttcacatgcctgtttgatggttgtgactttatgaataagcgggttctcgacagcatcaatatcgctgggtcggatataacgaataagaggaatacctaacttctggcagacactgacaatattctggctcagtagtttagcataaggatgcgaggcatcaatcaccctttccatttcccgcgttttcagataatccaccatttcttccgcttccattctgccggtaattatttcgccacggatccccgtcgcctgttgtacgcctgcggaagtcgccactgacaggcagtaattgataccgacagtatccatcatctgacaaatctggcgggcatcgctggttccgccaaaaatgagagtcgctggccgtttcataaccggtatccccttggtgtgatcatcagcccgtcacgtacatatgttgactgattacccactatcaccagactgcgcatatcaacacgggagaaatccattgagccaaaagtggtcagccatttatcttcatgtttacgtcctgctgctttcacgactcccacaggggtatctgccgatttccacggttccatcagggcaaatgcccgggccagatgttcttctcgcccacggctgcgcggattatagaaacagatgacaaaatcggcttctgccgccaccttcacccgtttttcgatcaattcccacggcgtcagcagatcactcagactgatatgacaaaagtcatgcattaacggtgcccccagcaaagcagcacaggcggtacttgccgtcactcccgccaccagcctgacttctacattacgtttttgctggctgaccagttccagaatcagaccggccatgccataaatacccgcatcaccactgcaaaccaccgccacatttttaccctgttctgccagctcaatagcggtctgacaacgttctatctccttacacatgccagttttaataatttccttgtcaccaaccaacggtttcactaaatggatgtaggttttataacccaccacgatatcagcggctttcagtgccgctatcgcttcctgcgtcatcatggcttcactaccgggaccaattccaataacagttaacatggactcaatactcctaatgtgatggtgacaccttgctctcgcagagtatggccaactaagtgccctttactcattagccaggccacaggctgggagacactgccgatgcctaccgttttccggacaaattcagacgtgggaaatacttgctcatagtgggaaagctgattgacagaaaaagtctggaatggaatttgatgctgctggcttaattcgattaatgctggctcgtcttttttcaattcaatactgccgatagctttcagtgccagtggttcaaggttgagttccaacagatggcgttctaagagttctgcacatcgctcaggttctacccctaaccggcaacctattcctgccacaatacggcgaggaattaatttaaatacagggattgccagcattagattagttcgctcataactgacgtataccaaagcatccagctcagggcgttcttccagagaatcgacgggaatgaacccacgtatatcatagcgatttttttcatcactcaaatcagggtgaaaccaaattccaacccgtttcccgttaaccagcatttgattaacggttttaacgctctcccggaaattctccatctttccatctaattgttgggataagagatccagcgccgcgacctgattgacatccgttgctgtcgtaataacggcctgaccatcaaggatatcggcaatctgctgtgccagtttatttgctcctcccatatgccctgacaataaactgatagcaaactgccctttttcatccagcacgataactgccggatcagtcatcttatcccgaagtaaaggcgcaataacccgaatggcgatccccgttgcaccaaccatgatcagtgcgctataccgtgtgaatactttgcgtaccgtattggaaaaactaccgtcaaatgtgaaaaagccactttccaccagctcaggggaagtaaagcaatgctatcgctaaataggactgcaaacgacgggccagcgcgatgcctcccgctgtcaggcaaaacaaggcatatttgttatcaggcgtgaccgcattaggtgacattgtcactacatctgttatggtggcagcaagtattatggcaggcgctacggtattcatgggtgaacctcgcatagtacagttttgaatagtggaactcttgcccaagaaaagcgcccaccataatcagagccgttttacgaataccgacactgcgctcctgttcagtaatggtttccagtgttccccgcacaatctgtgatataggccacgttgccttataaaccacagcaaccggtgtttcctgttcataacctccctgaattaaccgagcaacaacctcactgatgttctgcactgaaaggaaaatcgccattgaggtttggtgagcggcaaaggcttccagtgtttcctgcgggggcatcggtgttctgccttccatacgggtaataattaaactctgggcaacttcggggacggtgtactccactcccaattgcgcggctgcgccaagaaatgaactcacgccgggaacagagataaaagtgattccgtggtttttcagctcttccgtctgttcacgaatagagccaaacagcgataaatctcccgtttgcaggcgcaccaccaattttttcccttttacgccattcaccattaattcggtgatctctgatagcgttaatccggcactgtcatggcattcagcatcgggccggcagtaatccaaaagctcgtgattaaccagtgatccggcataaatcactatctgggcctgacgtaataattgatatccctttagggtaatcagactcttatctcccggccccgcaccaacaaaccagactttttcggtgtcaaagctgacgttatccattctgtacctcctgatcagaactcttcaggcaagacagtaagtaagtcggattgttaggcctgaaataatgcccctgtcctaatgcggtcagttctcccacctgaatttcacgcccgtccagctctgccaccggagaagctcccaaataggataatgcctgcgtgaaattttctaacagaatgaaagtcatgaccaaacgcccgcctgaattcaggttgagcaacgcccagtcaataatttgggtcagatggccacctgttccgccaatgaaaatagcatctgcactgatttccagtggcacaggggctacccccgatttaatacgaacctgatggcaggaacttagaggacactg

SEQ ID NO: 1599 - DNA, 8413 bp, Xenorhabdus sp.
  CDS (7035)..(7844)
cagtgtcctctaagttcctgccatcaggttcgtattaaatcgggggtagcccctgtgccactggaaatcagtgcagatgctattttcattggcggaacaggtggccatctgacccaaattattgactgggcgttgctcaacctgaattcaggcgggcgtttggtcatgactttcattctgttagaaaatttcacgcaggcattatcctatttgggagcttctccggtggcagagctggacgggcgtgaaattcaggtgggagaactgaccgcattaggacaggggcattatttcaggcctaacaatccgacttacttactgtcttgcctgaagagttctgatcaggaggtacagaatggataacgtcagctttgacaccgaaaaagtctggtttgttggtgcggggccgggagataagagtctgattaccctaaagggatatcaattattacgtcaggcccagatagtgatttatgccggatcactggttaatcacgagcttttggattactgccggcccgatgctgaatgccatgacagtgccggattaacgctatcagagatcaccgaattaatggtgaatggcgtaaaagggaaaaaattggtggtgcgcctgcaaacgggagatttatcgctgtttggctctattcgtgaacagacggaagagctgaaaaaccacggaatcacttttatctctgttcccggcgtgagttcatttcttggcgcagccgcgcaattgggagtggagtacaccgtccccgaagttgcccagagtttaattattacccgtatggaaggcagaacaccgatgcccccgcaggaaacactggaagcctttgccgctcaccaaacctcaatggcgattttcctttcagtgcagaacatcagtgaggttgttgctcggttaattcagggaggttatgaacaggaaacaccggttgctgtggtttataaggcaacgtggcctatatcacagattgtgcggggaacactggaaaccattactgaacaggagcgcagtgtcggtattcgtaaaacggctctgattatggtgggcgcttttcttgggcaagagttccactattcaaaactgtactatgcgaggttcacccatgaataccgtagcgcctgccataatacttgctgccaccataacagatgtagtgacaatgtcacctaatgcggtcacgcctgataacaaatatgccttgttttgcctgacagcgggaggcatcgcgctggcccgtcgtttgcagtcctatttagcgatagcattgctttacttcccctgagctggtggaaagtggctttttcacatttgacggtagtttttccaatacggtacgcaaagtattcacacggtatagcgcactgatcatggttggtgcaacggggatcgccattcgggttattgcgcctttacttcgggataagatgactgatccggcagttatcgtgctggatgaaaaagggcagtttgctatcagtttattgtcagggcatatgggaggagcaaataaactggcacagcagattgccgatatccttgatggtcaggccgttattacgacagcaacggatgtcaatcaggtcgcggcgctggatctcttatcccaacaattagatggaaagatggagaatttccgggagagcgttaaaaccgttaatcaaatgctggttaacgggaaacgggttggaatttggtttcaccctgatttgagtgatgaaaaaaatcgctatgatatacgtgggttcattcccgtcgattctctggaagaacgccctgagctggatgctttggtatacgtcagttatgagcgaactaatctaatgctggcaatccctgtatttaaattaattcctcgccgtattgtggcaggaataggttgccggttaggggtagaacctgagcgatgtgcagaactcttagaacgccatctgttggaactcaaccttgaaccactggcactgaaagctatcggcagtattgaattgaaaaaagacgagccagcattaatcgaattaagccagcagcatcaaattccattccagactttttctgtcaatcagctttcccactatgagcaagtatttcccacgtctgaatttgtccggaaaacggtaggcatcggcagtgtctcccagcctgtggcctggctaatgagtaaagggcacttagttggccatactctgcgagagcaaggtgtcaccatcacattaggagtattgagtccatgttaactgttattggaattggtcccggtagtgaagccatgatgacgcaggaagcgatagcggcactgaaagccgctgatatcgtggtgggttataaaacctacatccatttagtgaaaccgttggttggtgacaaggaaattattaaaactggcatgtgtaaggagatagaacgttgtcagaccgctattgagctggcagaacagggtaaaaatgtggcggtggtttgcagtggtgatgcgggtatttatggcatggccggtctgattctggaactggtcagccagcaaaaacgtaatgtagaagtcaggctggtggcgggagtgacggcaagtaccgcctgtgctgctttgctgggggcaccgttaatgcatgacttttgtcatatcagtctgagtgatctgctgacgccgtgggaattgatcgaaaaacgggtgaaggtggcggcagaagccgattttgtcatctgtttctataatccgcgcagccgtgggcgagaagaacatctggcccgggcatttgccctgatggaaccgtggaaatcggcagatacccctgtgggagtcgtgaaagcagcaggacgtaaacatgaagataaatggctgaccacttttggctcaatggatttctcccgtgttgatatgcgcagtctggtgatagtgggtaatcagtcaacatatgtacgtgacgggctgatgatcacaccaaggggataccggttatgaaacggccagcgactctcatttttggcggaaccagcgatgcccgccagatttgtcagatgatggatactgtcggtatcaattactgcctgtcagtggcgacttccgcaggcgtacaacaggcgacggggatccgtggcgaaataattaccggcagaatggaagcggaagaaatggtggattatctgaaaacgcgggaaatggaaagggtgattgatgcctcgcatccttatgctaaactactgagccagaatattgtcagtgtctgccagaagttaggtattcctcttattcgttatatccgacccagcgatattgatgctgtcgagaacccgcttattcataaagtcacaaccatcaaacaggcatgtgaaatagcggtcaggctgggtacacggattttgctgacaaccggcagtaaacagctggccgattatatgatgtacctgaaagagaaaacggtactggcccgggtattaccaaccgcagaagtgctgaaaatgtgtgaatcctgcggcttatctgtcgatcagatttttgccctgaaaggcccgttcagtgctgattttaatcgggctttttaccaattttgccgggcggacgtggtgattaccaaagagtcgggtgagcaaggcggtttcagggaaaaagtggaaccgtgtctttctcttgggctgccctgcattgtgctttgtcgcccggaacaacaatttgaaggcgaggggatcactcagattcatggattagaagagatggcgtgcttgttggcaaattaaaataaaccaatgaggaaaaacgaaatgaaaaaagcactattggtgatcagtttcggaaccagttatcacgaaacactgaaaaataatattgaagcctgtgaacaacaactggcatctgtatttccggacagggaactcttcagggcattcacctccggtatgatcattagcaaattgcgccagcgcgatgatattcacattgataacccgcatgatgcgttaaccagattgcaccacgccggttataacgatgttgctgttcagtgtttgcatattatcaagggcgacgaatatgaaaaggtgttacatgaagttgaaaaatttcgtcctcgttttagacgattagtgctcggtgctccgttactcagccattttgatgattatctgcaactgatgcgggcattacaccaccagcttcctgtactgacggaaaacgaatgtgtcgtctttatgggacatggcacagaacaccatgctttttctgcttacgcctgtcttgaccatctgatgaatcattatcactttccggcacgggtaggtgcggttgaaagttatccggaactttccctgattataaaaggattacaagagcaccggatccgcaaagtatatctgatgccattgatgctggtggccggagatcatgccatcaatgacatggcttcaagtgaagacggttcgtggaaatcacagctggaaaaggccggaatagccgcaatcccctggctacagggattgggagaaaatccgaaaattcggcagatgtttgtcgaccaccttacttgtgcgctgaactgtcaggagaaagcctgatgcataaaaaatcgtcggataatatggggaaactgtatgttattggcgtggggccgggagccagtgatctgattacggtacgggcagctcgcattcttgctgaacttgatgtgatctataccccaacgggcaaaaaaggaacaaaaagcctcgctcactccattattgaagaatatcttttggcggaaaccaaagttttcacttaccactttttaatgaaagccgatatagacgctaaaaacgcagtgtgggatgaagttgctcactcattgcaagaagaagtgttcaatggcagaaaagtcggttttatcactttgggtgatcctatgctgttcagcacatgggtataccttttgcagcgactggtatcgacgcagatggtcattccgccgtggctggaaattgttccgggaataacttcattttctgccatcgccgccgccagtacgatgcccttggcaatggaaaaccagacattggctgtgatttcctgtactgcttctgaaaccactttagaacaggcattgctcaatcacgattgccttgtcctgatgaaagtctattcccgtttccccctgatccgcaacttgttacaacgtcacaatcttctggaacatgcattgatgatggctgatgccacattgccgggtgaacaatgctggcgtgatctcaccacactgccgttcagtgaaaaagattgcagacaggagttatcttatttttcaacgattttaattaataaaaactggcaattatcgaggtgagttatgcaacagaaactgacaaactctacgttattgagtgcaattatcgcgctgttgttggtgatggcaccgcaggaagtttttgctatgcatgtcatggagggttttttgccccccatgtgggcgattggctggtggctggcttttctgccttgtctggcggtcgggttagtaaagttacgccagattgtgcaggatgaggggaatcagaaagtcctgctggcactgtgtggcgcatttatttttgtcctttcagccctgaaaattccttcagttaccggaagttgctcacatcctaccggcgtggcgctggcggtgattctatttggcccttcggttgtggcaatactgggcgcaattgtcttgttatttcaggcgttattgctggcacatggcggtatcacaacgctgggtgctaatggaatgtcaatggcagttattggcccgctggccgggtatttgatatggcgtttctcctgcaagatgggaatgcgcaaagatattagcgtctttttgtgtgcttttgtcgctgatatcgtcacttatgccatgacctccattcagttgggtgttgcttttcctgatcctcaactcggtatgggggcggcgatccttaaattcatgggtattttctgcataactcagcttcccattgccgtggctgaagggttactaaccgtactgatttacgaccaactggtaaaaagacaattaattcaggctcgcagtttctgaggagaacaacaaatgaaaaagaccttgatattactgtccctcgttgcagcactgtgcattatcccgtttttcattgagcatggcggggaatttggtggagcagatggacaggcagaagctcagattatggagatagcgccggattatacaccgtggtttgaatccctctatgaacctgccagtggtgagattgaaagcctgttgtttactttacagggaagtctgggtactgccgtgattttctacatttttggttactatcaccgtaatcggaaagatcatgatcggaatagataaactcagctaccagagccgctggcgtgataaagatcccagggcgaaattcgccctgtatctcttgttcatgaccctggcaatggtgctttcgccattgtggcaggccgtattgttggtcgggcttgtgatgtttagctgctatctattgcggatcagcctgctgcgttatttgaaatggatgttaattccttgcagttttttggtattcggcctgattgctattgtgttgtccattggtattcagccggaaaaactgctttggggatttcgtatcgggcaatattggcttggtattgatatgcagggaattcagatagctaaccaaactctctggcgcagccttgctgcgctatctgcaacattctggttcatgatgaatatgccctttgaacagataatcagattactgaaattttgccgtgttcctcatttgctaatcgaacaactcctgctgacatggcgttttatttttatctttgtagaggaagcagccgcaattcatcatgcgcaatcattacggttcggttaccgcactttgcgaacgagctaccactcactggcaatgctaatcagtatgttatttgtgcgggtaatgaaccgttatcagcaaatgagcgtggcattggaactcaagctatatcaggggaatttccatttaacaataggaaaaccataaagtaaggtgaaataatatgttagaaactcgggctctgtctttcagctatcaggatgatccggtcttaaaagatctcacacttgatttcagtcgctttcaggttactggcattattggtgcaaatggctgtggcaaatccaccttatttatgaacctttccggtattctgcgcccacaaaaaggtgcagtctggtggaataacacaccgctggattacagtaaaaaaggtctgatggctctgcgccagcgtgttgtgacagtttttcaggaccccgaccaacaaattttttataccgatatcaacagcgatctcgcttttagcttgcgtaatctgggtgttgatgaaactgaaattcagcgtcgaatagaatatgcactgacacaggtagatgcacacacttttcgcaataagccaattcaatacctgagttttggtcagaaaaaaagagtcgctattgcgggtgcgctggttatggatgctgattatttattgctggatgaaccaaccgcagggcttgatccggcaggtcgccaacaaatgctagatattatccacactattgctgctgaaggtaaaaggatcattatttccagtcacgatatagatttaatttatcaaatctgcgatggcttatatgtgctggcaaatggagaaatgatcagttccggcagcactgaaaccgtgttcctgcaaaaaactcagcttgagctggctggattggtacagccgtggctggtgaaagtacatactgaaggtggtttgtctctatgcaagacagagcaacagcttttttccatgcttcgcaaaaatatccctcatcattagcgcctttagtagggatattgctataagagaagagtcgggcaatttatctaccaaagggaacctctaaaaactctcaatacaaaaaataagatcaattttgaactcaccaataactgaccttattgtgtatgactttttcttgcttgttcaggggaaaaaaacaaacgcatcactttttcatcacatctcgaaattaaaaagcatgaatacccgattttccgaaataaaccaaacgttgcaaatcatagcaggttgccttcatcgtcatcgcaaaattggctcgcagctggcctatcgtccgaataattttttcacccatctgagagagtgagccaaagatatgttctacgcgtgcccgagttttcgctattttcttatttcggcctttttggcagtgtgataagggcttattacgtgccgcttttctctgaatatgcacacgatagccctgctccttcagcacacgttcacgcttctggctggcataccctttatccgcataaatgtcccgacgggtatttgacctgtccaaaacagcttcaaaaaacgtttagagcacatggtccgag

SEQ ID NO: 1600 - DNA, 8413 bp, Xenorhabdus sp.; identical to SEQ ID NO: 1599
  CDS (6326)..(7018)

SEQ ID NO: 1601 - DNA, 8413 bp, Xenorhabdus sp.; identical to SEQ ID NO: 1599
  CDS (6058)..(6342)

SEQ ID NO: 1602 - DNA, 8413 bp, Xenorhabdus sp.; identical to SEQ ID NO: 1599
  CDS (4573)..(5310)

SEQ ID NO: 1603 - DNA, 8413 bp, Xenorhabdus sp.; identical to SEQ ID NO: 1599
  CDS (3758)..(4546)

SEQ ID NO: 1604 - DNA, 8413 bp, Xenorhabdus sp.; identical to SEQ ID NO: 1599
  CDS (3020)..(3733)

SEQ ID NO: 1605 - DNA, 8413 bp, Xenorhabdus sp.; identical to SEQ ID NO: 1599
  CDS (2235)..(2960)

SEQ ID NO: 1606 - DNA, 8413 bp, Xenorhabdus sp.; identical to SEQ ID NO: 1599
  CDS (1276)..(2241)

SEQ ID NO: 1607 - DNA, 8413 bp, Xenorhabdus sp.; identical to SEQ ID NO: 1599
  CDS (356)..(1180)

SEQ ID NO: 1608 - DNA, 8413 bp, Xenorhabdus sp.; identical to SEQ ID NO: 1599
  CDS (16)..(363)

SEQ ID NO: 1609 - DNA, 8413 bp, Xenorhabdus sp.; identical to SEQ ID NO: 1599
  CDS (5314)..(6027)

SEQ ID NO: 1610 - DNA, 9640 bp, Xenorhabdus sp.
  CDS (4)..(690)
ggcatcatttatggtgcactggtattgctgcggttttgttggttatggctgatgaaaaataccagcaaaatcctgatgaagaagaaaccactggaattctcaacctatactacgcgtgaattgctgctggcgtcgtttgcgggagtccgtggtgccattactctggctggtgctctgtccgtaccacttttcctgccggatggtgatccgttccctgcccgttatcagttgatctttatttccgcaggtgtgattcttgtttcactttttgttggcgtcattgctctgccactcttattgagaggtatgaaggtgggagacaaacaggctgatcttgatgaaatcagaatggcgaaagcagcgatggctgaagttgcgattgtcagtatgaataaaatggaagaacgcctgtctgccagcacagaagaaaaattagatgctgaagtaattagcgaagttgcttcccgggttaccggttacttacggcgccgtactgcgggcacggacgagggtgaacacagcttggaggttgaagagctggagcgccgtttccgactgacagcattacgggctgaaagaggggaactgtatcacttgcgtgcaacccgtaaagttagtaatgaaacattacagacgcttctgcatgaccttgatttgctggaagcactgttagtggataaatctcaataaatatgtggctattaacaatcacaacatttttgtgggccgcctcattcagcctgatcggtgcttatcttgccggtcaggttgatagctggttttctgtactcatcagagtagcactcgctgctctggtattcctgccattcctgcgctggcgtgggctatcgctgaaagtgatttcgttgtatatggcagtgggcgcttgccaactgggtgtgatgtacttgtttgtatttcatgcgtaccactatctgacagtggcagagtttctgctttttactgtcatgacaccgctgtatgtcacactgatctacgatttactgaagcgtcaacggctgcgttggggatatgcactcagttcgttgctggctgttgccggagctgcgattatccgttatgaccggctcagtgaatctttttggattggcttgattctggtgcaactggcaaatattttctttgccattggtcaggttggttataagcgtttgatggagaagcatccgatcccacagcgggtggctatttcgtggttctatttaggtgcctgtgttgttgcaattatcggatggttaatctttggtaacccacagaagctgccgacaacgcaattacagtggtgggttctgatctggttaggcgcaggagcctccggtattggctattttatgtggaactatggcgcaactcaggttgataccggaacactcgcaattatgaataatatgctggttccggctgggttactggttaattttgtcatttggcagcagcatccggattggctgagctttagcattggaggcagcctgattgttgcatcgctttgggtgcatcaccgctggatattgaaacccgttttacaaaaggcagactatccaccgcgtgctggcgcgcagaacgaataaatgtatcaatagctggttggtgttgctctcctttacggcaggcagcgtacaaccggctccataatccctctcccagcgtttgcgtgacaactaaaccctgtctttcaaatgtttctacggcccagtgaggcaatgctgcaatacctaagcgggctgccaccatttggatcagtaataaagtgttatcaacggttttcagggtgggagttacttcggctggctggagaaaacgtctccaaatatcaaaacgttgtcgttgaacaggataaatcagtaacgtctcaggtgcgagatcttgtggctgaatatcccgctgattggctaatggatgatccggggccaccaccaactttacctcataatcaaacagcggcgtatagtggagatcgctgtccgaaagaatatcggatgtcagtacaatatccagctccttttgttgcagggccggttgtggatcaaatgtcaccccggatttgaaatccacattaaccagcggccagctttcccggaaaagctttaatgcaggcgtgagccactgaatacagctatgacattcaatcgcaatgcgtaggttagtttcttccggctcattacactcactcagagatgctttgatcatcggtaaaatctgctcagccagcttcagtagcacttctccctgatgtgtaagttgcagcggctgacttttacgaatgaaaagtttgtatcccagacgatgctctaattcactgaattgatgtgaaagagctgattgagtttgatgcaagtgattcgcagcagctgccaatgagccacagagatttaatgcttgcaatgtttttaagtgtttaatttcgatcatgaaaaaccttcaagttgatgatgaataatttgcgcttgtggtttataccttacctgttgattatagaagtgtaaacatctagacggctaaaatttgcgggtgacgacatgacagttttaaatcatacattaggttttccacgtatcggcttgaaaagagagctaaaaaaagcacaagaaagctattgggcaggtaaaatttctcaacaagaattgctagaaacaggccgtgaattacgagcacgtcactggcaacagcaaaaagaagcaggagtagatttaattcctgtcggtgatttcgcttggtatgaccaagtattgacgaccactctgctgttggggaacgttcctccccgtcatcaaaatgaagatggaagtattgatttagatacactattccgcattgcccgtggtcgggcaccgacaggtactccggctgctgcgtcagaaatgaccaagtggtttaacactaactaccattacattgttcctgagtttcaggaagggcaagaatttaaattaggatggactcaactgctggatgaagtcgatgaagcgctagcactgggacataacgtaaaacctgtgttactggggccggtgacttatttatggcttggaaaggtaaaaggcaaagcctttgaacgcctctctttattggcggatatcctgcccgtatatcaacaggtgctgggtgaactggcaaaacgtggcatcgaatgggtacagatagatgagccggcattggtgctggaactgccagaagagtggttggcagcatttcagcctgcttatcaggcacttcagggtcagcctacttattgctgacaacctactttgatagtatcagtcataatctggcgaccattaagtcactgccggtacagggtttacatgttgatttagttgcagggcaggactcactggatgaactgcataaatctttacctgaaacattattgttatcgttaggggttgttaacggacgtaatgtctggcgggcagatttgagtgcaaaatatgaacttgtcgtgcctttactgggtaaacgagatatttgggtcggtagttcttgctcattattacacagcccgattgatctgaatgatgaaacagggctggatgaagaagttaagagctggtttgcctttgcactacagaaatgtgcggaactttctctgttatctcaggcattgaatgctccacaaggtagcaggcagtccgagctggatgattacagcgcgccaattcgtgcccgccgcagttccgcacgggtgaataatccggctgtagccgagcgccttaataagatccgtccgcaggacagcgaacgtaatcaagtttatgaggagcgcgccagactccaacgccaacgttataaactccctttgtggccgacaacaacgataggttctttccctcagacaacagagatccgcggtttacgactggatttcaagaaaggtcgcgttgatggcaatcattaccgcaccaatatcagtgaacatattaaacaggcgatcactgagcaggaacggctgggattagatgtgctggtacatggtgaagctgaacgcaatgacatggtggaatatttcggtgaacattttgacggttacgtctttacacaaaacggctgggtacaaagttatggttcccgctgtgttaaaccaccggtcattatcggagatatcagccgtccagaagcgattaccgttgattgggcaacctatgctcaatccctgacagataagccagtaaaaggcatgttaaccgggccggtaacgattctttgctggtcatttccaagggaagatatcagccgggaaacgattgccaagcagattgcactggctctgcatgatgaagtggatgatttacagaaagcgggtattggcattatccagattgatgaacccgcactgcgcgaaggcttaccgctgcgccgcgaagagtggcaggcatatctggattgggcggtggatgcctttaaactaagtgccgccattgcggaagacgagactcagatccatacccatatgtgttattgcgagttcaatgacatcatgccttccattgcagcactggatgcggatgttatcaccattgaaacatcccgctcagatatggaactgctggattcgttcgaagacttctcatatccgaatgaaatcgggcctggtgtgtatgacattcactcaccgaatgtgccgagtgttgagtggattgaagccctgttgcgtaaagcggctgaacgcattccggttgaacgtttatgggttaaccctgattgtggcctgaaaacccggggctgggcagaaacccgccagtcattggcgaatatggttgaagccgcaaaacgtctgcgtgattcggttaacagctaagttaatttaagtaagacgttaacctgcccaccataggaaaatataaatatggcgggcaggttaatttatttagtcagtaatttatttttcaataaattcatccctactgattttagatccagattttcaggtacttcaccatttggtgtaaccttatcaataagattaggcagatgttgtgaaatgagcgatgaggcttcactggggtcgatacccattttttctgctaatgtctggattgtggaagagccaaaaatagaggaaacctgatcagcatgaataggcgtattttcccccgtaccaatccacgaatgaattgtgccatccaacccttgccgggaaaactgctcaactaacccacttattcctccctgaccttcaacccagtccatgatgtgctgaatttgttggctcttaccccgactcatcatatttgaaatttgatcaaaaaagctcatcgtaatttccctcctttgttgaggttttactagggcgtgttgacgttttgttttcatcacttactcgacccacatgggtaaccagataatgataaatgccagtgctaatgtgctggcgtaatttctcgctaatttatcgtatcttgtggcgattgcacgaaaatgtttgattctggcaaatgcattttcgactaaatgacgataacgatataaatccttatcccactttttatccgaatttcggctattttttcggtagggaataaccgctgttgcaccttgttcttcaatataagttctcaatgcctgactatcgtatcccttgtcagcaacgacaaaatccgcgggcggtgattgcgccaccaaactttccgcatgcaccatgtcgtgagtttgtccctcggataattcaaaatgaacaggcaggccgtaactgtctacggccaaatggattttagtcgagcgtccaccccggctttttccaatcgcttcattttcctttgaagctgcgcctgaactgtgctgatgagcacggacaatactgccatcaataaacaaccattcagtatcagaattcttagctaattcgttgaataatgaattaaaaacacctttttttgaccagacattaaaacgcttaaagaccgtattccatttcccatattcagcaggtagttcccgccagggtatcccggttctcattcgaaaaagaataccttccatgatgaggcgatgcgtttttttatgataggtaagccgattttgttgcatgaagacaaatagcttatcccacacaggatctgataacataggtcgtggcatgatagttcgggtaacgagttttttggcgaaaataagagaccaaattatcatgccacccaattcccttcgagcaaacgtcaacacgccctaatttaaagaaaaaaagcagtactgagaggagtctcatactgcttttttagatttacctgattttagatttacaagaaatagtttcactctttttctaaggcaataacgtaatgcgaatccattttgttgtacatgagtattttgaagcgccgggcgcatatgaagactgggctaaggcgaggggataccaaaccacattttcacgggtttatcttggggaaaagttactggattcactggatgatattgattttctgatagtgatgggtgggccacaaagcccggcaaccacaatcgctgagtgtccacattttgatgcggcatcagagaagcagcttattttaaaagccatttcatcaaataaagccgttattggagtttgtcttggtgcacaattaattggtacagcactaggcgccggttttgcgaatagccctgaaaaagaaattggtaagtatccaattatgctcactgaagagggtttgaaaaataacaaatttagccattttggtgaaatgcttgaagtagggcattggcatggtgacatgccgggtttaacgccagatgcaaaaattatcgcttttagtgaaggttgccccagacagattattgaatatcaacatctggtttatgctttccagtgccatatggagctgaccacagaggtggttgaattgcttatccaaaactcagaaaaagaactgagtaaagcgaatgaatataaatttgttcagacaccagaagtattacgcactcatgattatagtgaaatgaataataaattatttgtttttctcgataagctgactgaaaaatatctcatgatgaattaatacagataaaaagcatcggttataaaattgcaccgcatattacggtgcaattgaatcgtttaattttttgttattataaacaattactcttttaaccagcctttctctcttgctgcttctaactgtggtagtaaatatttccagaattcaggataactctcagaaatgaaactgagtaaattaaaggcttgttcaaaacgaatgccgttttctacccagctttgaccgttgttatgcaggttcatcaacaccggcataactctgtcgagcattttagcaaagcatgcttccggtgtttctccgtcttcgtattcgtgccaaagtgccagaaaatgatctctttgcgattcaggcagtaaaccgaaaatacgtttagcagcttgtacctcctgctcgtggatggcttcacgggccgccaagtcaaacgcgataacatcccctgcatcgatttcgacaatatcgtggatcagtgccatctggatgactcggctgatatttacattgctggcatagggagcaaaactgataactgccagtgcaaagtgccagctatgctccgcagagttttcatgacgctcattactcaggatctttgttttgcggtatacattttttaacttgtccagttccatgatgaaggaaatgacatcggtaaatggcccaaaatcaacagcggttacagtttttgacataaaagacctcaattattatttttcttccaatgaatagggtagtgcctgtatagaaagggaggaatgttcatcctcacgaacgcggaatacactgtctgcctccatatcattattcatgacggcttgtatccagactgaatcatcagccaatctgactgaagcgagaactgtaccagtcctgcgccatttatcacctaactgccactccaaatcatcaccagccaccggcagggaagaagcgttgccagccagccagtacatagccctcttattagctccgcgatatttagcccgggctaccatttcctggccggtataacaccctttctggaaattgatactgccttcaagagcctgaagattggtggcctgcggaataaattgcgcactgttagtttcatcaataacagggaaccccgcttcaatttccagcgccagccattgtgggctattgttcatctgtgcctgagatttctctactaacgtttcagttaactgagctgcggttgcactatctgttatgagaagaaagcgttctgttggaagagagaagtggagaagggttgtggtttcatgctggataacggctgtttctgtatcaggcagtaccggaaaaaatgcagccagtgcttccctgcttcctgaacctgcgataccaagtaagatactttcttcatctttggcaaaggtgactttagagaatacagcatatttcttcaattcagccagttgagtatccaatatggaacgacgtccgatataggcaaaaccttctccgcgatgaaacagccgcagattactccacatcttacctttggcatcacagtgtgcgcataacacatgctggtttgcatccagagaatgaatatccgcagttacctgaccttgcagatatttttcggcatcagctccgattgcagtcactattgcccaatcatcaagggaaattaacgtgagggggagcgttgcggaaggcgatggggattgtgcagaaaacggaatttggtaagccataacagctcctgccataagctatctgagaaataacgttaatggtaaaagagatgaagcccaatgcaaaggggttattccggttatttttctgttgaatgtttattgttaacctgttgcgaagcttctcgcatattgtagatataaaatagaatccagggctgtaaatagtgaaaaacagtacggaatcgctgataattatgcctgaatgtgaaattttgcaatcgtgatcatttttgtaatagcggtaaacttgttaacctttcactctattcttacagccgttgtttttacaggggcaacagtaatttcttgtggtagaggttctttgcagcaatcgagtaaaagccttaccgcaccaatggcacgaatgaaaataatcaagaggctttttaaacatggatattaacaataaagcgcgtattcactgggcatgtcgtcgtggaatgcgtgagctggatatttctatcatgccattttttgaatatgaatatgattctttaagtgatgatgaaaagcatatttttgttcgtttgctggaatgtccggatcctgatctgttcaactggctaatgaatcatggtcgtccggaagatgaagcgcttttcggtatggtgcaactgatccaaagcagaaatcaggctcgtggccctgtggaacagtaaactgaggttatcccgccagacgcgatggttctcttcctgtgtacatggaatgattgcgctggctgctttattcgcaccgtggtccgctaaaaacctttatttttccatatgaaaggttaaaaccaccgactttagtcggtcagctttagctgcgatactgtgttgcacgagaggtgcaatatggattacagatatggcagccacacggtatttcagattgagtatcattttgtgtgagtactttagggca

SEQ ID NO: 1611 - DNA, 9640 bp, Xenorhabdus sp.; identical to SEQ ID NO: 1610
  CDS (693)..(1592)

SEQ ID NO: 1612 - DNA, 9640 bp, Xenorhabdus sp.; identical to SEQ ID NO: 1610
  CDS (2541)..(3260)

SEQ ID NO: 1613 - DNA, 9640 bp, Xenorhabdus sp.; identical to SEQ ID NO: 1610
  CDS (3983)..(4819)

SEQ ID NO: 1614 - DNA, 9640 bp, Xenorhabdus sp.; identical to SEQ ID NO: 1610
  CDS (6300)..(7022)

SEQ ID NO: 1615 - DNA, 9640 bp, Xenorhabdus sp.; identical to SEQ ID NO: 1610
  CDS (9124)..(9390)

SEQ ID NO: 1616 - DNA, 9640 bp, Xenorhabdus sp.
  CDS (7208)..(8164)
tgccctaaagtactcacacaaaatgatactcaatctgaaataccgtgtggctgccatatctgtaatccatattgcacctctcgtgcaacacagtatcgcagctaaagctgaccgactaaagtcggtggttttaacctttcatatggaaaaataaaggtttttagcggaccacggtgcgaataaagcagccagcgcaatcattccatgtacacaggaagagaaccatcgcgtctggcgggataacctcagtttactgttccacagggccacgagcctgatttctgctttggatcagttgcaccataccgaaaagcgcttcatcttccggacgaccatgattcattagccagttgaacagatcaggatccggacattccagcaaacgaacaaaaatatgcttttcatcatcacttaaagaatcatattcatattcaaaaaatggcatgatagaaatatccagctcacgcattccacgacgacatgcccagtgaatacgcgctttattgttaatatccatgtttaaaaagcctcttgattattttcattcgtgccattggtgcggtaaggcttttactcgattgctgcaaagaacctctaccacaagaaattactgttgcccctgtaaaaacaacggctgtaagaatagagtgaaaggttaacaagtttaccgctattacaaaaatgatcacgattgcaaaatttcacattcaggcataattatcagcgattccgtactgtttttcactatttacagccctggattctattttatatctacaatatgcgagaagcttcgcaacaggttaacaataaacattcaacagaaaaataaccggaataacccctttgcattgggcttcatctcttttaccattaacgttatttctcagatagcttatggcaggagctgttatggcttaccaaattccgttttctgcacaatccccatcgccttccgcaacgctccccctcacgttaatttcccttgatgattgggcaatagtgactgcaatcggagctgatgccgaaaaatatctgcaaggtcaggtaactgcggatattcattctctggatgcaaaccagcatgtgttatgcgcacactgtgatgccaaaggtaagatgtggagtaatctgcggctgtttcatcgcggagaaggttttgcctatatcggacgtcgttccatattggatactcaactggctgaattgaagaaatatgctgtattctctaaagtcacctttgccaaagatgaagaaagtatcttacttggtatcgcaggttcaggaagcagggaagcactggctgcattttttccggtactgcctgatacagaaacagccgttatccagcatgaaaccacaacccttctccacttctctcttccaacagaacgctttcttctcataacagatagtgcaaccgcagctcagttaactgaaacgttagtagagaaatctcaggcacagatgaacaatagcccacaatggctggcgctggaaattgaagcggggttccctgttattgatgaaactaacagtgcgcaatttattccgcaggccaccaatcttcaggctcttgaaggcagtatcaatttccagaaagggtgttataccggccaggaaatggtagcccgggctaaatatcgcggagctaataagagggctatgtactggctggctggcaacgcttcttccctgccggtggctggtgatgatttggagtggcagttaggtgataaatggcgcaggactggtacagttctcgcttcagtcagattggctgatgattcagtctggatacaagccgtcatgaataatgatatggaggcagacagtgtattccgcgttcgtgaggatgaacattcctccctttctatacaggcactaccctattcattggaagaaaaataataattgaggtcttttatgtcaaaaactgtaaccgctgttgattttgggccatttaccgatgtcatttccttcatcatggaactggacaagttaaaaaatgtataccgcaaaacaaagatcctgagtaatgagcgtcatgaaaactctgcggagcatagctggcactttgcactggcagttatcagttttgctccctatgccagcaatgtaaatatcagccgagtcatccagatggcactgatccacgatattgtcgaaatcgatgcaggggatgttatcgcgtttgacttggcggcccgtgaagccatccacgagcaggaggtacaagctgctaaacgtattttcggtttactgcctgaatcgcaaagagatcattttctggcactttggcacgaatacgaagacggagaaacaccggaagcatgctttgctaaaatgctcgacagagttatgccggtgttgatgaacctgcataacaacggtcaaagctgggtagaaaacggcattcgttttgaacaagcctttaatttactcagtttcatttctgagagttatcctgaattctggaaatatttactaccacagttagaagcagcaagagagaaaggctggttaaaagagtaattgtttataataacaaaaaattaaacgattcaattgcaccgtaatatgcggtgcaattttataaccgatgctttttatctgtattaattcatcatgagatatttttcagtcagcttatcgagaaaaacaaataatttattattcatttcactataatcatgagtgcgtaatacttctggtgtctgaacaaatttatattcattcgctttactcagttctttttctgagttttggataagcaattcaaccacctctgtggtcagctccatatggcactggaaagcataaaccagatgttgatattcaataatctgtctggggcaaccttcactaaaagcgataatttttgcatctggcgttaaacccggcatgtcaccatgccaatgccctacttcaagcatttcaccaaaatggctaaatttgttatttttcaaaccctcttcagtgagcataattggatacttaccaatttctttttcagggctattcgcaaaaccggcgcctagtgctgtaccaattaattgtgcaccaagacaaactccaataacggctttatttgatgaaatggcttttaaaataagctgcttctctgatgccgcatcaaaatgtggacactcagcgattgtggttgccgggctttgtggcccacccatcactatcagaaaatcaatatcatccagtgaatccagtaacttttccccaagataaacccgtgaaaatgtggtttggtatcccctcgccttagcccagtcttcatatgcgcccggcgcttcaaaatactcatgtacaacaaaatggattcgcattacgttattgccttagaaaaagagtgaaactatttcttgtaaatctaaaatcaggtaaatctaaaaaagcagtatgagactcctctcagtactgctttttttctttaaattagggcgtgttgacgtttgctcgaagggaattgggtggcatgataatttggtctcttattttcgccaaaaaactcgttacccgaactatcatgccacgacctatgttatcagatcctgtgtgggataagctatttgtcttcatgcaacaaaatcggcttacctatcataaaaaaacgcatcgcctcatcatggaaggtattctttttcgaatgagaaccgggataccctggcgggaactacctgctgaatatgggaaatggaatacggtctttaagcgttttaatgtctggtcaaaaaaaggtgtttttaattcattattcaacgaattagctaagaattctgatactgaatggttgtttattgatggcagtattgtccgtgctcatcagcacagttcaggcgcagcttcaaaggaaaatgaagcgattggaaaaagccggggtggacgctcgactaaaatccatttggccgtagacagttacggcctgcctgttcattttgaattatccgagggacaaactcacgacatggtgcatgcggaaagtttggtggcgcaatcaccgcccgcggattttgtcgttgctgacaagggatacgatagtcaggcattgagaacttatattgaagaacaaggtgcaacagcggttattccctaccgaaaaaatagccgaaattcggataaaaagtgggataaggatttatatcgttatcgtcatttagtcgaaaatgcatttgccagaatcaaacattttcgtgcaatcgccacaagatacgataaattagcgagaaattacgccagcacattagcactggcatttatcattatctggttacccatgtgggtcgagtaagtgatgaaaacaaaacgtcaacacgccctagtaaaacctcaacaaaggagggaaattacgatgagcttttttgatcaaatttcaaatatgatgagtcggggtaagagccaacaaattcagcacatcatggactgggttgaaggtcagggaggaataagtgggttagttgagcagttttcccggcaagggttggatggcacaattcattcgtggattggtacgggggaaaatacgcctattcatgctgatcaggtttcctctatttttggctcttccacaatccagacattagcagaaaaaatgggtatcgaccccagtgaagcctcatcgctcatttcacaacatctgcctaatcttattgataaggttacaccaaatggtgaagtacctgaaaatctggatctaaaatcagtagggatgaatttattgaaaaataaattactgactaaataaattaacctgcccgccatatttatattttcctatggtgggcaggttaacgtcttacttaaattaacttagctgttaaccgaatcacgcagacgttttgcggcttcaaccatattcgccaatgactggcgggtttctgcccagccccgggttttcaggccacaatcagggttaacccataaacgttcaaccggaatgcgttcagccgctttacgcaacagggcttcaatccactcaacactcggcacattcggtgagtgaatgtcatacacaccaggcccgatttcattcggatatgagaagtcttcgaacgaatccagcagttccatatctgagcgggatgtttcaatggtgataacatccgcatccagtgctgcaatggaaggcatgatgtcattgaactcgcaataacacatatgggtatggatctgagtctcgtcttccgcaatggcggcacttagtttaaaggcatccaccgcccaatccagatatgcctgccactcttcgcggcgcagcggtaagccttcgcgcagtgcgggttcatcaatctggataatgccaatacccgctttctgtaaatcatccacttcatcatgcagagccagtgcaatctgcttggcaatcgtttcccggctgatatcttcccttggaaatgaccagcaaagaatcgttaccggcccggttaacatgccttttactggcttatctgtcagggattgagcataggttgcccaatcaacggtaatcgcttctggacggctgatatctccgataatgaccggtggtttaacacagcgggaaccataactttgtacccagccgttttgtgtaaagacgtaaccgtcaaaatgttcaccgaaatattccaccatgtcattgcgttcagcttcaccatgtaccagcacatctaatcccagccgttcctgctcagtgatcgcctgtttaatatgttcactgatattggtgcggtaatgattgccatcaacgcgacctttcttgaaatccagtcgtaaaccgcggatctctgttgtctgagggaaagaacctatcgttgttgtcggccacaaagggagtttataacgttggcgttggagtctggcgcgctcctcataaacttgattacgttcgctgtcctgcggacggatcttattaaggcgctcggctacagccggattattcacccgtgcggaactgcggcgggcacgaattggcgcgctgtaatcatccagctcggactgcctgctaccttgtggagcattcaatgcctgagataacagagaaagttccgcacatttctgtagtgcaaaggcaaaccagctcttaacttcttcatccagccctgtttcatcattcagatcaatcgggctgtgtaataatgagcaagaactaccgacccaaatatctcgtttacccagtaaaggcacgacaagttcatattttgcactcaaatctgcccgccagacattacgtccgttaacaacccctaacgataacaataatgtttcaggtaaagatttatgcagttcatccagtgagtcctgccctgcaactaaatcaacatgtaaaccctgtaccggcagtgacttaatggtcgccagattatgactgatactatcaaagtaggttgtcagcaataagtaggctgaccctgaagtgcctgataagcaggctgaaatgctgccaaccactcttctggcagttccagcaccaatgccggctcatctatctgtacccattcgatgccacgttttgccagttcacccagcacctgttgatatacgggcaggatatccgccaataaagagaggcgttcaaaggctttgccttttacctttccaagccataaataagtcaccggccccagtaacacaggttttacgttatgtcccagtgctagcgcttcatcgacttcatccagcagttgagtccatcctaatttaaattcttgcccttcctgaaactcaggaacaatgtaatggtagttagtgttaaaccacttggtcatttctgacgcagcagccggagtacctgtcggtgcccgaccacgggcaatgcggaatagtgtatctaaatcaatacttccatcttcattttgatgacggggaggaacgttccccaacagcagagtggtcgtcaatacttggtcataccaagcgaaatcaccgacaggaattaaatctactcctgcttctttttgctgttgccagtgacgtgctcgtaattcacggcctgtttctagcaattcttgttgagaaattttacctgcccaatagctttcttgtgctttttttagctctcttttcaagccgatacgtggaaaacctaatgtatgatttaaaactgtcatgtcgtcacccgcaaattttagccgtctagatgtttacacttctataatcaacaggtaaggtataaaccacaagcgcaaattattcatcatcaacttgaaggtttttcatgatcgaaattaaacacttaaaaacattgcaagcattaaatctctgtggctcattggcagctgctgcgaatcacttgcatcaaactcaatcagctctttcacatcaattcagtgaattagagcatcgtctgggatacaaacttttcattcgtaaaagtcagccgctgcaacttacacatcagggagaagtgctactgaagctggctgagcagattttaccgatgatcaaagcatctctgagtgagtgtaatgagccggaagaaactaacctacgcattgcgattgaatgtcatagctgtattcagtggctcacgcctgcattaaagcttttccgggaaagctggccgctggttaatgtggatttcaaatccggggtgacatttgatccacaaccggccctgcaacaaaaggagctggatattgtactgacatccgatattctttcggacagcgatctccactatacgccgctgtttgattatgaggtaaagttggtggtggccccggatcatccattagccaatcagcgggatattcagccacaagatctcgcacctgagacgttactgatttatcctgttcaacgacaacgttttgatatttggagacgttttctccagccagccgaagtaactcccaccctgaaaaccgttgataacactttattactgatccaaatggtggcagcccgcttaggtattgcagcattgcctcactgggccgtagaaacatttgaaagacagggtttagttgtcacgcaaacgctgggagagggattatggagccggttgtacgctgcctgccgtaaaggagagcaacaccaaccagctattgatacatttattcgttctgcgcgccagcacgcggtggatagtctgccttttgtaaaacgggtttcaatatccagcggtgatgcacccaaagcgatgcaacaatcaggctgcctccaatgctaaagctcagccaatccggatgctgctgccaaatgacaaaattaaccagtaacccagccggaaccagcatattattcataattgcgagtgttccggtatcaacctgagttgcgccatagttccacataaaatagccaataccggaggctcctgcgcctaaccagatcagaacccaccactgtaattgcgttgtcggcagcttctgtgggttaccaaagattaaccatccgataattgcaacaacacaggcacctaaatagaaccacgaaatagccacccgctgtgggatcggatgcttctccatcaaacgcttataaccaacctgaccaatggcaaagaaaatatttgccagttgcaccagaatcaagccaatccaaaaagattcactgagccggtcataacggataatcgcagctccggcaacagccagcaacgaactgagtgcatatccccaacgcagccgttgacgcttcagtaaatcgtagatcagtgtgacatacagcggtgtcatgacagtaaaaagcagaaactctgccactgtcagatagtggtacgcatgaaatacaaacaagtacatcacacccagttggcaagcgcccactgccatatacaacgaaatcactttcagcgatagcccacgccagcgcaggaatggcaggaataccagagcagcgagtgctactctgatgagtacagaaaaccagctatcaacctgaccggcaagataagcaccgatcaggctgaatgaggcggcccacaaaaatgttgtgattgttaatagccacatatttattgagatttatccactaacagtgcttccagcaaatcaaggtcatgcagaagcgtctgtaatgtttcattactaactttacgggttgcacgcaagtgatacagttcccctctttcagcccgtaatgctgtcagtcggaaacggcgctccagctcttcaacctccaagctgtgttcaccctcgtccgtgcccgcagtacggcgccgtaagtaaccggtaacccgggaagcaacttcgctaattacttcagcatctaatttttcttctgtgctggcagacaggcgttcttccattttattcatactgacaatcgcaacttcagccatcgctgctttcgccattctgatttcatcaagatcagcctgtttgtctcccaccttcatacctctcaataagagtggcagagcaatgacgccaacaaaaagtgaaacaagaatcacacctgcggaaataaagatcaactgataacgggcagggaacggatcaccatccggcaggaaaagtggtacggacagagcaccagccagagtaatggcaccacggactcccgcaaacgacgccagcagcaattcacgcgtagtataggttgagaattccagtggtttcttcttcatcaggattttgctggtatttttcatcagccataaccaacaaaaccgcagcaataccagtgcaccataaatgatgcc

SEQ ID NO: 1617 - DNA, 9640 bp, Xenorhabdus sp.; identical to SEQ ID NO: 1616
  CDS (4358)..(4756)

SEQ ID NO: 1618 - DNA, 9640 bp, Xenorhabdus sp.; identical to SEQ ID NO: 1616
  CDS (3548)..(4303)

SEQ ID NO: 1619 - DNA, 9640 bp, Xenorhabdus sp.; identical to SEQ ID NO: 1616
  CDS (1954)..(2535)

SEQ ID NO: 1620 - DNA, 9640 bp, Xenorhabdus sp.; identical to SEQ ID NO: 1616
  CDS (928)..(1911)

SEQ ID NO: 1621 - DNA, 793 bp, Xenorhabdus sp.
  CDS (399)..(791)
tgctctaaagcaggaggatggccgtcgcagcatcgtcgagatcacgccgctcggcaccagcctgctgcatgaaatgcgccgcaccaagatgagcgtcatcgaggatgtgatggagggatggccggccgacgatgtggagactttcgcacgcctgttcgagcggttcatcgaccgtttcgaataccggctctccccggatacggacttcttcacggatcagaaaaaatcatagctgccccggcgatctgcaacttcactttaaaacaacgaaaccgtaacgtgccgcgcatcgaactggtcaaggggtaatttcgatgttgacgatttacggtgtctaccgctcccgcgccacgcgcacactgtggctggcaggggaactgggcatagaattcaggcatgtgccggtcatacaggcccgccgccttgccgatccgctggcagcggacgcgccgctcaacacgctgtcgccagcgttcctcgccgtcaacccgatgggcaccattccctgcatcgaggatgacggcatggtgctttacgaatccatggccatcaatctctacctggcgcgcaaatatggcgggccgctcgccccggtcgatctgaaggaagatgcggcgatgctgcaatggtctttctttgccgcgaccgaaatcgagaccaattcgctgaaaatttcctccgccatcgccgaaggcctgtcggaaagcgacagcggcaaagcggtgatcgatgtcgccgcccgtctgctgaagcgccccttccgggtgctggagcaacatctttccagccaggc

SEQ ID NO: 1622 - DNA, 793 bp, Xenorhabdus sp.; identical to SEQ ID NO: 1621
  CDS (2)..(232)

SEQ ID NO: 1623 - DNA, 9731 bp, Xenorhabdus sp.; identical to SEQ ID NO: 194
  CDS (7992)..(8987)

SEQ ID NO: 1624 - DNA, 9731 bp, Xenorhabdus sp.; identical to SEQ ID NO: 194
  CDS (7677)..(7931)

SEQ ID NO: 1625 - DNA, 9731 bp, Xenorhabdus sp.; identical to SEQ ID NO: 194
  CDS (4983)..(5282)

SEQ ID NO: 1626 - DNA, 9731 bp, Xenorhabdus sp.; identical to SEQ ID NO: 194
  CDS (4117)..(4857)

SEQ ID NO: 1627 - DNA, 9731 bp, Xenorhabdus sp.; identical to SEQ ID NO: 194
  CDS (2166)..(2591)

SEQ ID NO: 1628 - DNA, 9731 bp, Xenorhabdus sp.; identical to SEQ ID NO: 194
  CDS (1479)..(2135)

SEQ ID NO: 1629 - DNA, 9731 bp, Xenorhabdus sp.; identical to SEQ ID NO: 194
  CDS (344)..(1429)

SEQ ID NO: 1630 - DNA, 9731 bp, Xenorhabdus sp.; identical to SEQ ID NO: 194
  CDS (1)..(282)

SEQ ID NO: 1631 - DNA, 10589 bp, Xenorhabdus sp.
  CDS (7816)..(10551)
tgctccatccatgtgctctaaagaactgaaaaccatcgccgggttagccacgcagatggacacacaaattcatacggttatcccgccgctggcacaagtgcgctatcccttatcatttgcgcaggagcgcatgctgtttatcgagcagtttgagcagggctctgatgtctatcatattccgtatctggttcagttaactcaggatacttcgctgactgtactggaagccgccattaaccgattagcggaacgtcatgcggtgctgagcaccgtgtatcgcagtgatgatcagagccagcagtatcagcaggtattagacacacatttcgtgatcccgtctcaaatttgtgacgacagggagacgttactggctaacgcccgcagcgaaatcgctactccctttgatttaaccacggagccgagcctgcgtttgcggcattatcaggtcgcagaccgtcactacctcttactgttatggcaccatatcgcgatggatggctggtccatcgatatctttatggcggaactggcggaggtttaccactcgctgcaagcaggccgtgacagccagctccctgcgctggatatcacctacggggattacgcggcatggcaacgggattatttgcagggagacatccgcgaacaacaactggcttactggcaacagacgctggcgggttatgaatcgctggcgctgcccaccgatcaccccagaccggcacaggtcaattatcaggggcgggatatcaattttacgctggacgcacagctgtctgaacagctacgtgctctggcaaaaacacaggaaaccaccctgtataccgtgctgctcagtgcgttttacgtcacactggcaaaattatccgggcaggacgatatcgttatcggcaccccgacggataaccgtcaccatgcgcaaacactgcccttattagggatgttcgttaacacactgcccttacgggcacaactgcaacacactgacagcgtgacggcgctgattacacaagtacacaaactggttagcggtgccaaagcccatcaggatatgccgtttgagcaactgattgaagccctgaacattgagcgggataccgcccgtcatccgctctttcaggtgatgttcagcgtgcaggctttcggtgagaatccgtcagacggcaatctgccgtttagcccagtcgtactggatgaaacgttatacagccccgccaaatttgacctgagcctgtttttgtccgatggcaaaacggcaattaccggttgtctgaactacgctcttagcctgtttaatgacaccagcatcacccgtatcgcggagagttaccagcgggtattgagcgcgtttgtcgccgaccagcaacaaccgttatccagtattgatattttatcagcacaggaacgtcataccttattgcaccgctggaaccagaccgatgccccttatccgcaggataaaaccctgccacagttgtttgaagcgcaggcgacagccaatccagataacattgcgctggtgtttgaaggcgaatctctgacctatcaccagcttaatgaacgggcaaaccaactggcacgtgtgatccgtgaacgttatcaacaacagcataatgtaccgatgccaacagatacgttgatcgctctctatctggatcgcagcccggaaatggtcattagtatactggcagtactcaaagccggcggggcttatgtaccggtatcaccggattatccgccggagcggattcagtttattctggacgatacgcagtcaccctgtgtggtgactcagcaaaaatttctgccgacattggaggcttatacacaggcactcgtgacaccatcagccctgattgccgcagatgacaggcgtgttactgaaaactattcaacagaaaatctggcattagccggtcaagcggcaaatttagcctatgttatctatacctccggcacgaccgggaaacccaaaggcgtcttgcagacccaccataatgtcaaccgcttattcaccactagccaaaaagattaccagttcgatcaacacgatgtctgggtgcttttccatgcgtatacgtttgatttcagtgtgtgggaattatggggcgccctgctctatggcgggcgtttaattatccctacggttgagtgcattaaggattttagccaattcagccggttatgcgccgaacagaatgtgacggtactgaaccaaacgccgggggcattttatgcctttatcgacgaagcagtaagcaacagtacagagtttcctcaccttcgctatataatatttggtggcgataaattaaatccggttcagttaacaccctggtgggatcgttatggcgatcaaaaaccggcgctcatcaatatgtatgggatcaccgaaaccaccgtccatgtaacctacaaaaaattaacgcaaggagataccactgcgatatcccgcattggccgtcccctgagcgacatgtctgcctacgtactgaatactgccggacaactggctcctataggtgccaccggcgaactttacattggtggcgcagggctggcacagggctatttaaaccgaccggaattaaccgccgaacgttttatcgaaaacccgtttgccacagagaagaacaaagaacagggttacacacgcctgtataaaaccggtgatttagcgcgctggctccccgacggcgagctggaatatctgggacgcaatgattttcaggtcaaaattcgcggctaccgcattgaactgggcgaaattgaaagtgcgctggcggaacatcccctgattaaacaagctgttgtcatcgatcgcgactatcagggcaataccgcactaatcgcctatctggtgattgagggggaactttctgacgaagggttaatccgccatttatcttctcgcctgccggactatatgttgcctgccagttttacccggattaaggcgatcccgctgacattgaacggtaaagtggatcgtcaggctttacccgaaccgaactggagcaataaagagggttatgttgcaccccgcaatacactggaaactcagctttgcgctatctggcaggatgttttagcactggaacgggtcggtattgacgataatttcttccgtatcggcggcaattccctgaccgctattaagctgattgccgccattcgccgtaccctgtctatcgatatttcactggcacaactgtttgaattaaagaccatcgcagggttagccacacagatggatgaacaaatttgtacggttatcccaccgctggcacaagcgcgctatcccttatcatttgcgcaggagcgcatgctgtttatcgagcagtttgagcagggttccgatgtctatcatatcccgtatctggttcagttggctcaggaggcttccctgcctgtactggaagccgccattaaccgattagcggaacgtcattcagtgctgagaaccgtgtatcgcagtgatgatcagagccagcagtatcagcaggtattggagaagcatttcgttatcccgtctcaaatttgtgacgacagggagacgttactggctaacgctcgcagcgagatcgctactccctttgatttaaccacagagccgagcctgcgtttgcggcattatcaggtcgcagaccgtcactacctcttactgttatggcaccatatcgcgatggatggctggtccatcgatatctttatggcggaactggcggaggtttaccacgcactgcaagcaggccgtgacagccagctccctgcgctggatatcacctacggggattacgcggcatggcaacgggactatttacagggaaacatccgcgaacaacaactggcttactggcaacaagcactggcgggctatgaatcgctgtcactgcccaccgatcactccagaccggcacaggtcaattatcaggggcgggatatcaattttacgctggacgcacagctgtctgaacagttaagggagttagcaaaaacgcaggaaaccaccctgtataccgtactgctcagtgcgttttacgtcacactggcaaaattatccgggcaggacgatatcgttatcggcaccccgacggataaccgtcaccatgcacaaacactgcccttattagggatgttcgttaacacactgcccttacgggcacaactgcaacacactgacagtgtaaccacgctgattacacaggcacacaaactggttagcggggctaaagcccatcaggatatgccgtttgagcagttgcttgaggcactgaacattgaacgggataccgctcgtcacccggtatttcaggtgatattcagtgtgcaggctttcggtgaaaatccgtcagacggcaatctgccgtttagcccggtggcactggatgaagctctatacagccccgccaaatttgacctgagcctgtttttgtccgatggcaaaacagcgattaccggttgcctgaactacgccgtgagcctgtttaacgacaccagcattacccgtatcgcagagagttaccaacgggtattgagcgcgtttgtggccgaccagcaacaagcgttgtccagtattgatattttatcggtacaggaacgccataccttattgcaccgctggaaccagactgacaccccttatccgcaggataaaaccttgtcacagttgtttgaagcacaggtggcaagaacaccggatcatgttgcactggtgtttgaaggtgaatccctgacttatcaccagcttaatcagcgcgccaatcaactggcccatgccatacgcgaacgttatcagcaacagcatcatcaaacgatgcaagctgatacaccgatagccttgtattttgaccgcagtccggaaatggtcatcagtatgctggcggtgctgaaagccggaggcgcttatgtgccaatatcaccggaatatcccacagagcgggtacaatttattctgacagacaccgcgacgccttgtgttctgacccaacaacactatctgaccacgctccggccactggctgggtcatcgatccttatcgcggcagataatcaggcagacacagtcagccagcctgtggaaaaccccgattccatcagtaaaccgaccgatctggcctatatcatctatacctccggcaccaccggtcagcctaaaggagtgatggttgaacataaaaatgtggcgcatctgacagccgctcaaagtgcattttttgatactgaaaagaccactaaaagtttaatgtttgccgcttatgtgtttgatgcttttgttttcgaactctttcccgcgttattgaatggcctgacgctttatctttgcaatgaagcagaacgccatgcccctgcaatcgcacagctcattcaacgggaaggtattcaaatggcgactctaccgccagcaatactcaaattgttgacggatgtggaattaccctcactccaattattggttaccgcaggtgaatccccttctctggattttatggatcatttcagccaacacagtaatgtgatgaatgcttacggtccgacagaaatcaccgtttgtgcaacacagaaacggtatcaacatggagatatcgccaccaatattggtcaagctattaataacgttcgtctttacatccttgatagtgatggaaatccatcgcctatcggtacgccgggtgagttgtatattggtggtgctggtgtcgcacggggttacttaaatcgccctgaattaacggctgagcgctttgttgctaatccttttgcaaccgcaaacgaaacggttaaaggttacacccgtttgtataaaaccggtgatttagtacgctggttacctaacggcgaactggaatatctgggacgtaatgattttcaggtcaaaattcgcggttatcgtattgaactgggagaaattgaaagtgcgctgacggctcatccacaggtcaaacaagccgtagtgattgatcgtgaacatcagggtcataaagtgctggcagcctatctggttgtcgaggatacggtgtccgataacatactacttgcgcacttatctgctcgcctgccggactacatgctgcccgccagctttacctttatggaggctataccactaacgctgaatggcaaagtggaccgcaaagccttgccagagccggttttcgggaacagagaaaattatgttgcgccccgtaatgccttagaaacccagctttgtgctatttggcaggcagttttagggctggagcggataagcatccacgataatttcttccgcattgggggtgactccattattagtctccagctggtgtccaaactgcgtcaggccggtttttcgcttcaggtgaaaaccatttttgaggcaccaaccgtggcacaattagcggtattactgatgcaaacagcgtctactgccaaaatcgttgccgaacaagggttattaaacggggagtttgctttactgcctgttcagcaaaccttctttgactggcagttagctcagcctcatcactggaatcaggcctttatggttcagatccccggtgatatccaagtcatacagattgaacaagcactgactgcattaactgagcggcacgatatattacacgcccgctttattgcaacggaacagggatatcgccagtgttattctgcggatattccgtcttcacaaccgcagctaaaacactgtgatatccgtcagtgcaatcaggaagaactccaccaacaacttacccagtggcaaagtgggttcgattatcataacgggccactctggcaagcagctcatctgactggctatgctgatggcagtacccggttattctttgccttccatcatctgattattgatgcggtgtcctggcggattattgcggaagatatgcgtttgctattacaggggatgcccctgcctgcaaaaaccagcagttatcgccaatgggtgaccactgttcagcagtacgcccggcagcatcaacatgaagtgccttactggaaacaagtactgacaggcaataacagcaagcccgcgttggataatctcacacaccaccagctggaaatctcggcagaaatgacagatatcctgctgcatgaagctaacgcaggttatcacaccgaaattaatgacttgttgttgagcgcgttgaccgtggccttgcaggataccttcgaccaatctgtcaaccatatccttctggaaggacacgggcgggaatcgattgataacacaatagatatttccgaaaccgttggctggtttactacgatatacccggttcgtctggaaaataaggcggatataaccgacacccttatccataccaaagagatgctgcgcactgtgccaaacaaaggcatcggttacggcgcattacaacaagcgggttatctgaccggtgatttgcctgctatcagtttcaactatctggggcagttaggcagtcccagccgtcaggactggtcaattactgacgatgattgcggaacgatgataacgagcgaaaacggcggtcattttctgttaggaattaatggctccgttcaagccggaaaactactgttttatgtcgattcccgtctgccaaagactaagacagccctgtttatccgggcatttgagcaggcactcaatcacatcattaccacagcgcaaaaacagtcacaaacgggagaaataatgactcccagtgattacggtatcaagggtgtttcgctggagcaattcaaccagataactcaccattttgaacataccaatcatgtcagttcaccccacgactctgaaaatgaaactactttggatttatagaaatgttgacgctatttaaagaacttaacaaaaatcaggcatcagtatgggtttatgaaaataagttgaaactgacattcacagggggaactccccctgatcaacttattgatcaagttaaacagaaaaaagaaaacattcttaattttttaaatgaaaaaaatatcttctcagtagaagactttaggcgttttatttcccttgaaaattcatctggtgtgcctgcgacttcatccaacaacaaaaaaattgaggctatttttcctgccaccagcttgcaacaagggtttgtctatcattatctttctcagccacaggatgatgcttatcgcgtacaactgctattggattaccacacctctattgatattgacgcttaccaacaagcctggacactggcttcgcgccgtttcccgatcctcagaaccgcttttgactgggaaggcgaaatattacaaatcgtcacaactggtgccagtattgatgcgacaaatttcagatacgaagacattaccgaattatcagaagaagaaaaaaacagggcgattgatacgcttcaacaaaatgatctcaccctgccatttgatttacgtcagaccggattagcgcgctttaccctgattaaacaacgtcaacaattgattaccgttgttatcaccctacaccacagcatcattgatggctggagctacccggttttattgcaaaccgtccatggctattacaacgcactcgtacagggccacacgcctgaaatcgttgtagataacgcttatctgaacgcccagcaatattaccgcaatcatcaggccgatacggatatttattggtctgagcgcaaggcccaatggcaggatacgaatgatttatcggcgctgctaagccaccgggttgacttaacccagataaaagcgattgagaaaccggctgaacaactactcactgtgcagggtaacgcttatgagcagcttaaaaacacctgccggatacacgggataacgctgaatgtcgcgctgcaatttgcctggcataaactgttacacatttacaccgctgatgagcagacgattgtcggcacaaccgtctccggtcgggatatccccgttgaagggatcgaatccagtgtcggtctttatatcaataccctgcctctggcggtgcagtggaaacaaaccgacagcgtcgtcaccgttttacaacatatccagaaaaatatcgccgacctcaacagccatagtgccgtttctctcgccagtctgcaatctgacggagaacggttatttcacagcctgttagtgtttgaaaattaccctgctccggtggcagacgagaaccagaccggcatcgaacagacactgacatttcgccgcgcagtagaaaaagtggattatccgttgtcattgatcgcgtatgagcaagataaccgtttagtcatcaaatttaattatggaaaagactggctggaagacgaacaggcattacgcttgctgaggcaacttgaacgtattttgcatgcggttgcctgtcatccggaacagtctcataccgctatcacctgtctcagtgaggcagagcgtcatactttgctgcacagctggaaccagaccgatgcgccttatccgcaggataaaaccctgccacagttgtttgaagcgcaggcggctcaacaccctgatgccattgccgtggaatttgaagaacaggtattgagctatggggaacttaactgccgcgccaatcgtctggctcactatctgatgacgctgggggtaggccctgacgaacgtgttgccatttgtgttgaacgcagcccggagatggtggtgggcttactcgccattcttaaagcgggcggggcttatgtaccactcgaccccgcccttccggacgagcgactggctcacatgcttagagattcggcccccgtggctctacttacccagtctacttttgcacaggctctggaggctgctctcccctcggccagtcataccgtattactcgataaacagccggcttatctcaccaacctgccggctcataatccggctgctccggcactggcgcctcaccatctggcctatgtgatctacacctccggctccactggcttacccaaaggggtggaaatgccgcagtccgcgttatcaaacctgctacactggcatcaccatacgcctgaacactccacgaccgccggtaaaaccctgcaatttgcagcactgggctttgatgttgcgtttcaggaaatctttaccacgctgtgtgaaggcggctgtctggtgctgattcatgactccctccgccgggatccccaacagcttcttaaactggttcagcaacaacagattgagcgactctttctgccttatgttgctctccagcattttgccgaggccgtcaatctgagcgaagaagacgatctttcctgcctgaagcatattattaccgccggtgaacaattacgtatcacccccgccattcagcgtctactgcgacgcgcgcgtcactaccggttacataaccactacggcccgacagaaagtcacgtggtaacgtcatacacgctggacaacgagactgagcactggccaacgttaccgccgatcgggcgcccgatagccaacacgcaaatctatattcttgacccgcatggtcagccggtaccgtggggaagtcaccggcgaaatttatatcgccggaaaaggcgttgcccgcgggtatctcaatcgtcctgaattaacggctgaacgtttcctgctctaaagcttagagc

SEQ ID NO: 1632 - DNA, 10589 bp, Xenorhabdus sp.; identical to SEQ ID NO: 1631
  CDS (2)..(7813)

SEQ ID NO: 1633 - DNA, 9655 bp, Xenorhabdus sp.; identical to SEQ ID NO: 66
  CDS (3948)..(4463)

SEQ ID NO: 1634 - DNA, 9655 bp, Xenorhabdus sp.; identical to SEQ ID NO: 66
  CDS (6848)..(8917)

SEQ ID NO: 1635 - DNA, 9655 bp, Xenorhabdus sp.
  CDS (8844)..(9650)
agtgtgctctagactactaggtctatctggtttttcactcgctcccaccaagcgattgttctgacttttttcaggatatctatcagatattgatctctcataaaaccccctatcttatgattatgctgcaataattatacgtttcatttaccacagtgtttatgacaatcacctttatttctattatgttgtcattaaaataattggtaaatggtgcattttcacgaaggtattaatatggaattaacaacccgtacactgactgaatccaaaagtattgctctgattgcacatgatcactgtaaacaatctcttctgtcttgggtcaatgaacataaacgtgtattagaacaaaacaggctctatgccacaggtacgaccggaaacttgcttcaacaacaaacgggcttaccgattaccagcctattaagtgggccgatgggaggtgatcaacagattggtgcattgatttctgaaggaaaaattgatgttctaatctttttttgggatcctctgaatgccgttcctcacgaccccgatgtcaaggcactgttacgtctggccacagtctggaatatccctgtagcaaccaatcgaacaactgctgattttcttatcaaatcttcgctttttaccgaaaaagtcgatatttacgtacctgattatcagggatatcttgatgaaaggctaaaataagcacggccaccagcaaagaaaaccagattctctccccgaaacctaaggcttgcggtgctctgggacacctaatttagataattggtgaataaataccgatggatttttcggttcctgcatcagccagagctgcttttttgctctcgttaatgcaatatataacaggcgctgctcttgtgtatcagaaaatatttcaggcttcggcagtaaaacctgctccagcactgtttctttttctgatgccggaaaaccctcttttccttttcgtaaccctaagataataatgtaatcagcctgttgccccaaagattcatgaatggtcataaagttaatatttaaattcggccaacgggttgctgctttcttcaataaaccaggcttatgaaaatggtaacgggccaataagaagatggtttcctgactggtgacatagccactcatccggtttaacaaggcttccaattgttcttcgggcaaaatcatgactgattttttatttccttttattgaactatgattggtaagcctacacaatgaatcactcacttggctgtgaaaaagacgggcaattccattaattattttactaatgcgctcattaaaacgataagtggtatctaaaatgcactcgtcactttcaccaaaataagcagaaaaagtctttattgaaggccattcaagactattaaaccgacaaactccctgccagttatctcctactgcgaatatatggctttgtctattttgcgcttgaagtgtagttaataacttaatacttagaggagaaatattctccagattatctaacaggatatgcttccacgggctaatgaaacgtcctttttgcagagtatttactgcctgatgaatcaacccataaaagtccagcgctccttcttcttttaatgccgatttccaggctttcaacaaaggtgccatcaggcggatacgttttgggaatatatctgaatattcagacgaagcccgttccagcatctctttttgactaccaccatgcattctcattaattccagccaataatccaaatggctggataaacgggattgtacctgcctgtcattccaatatgctccatcgggtaactgccagcctaactcttcattcaaccattcgcgccagcctttggcctgtgcttttttttcattacactgtctttgccattcccgaataagaaaatcatggctcttttgagtattagtctctaattcactaatttttggtgtattgctatttgcctgtcggatgatacaaagagccagttcatggaatgttctcgcttttatcgtttttgttcccgagcgcaactgaagacgtttatttatttcctcaaccaatttctgcccggatgacagtaataaaatctgctcaggaagcgcctgctggcgtaataataaccattctgtccgagcaattaaaaccgatgtctttccacttcccgcacttcccgaaactaatatggatttttcaccattaataacagcctgatattgtaatggattgaatgatacgttttctgagatttggaacaattcaccataccgtttctgaatccgttcagcccattgctggtttatgagttttcgctgttcttctccttcattgagccagatcaggcacgtctggtaattatcccgacagtttgcaaagtccttgagtctttgtaatggcaagggaatagattgaaatgtttcatggattttttgctgtaatagaattaaatcttccgccttcatccaatagtcttgctggcggattttatcaattttatttacctgagcagacagaacaccggagctgatgccgctcatatcagagctccatgcctgccattccttgaataaataatggtaaaaacgctgtgtttgctgccattcagtgccatgtaaacgaacgactttcccttccggtaactcaaattccagttccccccagacaagccctcgcttacactgaatatcgattaattgattaaatggaattaggtactgatgtttgtcaccactgacttcaatgccagcactcagtaaacgcactcgattataaggatgccgagcaagtcgttgaccaatttgtgttgattttagttccattgtaatagcaccgtacctgaaaattgttgagctatctgctcacttaaatgttgttaggagttttttgtgctaactgttttttccagctcccgccattttttgtataacaatcacgttttctattatattcgtatatttattgcgctaacaggaactacactggttccctggctattgaaagaagaacccaagattacaatccctttgacgttaggtgttgtcgccgccgcattaacagacttagatgatcgtttagcgggtcgtttgcgcaatctggtcatcaccttagtctctttctgtattgcttctgtttctattactttactttttccatacacttggttcttcgctcttgggcttgcgatttctacctgtagtttcatactacttggtgctttagggcagcgttatgccaccatcgctttcggcgctttattgattgcaatatatactatgctgggtacatcgatattccctgtctggtatcagcaacctttattattactcactggtgcaatttggtataacttgctgacactagcagggcatggactatttcctatccgcccgttacaagaaaatctggcgctctgttatcatcagctttctgtgtatttacacgccaaaacaaatttgtttgacccagatgctgaagcagaggaatacgagcaggctgtgtttgatatagctatggctaacagcacattagtgtcaacactcaatcaaactaaaataactttattaagtcgtttgaaaggagaccgtgggcagcagggaacccgaaggacgctacactattattttgttgttcaggatattcatgaacgtgccagttcgtctcacattcagtatcaaaagctacgagaaacattgcgccacagcgatcttctattccgtttccagcgattgttgtccatgcaggcacacgcctgtgagcaggtttcacaatccattatcctgcgtaaacaatatcagcatagctcacggtttgagaatgctttcacctatcttgaaatctctttagagaaattaaaaaaccaacaactagttgatactaagctcgttgcttttagtaatttactgaaaaatttgcgggcaattgatgcacaactagccggactcagttctgagcaatatctgatccttcaggaaactgctcaatataataagcaaagcgatgacaggcagagccatgacaaacagtacaacgataaacaagaagagacgcaattatccgatgaggccttaacgggatggcgtgatatttcatttcggcttctcagcaatctgacacctaaatcagcactattccggcacgctatccgtatgtctgctttgctttgtactggttatgccattattcagctatttgatatgcaaagaggttattggatcctgctgaccagcctgtttgtctgtcagcctaactacagcgcaactcgccgccgtctggctcttcgggttatcggaactttggcgggtattttgattggcctgcctattctctatcttgtaccttctattgaagggcaattattgctgattgtcatttcaggtgtattatttttcgccttccgtagtagccagtatgcacatgccactctatttattacattattggtattattaagctttaatctattgggtgaaggctttgaagtagcgttgcccagaatagtcgataccctgatcggttgtggtattgccttattggcagtcagttttatctggcctgattggaattttcgccaatttccacaagttatcacccgtacaatgaatgccaattgccattatctcaatgctattttgttgcaatatcatcaaggaaaaagtaattgtctggaatatcgggttgctcgccgtaacgctcataattacgatgccgaactggcatcggttgtctcgaacatgtcatcagagcccaagcatcatcgtatttctcaggaagaagcatttcgtttactttgcctaaatcataccatgttgagttatatttccgccttaggcgcacatcgtgacagacttaatgaacctgtcattctggagctactgactgaagcaatccgccatgtcgaatctgctttgcaacaagacagagtgaatgatgagttcctgcatcaaatttcagagcatttgatacaaaaaagtaatcaattaacttctgataacagcaaagttcaacttgtattacagcaagtagggttgctagttgaattattaccggaaatagttaatttaaaaaaacaaataaacaatcagaaatctaattaaataaaccccgccttctatgaaggcggatttgttatttttattacttatatttgccgtatgtaaaatcaattatcatctgtcgtcttaaatcaatatgcaatcgaataatactaattaccatgttccaattcttgataccatacaagtaaatcatggcgtagtttttctggcaacacagcaacatggcagccttctattgctccggctaatgccagtaagatattaacacttatcttctttccattttgttgtaatttaagataagttacttttgctcctaacacacgcaattcttctacttttgatattcctgctttccataactggcgctccaaagccatcccaagattaggaagatcttttaatctgagaggtgttctttgtttattaatgatatctgtcagtgtatcttgataggctaaattaacatattcgaataattgtttttgatcccgccaaagtgattcgctgactcggtaataacgcaaagccaccggaattcctctttttgaatagataaacgtctccatgcctttggctttaaataacgtctctgcataactattccctcgtaaataaagctcaccttcataactcagggcgaacaagactccatcaattgataatccaattccaccaaactgggatttctttttaagtttccccaatgaagatatgccgtgtttcaattgatcaaaacgagccccagataaaaacatttttatcactccatgaattatatcctgactaaatattttatactctgttcccttgcctgttattaataaaataaataacaagaacaagtaattaaaaccatacgcaatctatttctggctgccaatcattaaattagaaaaaaactgttttagatgaatttttgcgaagcgccttgaaaaaaatggtcttgcttttagccaaataaccaattactgtatatatatacaggcatcatggtgaggaacattatgcgtattcaacccactctggagtatctcattgagagtaaaattgaagctgagaacagtacaactcacaaacacgaaatcactaatgtaacaggcactacatctacaaaattacaaccttttagtcaggctgatcaaaacgccttacaagcagtaaacggtacaatccatgagttaagctattgtgaacaatggcctgtggttaatcacatcctacttcctttgctacatcaatccagaaatgaaaacaggtggttactctggataacgcctaataaaagattaaaccgccagtggttagtcgattcgggtttgcctttagacaagagcgttcaattaaaccaaattacccctattgcatcaccctatgccatggagaaagccttggcaagtggtagctactgcatcgtattaggatggctgccagaactgtctgaatatggagtaaaaaaactgagattagctgcacagaaaggcacaacactaggcctgattatgcgtcctcaggcctcacccgaacagtataatcctgtagaaagcaggataaagtttcattctatttactatcattgaattaatttaagattattctcagtattttttaaaataaacatgctatgagtaataaaacttttttatttattataaaaatcaaataattaaataatctgccttcataagctatgcattaataatatttaatttcttacaggtattaatttaaaaaatatgtatcacaaatcaccatgtacttgtaagttttaaagttcgttgtagactctacaaagttgggttgatgctgatttaactaacatttcaggaattatctattgatattaagcgcatatacctaacagattgtttcaaccaatggccaacaataagactttaaggccaactacttattatttggatgataacgaggcgtacaatgaagaagacagctatcgcagtggccgtggcagtagcaacttttgcaactgtggctcaagcagctccaaaagagcatacttggtatgcaggtactaaggtaggttggtccgactacagtagaacaggatttaaagatatcgatgctgctaaaatagcaacaggtaatgctgacaagaaagatgctctgggtgccggagcttatgttggttatcaggcaacaccatacataggtttcgaattaggttatgattggctggggaaaatgacctataaatctaagattaatgacgccagtttcaaaagccagggtattcagcttgcaatgaaattgagcgccccgctgacagactctttagatgcttatacacgtctggggggcatagtgtggcattcaaacgcttcagcaaattacagccactcagataaaacaaaagactatgtgaaaaataatagtaccggtatttcaccgctaatcgctctcggtgctgaatatgcattgacgaaaaatgttgcaactcgtctggaataccagtgggcaccaaaagttggtcagagcggaaaaggcagttcagatgcatatacgcaggatcgcagctcttatttagggcctaaaccaaataacggtctgctaagcctcggtgtttcttaccgttttggacaggatgatgaagctacgcctcctcctgtgatccctgctccgatgcctgttgttgaaaacaaaagctttaccctgcgttctgatgtcctgtttgacttcaacaaatcaacattgaaggctgaaggtaaacaggaactcgattcactctataaccaattaagtaaaattgacccaaatcaggggcatgttgtagttcttggttacactgaccgaatcggtagccaaaactataacttacctctgtcccagaaacgggctcaatccgttgttgactatctgattgcaaaaggcattcctgcaaacagtattcaggctgagggtcgcggtaaagaagatccggttaccggctcaacatgtgacaatatcaaagcgcgctctacattgatctcgtgtttgtcaccagatcgccgtgttgttatcaatattcagggtactcaggaagtaactgttccggcaaaagttgccctttgatttatctacattattcataaaataaaaacctcatgtgtaagcatggggtttttatttatttcaccgtttttcaaagactatttatctaaaattgcagctaaatcctgctttaaatttagaatttggtgagcatatttctctttatgttcggcatcttccaataattgcacaattgtttctgataaagtattaccacggcgtcgggagagatttgaaagacgctgccagacatgaaaatccaggtcaatagactttttacgcgagtgctgatgctctgcattaaaatggcgcttacgccgtgctcggatagtttgcttcatgcggttggatagagcttgattcatatgcagcgaaatccattgcaaaaccttgacaggttcccgctctaattttaacaatgcattaattgcatcctgagctgcacttttttcaagatatttagtgatttcttcaccttccgaatgttttttcaataattaagcccatttccagccacattccagattttccaattgttgagatttcatttcatctctcagtgacagcgtaacttaaattaagcatagcaatgatttatcttaatttgtcatagcaacaccggattatcgtgcatttcttaaactatcaatgggatagtacaaatatcatgcctttcaaggattatggcatgttggttcacagcctaatcttgtataataaatgtttctttttcactacatgtagctatcactttgacgaatataaaattagactggcaatcattacagccaaatagtgtaccttatcaatcacttttcaattctgtttctgaatcaccttccgcccccctggaagtcattcaacccaggctgcacaatgggctaacacttttttgtcaggccaatttacgccaatcttttatgctgttaaaagcagaagaaagtgatgcttgcctggcccttttatccgatacagtttctacattattaccagaaagctatcctaatgttggtggttattatcagatagaacaccaaaccattacatggcattcctccggtgaaggccctttctcgccaaatcaaagaattgcttatcgtgagtggattgaacctgaacaattatttggcaacatctacacacaccagaatgtgcttcaactccagccagggcttatccaccaagttaatggtggtgttttaatcttacccctacgcacgctgctatcccagccattaatgtgggttcggctcaaacagatgatcattcaacgacgttttgactggttaccacacaatgaaaaccattctctgcctctgccagttccctcaataccattagatttgcgcctgatccttgtaggagatcggttcagtcttgacgaattgcatactattgagccggaattggcaagcagtgctttatacagtgaattcgaacctgatatgccatttcatgaggaagatgatctggcaatgtggtgtcggtatgtaagtggattcattcagcagcaaaaactcccgtctttgagccaagatgcctggagcgaattactttagagcac

SEQ ID NO: 1636 - DNA, 9655 bp, Xenorhabdus sp.; identical to SEQ ID NO: 1635
  CDS (7033)..(8112)

SEQ ID NO: 1637 - DNA, 9655 bp, Xenorhabdus sp.; identical to SEQ ID NO: 1635
  CDS (6207)..(6623)

SEQ ID NO: 1638 - DNA, 9655 bp, Xenorhabdus sp.; identical to SEQ ID NO: 1635
  CDS (2899)..(5082)

SEQ ID NO: 1639 - DNA, 9655 bp, Xenorhabdus sp.; identical to SEQ ID NO: 1635
  CDS (238)..(696)

SEQ ID NO: 1640 - DNA, 6829 bp, Xenorhabdus sp.
  CDS (1395)..(1781)
gtgctctaaagagggctatcgtgtgcatattcagagaaaagcggcacgtaataagcccttatcacactgccaaaaaggccgaaataagaaaatagcgaaaactcgggcacgcgtagaacatatctttggctcactctctcagatgggtgaaaaaattattcggacgataggccagctgcgagccaattttgcgatgacgatgaaggcaacctgctatgatttgcaacgtttggtttatttcggaaaatcgggtattcatgctttttaatttcgagatgtgatgaaaaagtgatgcgtttgtttttttcccctgaacaagcaagaaaaagtcatacacaataaggtcagttattggtgagttcaaaattgatcttattttttgtattgagagtttttagaggttccctatagcatataggttttcacctatccattttaggttggctccattccataattaatcatacctaacaataaaatcaagctttctggcatttaatgtttatcttaatgaatcatcaatcatttaaatataaatccaaattactgcctgtatttacattaatataacaacgcaagcaaggttaaattattgctgttttttccatccgctcaatatattattcagaaattccctctgtaatataattaactctgtgagtgacttcaaaataatcacttcctatttggattattgcaaactggctatatgatgtacctgataatgtatatttagtaacgactatatttccgctagggatgattactgttgcggtgatcttagttaccaaacaaacgcctctatttgaagcaggccagctagtattttggataacagaataatcatcgaaaaaaattgatctatactcaatttccccatgagctttataatctatctaattaactagatgtagataattcatctaccaatcagttaattaccaaaatcagcgcaaataactttcagtgcttccagtgaatcagtacagtatatacgcactgattattttacgggaaggaaaagaagtcagtacctatctagcattattttaatttagtcatttatatggaaaatttaggaaaatggtttcacatgcataattataaagccaaataatttcacatcactaataagaaaataaaaaatgaaacaattagcatggtgattaatgccaaaatatgtatataaaatcagtattgataataattgttctagtgttttaatataagtatctttgattctaagagaagattttttgttacctaaaaaaataactgaggtaaatatctttctaaatgtatttcaacagtaacgaatatctgtgattatctttaatcttaagataattattacaatatattatcgcgtaagagaaataaaattaaggcataaaatggacatttctaaatattctaataactggcaagaacgatttgaattttttcaaaaaaatggggctccttcttctaaagaatatcaagctgcttttaaaaaggcaccttatataacgcgcatcaagataaatatgaacttctttgcatttttctttggcattctctactttattgtacttggaatgtggaaaaaaggattaaccatactcggtatcggggtcgctttattttttgctttctttatgattagtgcgatagtccctctatcccttgaaactgcaaattttattagtattttcctgggagctatgaatgctgcattatatggtgtaacagctaattattcttattacctaaaagaaaaagaaggtgatgatagctggaatccattcaaaggccttaaaatgatctaagaatagaatacgtcgtgtgaactcctctctcagccacaaaaaacatggtaatattaagtcattagcatcgtgtaggcgtgagaggtgtaatgaaaactatcaatcaaaaaaaattactgacgcaggctgaggcaatctgtctgtcacgaggggttcgtttaacacctcaacgccttgaaattctgcgcttgatttcagcccaaccgggtgcaatcagtgcctatgatttgctggatctgctacgtgaagttgagccacaggcaaaaccgccaactgtttatcgaggattagagtttttactggaacagggttttgttcacaaaatagaatctacaaacagttatgtggtgtgtcatcattttgaagaaccgtgccatacatcagcaatgtttctttgtgataattgtggttctgttaccgagcaggatgctgaagatatcgaatcagcgatacaaaatttagcacagcgtgcagggtttcatttgcggcacagtgtcatagaagtccacggattatgctcttcttgccatgacacaaactcgtgtatagagtgagtttgaaattaccttatcaggcggtcattacttgatgatgaattcattaatttctacgtccccgtatcagcatgtgcttcgcgggtactacgaaaaatgaccgcccataatgggtaatgtataattatccgcttttacaatcagaaccaatccccgttacgaatcacgccaactgctagcccttcaatggtgaaattctgttcgcgtaaatccacaacgataggcttaaactcaggattttcagcaatcagttctatcttgtttcctgtttgtttgaaacgttttactgtgacttcatcttcaatccgtgccacgatgacctgtccgttatgaacatcctgcgttttatgcacagcgagtaaatcaccatccataataccgatatccttcatggacataccacggacacgcaatagaaaatcagcattcggtttaaataattccggatccactttgtaatggctttcaatgtgttcctgagccaatagtggttcaccagcagcaacacgaccaataagtggtaatccagccccttcagcttcctcttcaagcagcaaacggatacctctggaagcaccagcgataatttctatcacccctttacgcgcaagggcttttaaatgctcttctgctgcgttaggtgaacgaaaaccaagacgcgcggcaatttcagcacgtgtcggtggcatacccgtctgcgaaatatggtcacgcaccaagttataaacttcttgctgcctggctgttaatgctttcatttcgccccctgtttgtttatacagtctgactgtgagtatatacagctaaaattgaattgggaaccagtcagaatgtaaaagccgctaaataacgatttttgacgaaaaatacaccacattaacgggtaaaatacgaccaaataattatcacccatataaatagtgctaagatcatggctaaaaataccgcagctgagcccatatcctttgcccgtcccgatagttcgtgatattcgctgccaatacggtctacaaccgcttcaatagcgctattcagcatttccacaataagcactaacataactgaactaatgagaaaaagtctctcaaacatgccgaaatcaaaggagaatgccacaatagttgctaaaatagccaaaactgcctcctgtcggaatgcagcctcatttttccacgcagctttaataccttttgctgtgtacccagccgctttaattatgcgggttaaacctgttgattggttagccataaaaattttcttcaagaatcataatagttttaagatcatataacttttagtctctattattatcttatttacacagatctcaaaatccgtttctggtatgcttgccgcgcattgctaacaagaggcttaaagcagttatgtcagcttggcgtaaaatatattacaacttattgaatttgccgataaaacttttagttaaaagtaaacttattccaacggttcctgttacggagctgagtcttgatacgactcggcctattctgtatgtgttaccgtatcattcaaaggccgatttattgactctgcgtcaacagtgtcttgctcaggatttacctgatccgctagcgcctttggatattgatgatacacagcttccaagctatgttttcattgatgatggtccgcgtgtattcagttactatgcgcctaaacatgaatctgtgaagattttccattcttatctggatttacatcgcagtaatcctgatttagatattcagatggtgcctgtttctgtgatgttcgggcgctctcccgggcgtgaaggtcaggaaaccaatacggctcctcagctacgcctgcttaacgggatccagaagttttttgcaatcctgtggcttgggcgagatagttttgtccgtttttccgcaccagtgtcattacgcagtattgctgatgaacatggcacagatacaattattgccaataaactcgcccgcgttgcacggatacactattcccgccaacgtttggccgctgtcgggccacgtttacctgcgcgacaagatctgttcaggaagttactggaatcaaaagcgattgaaaaagcgattgctgatgaggctcgcagtaagaaaatttcgccagaaaaagcgaaacagaatgcaatcaatatgcttgaagagattgccgctgatttttcttatgaaacggttcgtataacagaccgtgtactgagctggacatggaaccgtctctatcagggcatcaatgtccataatggcgaacgtatccgccaattggctcaggatggtcatgaacttgtttatgttccatgccatcgtagccatatggattacctgttgctgtcttatgtgctttatcatcagggactggttccaccacatatcgcagcgggcattaacctgaatttctggccagctggcccgatattccgccgtcttggcgcgttctttatccgccgcacatttaaaggcaataaactttattcaactattttccgcgaatatctgggtgaactgttttcccgtggttattctgttgaatactttgttgaaggtggacgctcgcgaactggccgcttgctcgatccgaaaacaggtacgctttccatgacattgcaggcaatgttacgtggagagtctcggcctatcacgattgtgccgatctatatcggttatgaacatgtgatggaggttgcaacttatgccaaagaattacgcggtgcaaccaaagaaaaagaaggcttcttccagatggtccgtgggttgcgtaaactgcgtaatctggggcaaggttacgtcaattttggtgaaccaatcccattagtacaatatctgaaccagcatgttcctgaatggcgtgacgccatcgatccaatagaagcacaacgtccgacatggttgaccccaacggtcagcaaactggcggataatattatggtgaatatcaataatgccgctgctgcaaatgcaattaatttatgcagtacagccttattgtcatcacgtcagcgagcacttactcgtgagcagcttattgagcaattagattgctatatgcagctgatgagcaatgttacttatacaaacgatgtcactattccggccaaaacggcagaagagctgttggatcacgctttacggatgaataagtttgaggtcgaaaaagacagtcttggggatatcattatcctgcctcgtgaaagcgcggtactgatgacctattatcgcaacaatatccagcatttattggtcctgccatccttaatcgccagtatcgtgatgcatcatcgccgtattagccgcactgaactgctcagacaagtagagctgatttatcctctgctcaagcaggaactgttcatgcgttacagtaaggcggaattgcctgatgtagtgaataccctgattgatgaattagtgcgccaacgcctgatctgcaataaagagcaggaagtgctggtactcaatcctgagcgtatccgcccactacaactgttggcggcaggtatccgggaaacactgcaacgctacgccatcacgctttctttactgaatgccactccggatatcagccgtggtgctctggaaaaagagagccggatgctggcacagcgtttgtcagtgttgcatggaattaatgcgccggaattcttcgataaagccgtgttctcctgttctgttaatactttgcgggaagaaggttatattcacgatagtggcaacatcattaccacaaatgcccaggcgctttatcaggtgttgagcgaactgatgtctcccgaaatccgtctgacgattgaaagtgtcagtatgcctcctgagcacagtgatcaagagtcgacagatgaaattcaggaataacatactgttctgaaaataaaatctgacaaataaacgggcggccataaaatgaccgcccgttttgttaaaccattttctttaaaaatatagggttaaaaaacgtagctgaaaagaataccgaggaataaaacaaaaccaacataattattgttcatgaatgcctgaaagcatgactcacgactacggtcaaaaatgagtttttgctgataaataaaaagcgcaccagccagtaataccgtccagtaatacattccgcctaaattcaccaaacagccaaccataataagaattgccagcatgatgagttgcaaaataccaataatcagcttatcaaaacgcccgaacaaaactgctgtcgatttcacaccaattttcagatcatcatcacgatcaaccatcgcatattgggtatcgtagattactgaccatatgacatttgccagaaataataaccagcattctaatggtaaggactcacttaccgccgagaaagccattggaattgaccagccataggcagcacctaatacaacctgtggcaagttactgacccgtttaacgaaaggatacacacacgccagtcctaatccggcaaaggataaggcaatcgtca

SEQ ID NO: 1641 - DNA, 6829 bp, Xenorhabdus sp.; identical to SEQ ID NO: 1640
  CDS (2)..(268)

SEQ ID NO: 1642 - DNA, 6829 bp, Xenorhabdus sp.; identical to SEQ ID NO: 1640
  CDS (1886)..(2362)

SEQ ID NO: 1643 - DNA, 6829 bp, Xenorhabdus sp.; identical to SEQ ID NO: 1640
  CDS (3748)..(6216)

SEQ ID NO: 1644 - DNA, 6829 bp, Xenorhabdus sp.
  CDS (3710)..(4327)
tgacgattgccttatcctttgccggattaggactggcgtgtgtgtatcctttcgttaaacgggtcagtaacttgccacaggttgtattaggtgctgcctatggctggtcaattccaatggctttctcggcggtaagtgagtccttaccattagaatgctggttattatttctggcaaatgtcatatggtcagtaatctacgatacccaatatgcgatggttgatcgtgatgatgatctgaaaattggtgtgaaatcgacagcagttttgttcgggcgttttgataagctgattattggtattttgcaactcatcatgctggcaattcttattatggttggctgtttggtgaatttaggcggaatgtattactggacggtattactggctggtgcgctttttatttatcagcaaaaactcatttttgaccgtagtcgtgagtcatgctttcaggcattcatgaacaataattatgttggttttgttttattcctcggtattcttttcagctacgttttttaaccctatatttttaaagaaaatggtttaacaaaacgggcggtcattttatggccgcccgtttatttgtcagattttattttcagaacagtatgttattcctgaatttcatctgtcgactcttgatcactgtgctcaggaggcatactgacactttcaatcgtcagacggatttcgggagacatcagttcgctcaacacctgataaagcgcctgggcatttgtggtaatgatgttgccactatcgtgaatataaccttcttcccgcaaagtattaacagaacaggagaacacggctttatcgaagaattccggcgcattaattccatgcaacactgacaaacgctgtgccagcatccggctctctttttccagagcaccacggctgatatccggagtggcattcagtaaagaaagcgtgatggcgtagcgttgcagtgtttcccggatacctgccgccaacagttgtagtgggcggatacgctcaggattgagtaccagcacttcctgctctttattgcagatcaggcgttggcgcactaattcatcaatcagggtattcactacatcaggcaattccgccttactgtaacgcatgaacagttcctgcttgagcagaggataaatcagctctacttgtctgagcagttcagtgcggctaatacggcgatgatgcatcacgatactggcgattaaggatggcaggaccaataaatgctggatattgttgcgataataggtcatcagtaccgcgctttcacgaggcaggataatgatatccccaagactgtctttttcgacctcaaacttattcatccgtaaagcgtgatccaacagctcttctgccgttttggccggaatagtgacatcgtttgtataagtaacattgctcatcagctgcatatagcaatctaattgctcaataagctgctcacgagtaagtgctcgctgacgtgatgacaataaggctgtactgcataaattaattgcatttgcagcagcggcattattgatattcaccataatattatccgccagtttgctgaccgttggggtcaaccatgtcggacgttgtgcttctattggatcgatggcgtcacgccattcaggaacatgctggttcagatattgtactaatgggattggttcaccaaaattgacgtaaccttgccccagattacgcagtttacgcaacccacggaccatctggaagaagccttctttttctttggttgcaccgcgtaattctttggcataagttgcaacctccatcacatgttcataaccgatatagatcggcacaatcgtgataggccgagactctccacgtaacattgcctgcaatgtcatggaaagcgtacctgttttcggatcgagcaagcggccagttcgcgagcgtccaccttcaacaaagtattcaacagaataaccacgggaaaacagttcacccagatattcgcggaaaatagttgaataaagtttattgcctttaaatgtgcggcggataaagaacgcgccaagacggcggaatatcgggccagctggccagaaattcaggttaatgcccgctgcgatatgtggtggaaccagtccctgatgataaagcacataagacagcaacaggtaatccatatggctacgatggcatggaacataaacaagttcatgaccatcctgagccaattggcggatacgttcgccattatggacattgatgccctgatagagacggttccatgtccagctcagtacacggtctgttatacgaaccgtttcataagaaaaatcagcggcaatctcttcaagcatattgattgcattctgtttcgctttttctggcgaaattttcttactgcgagcctcatcagcaatcgctttttcaatcgcttttgattccagtaacttcctgaacagatcttgtcgcgcaggtaaacgtggcccgacagcggccaaacgttggcgggaatagtgtatccgtgcaacgcgggcgagtttattggcaataattgtatctgtgccatgttcatcagcaatactgcgtaatgacactggtgcggaaaaacggacaaaactatctcgcccaagccacaggattgcaaaaaacttctggatcccgttaagcaggcgtagctgaggagccgtattggtttcctgaccttcacgcccgggagagcgcccgaacatcacagaaacaggcaccatctgaatatctaaatcaggattactgcgatgtaaatccagataagaatggaaaatcttcacagattcatgtttaggcgcatagtaactgaatacacgcggaccatcatcaatgaaaacatagcttggaagctgtgtatcatcaatatccaaaggcgctagcggatcaggtaaatcctgagcaagacactgttgacgcagagtcaataaatcggcctttgaatgatacggtaacacatacagaataggccgagtcgtatcaagactcagctccgtaacaggaaccgttggaataagtttacttttaactaaaagttttatcggcaaattcaataagttgtaatatattttacgccaagctgacataactgctttaagcctcttgttagcaatgcgcggcaagcataccagaaacggattttgagatctgtgtaaataagataataatagagactaaaagttatatgatcttaaaactattatgattcttgaagaaaatttttatggctaaccaatcaacaggtttaacccgcataattaaagcggctgggtacacagcaaaaggtattaaagctgcgtggaaaaatgaggctgcattccgacaggaggcagttttggctattttagcaactattgtggcattctcctttgatttcggcatgtttgagagactttttctcattagttcagttatgttagtgcttattgtggaaatgctgaatagcgctattgaagcggttgtagaccgtattggcagcgaatatcacgaactatcgggacgggcaaaggatatgggctcagctgcggtatttttagccatgatcttagcactatttatatgggtgataattatttggtcgtattttacccgttaatgtggtgtatttttcgtcaaaaatcgttatttagcggcttttacattctgactggttcccaattcaattttagctgtatatactcacagtcagactgtataaacaaacagggggcgaaatgaaagcattaacagccaggcagcaagaagtttataacttggtgcgtgaccatatttcgcagacgggtatgccaccgacacgtgctgaaattgccgcgcgtcttggttttcgttcacctaacgcagcagaagagcatttaaaagcccttgcgcgtaaaggggtgatagaaattatcgctggtgcttccagaggtatccgtttgctgcttgaagaggaagctgaaggggctggattaccacttattggtcgtgttgctgctggtgaaccactattggctcaggaacacattgaaagccattacaaagtggatccggaattatttaaaccgaatgctgattttctattgcgtgtccgtggtatgtccatgaaggatatcggtattatggatggtgatttactcgctgtgcataaaacgcaggatgttcataacggacaggtcatcgtggcacggattgaagatgaagtcacagtaaaacgtttcaaacaaacaggaaacaagatagaactgattgctgaaaatcctgagtttaagcctatcgttgtggatttacgcgaacagaatttcaccattgaagggctagcagttggcgtgattcgtaacggggattggttctgattgtaaaagcggataattatacattacccattatgggcggtcatttttcgtagtacccgcgaagcacatgctgatacggggacgtagaaattaatgaattcatcatcaagtaatgaccgcctgataaggtaatttcaaactcactctatacacgagtttgtgtcatggcaagaagagcataatccgtggacttctatgacactgtgccgcaaatgaaaccctgcacgctgtgctaaattttgtatcgctgattcgatatcttcagcatcctgctcggtaacagaaccacaattatcacaaagaaacattgctgatgtatggcacggttcttcaaaatgatgacacaccacataactgtttgtagattctattttgtgaacaaaaccctgttccagtaaaaactctaatcctcgataaacagttggcggttttgcctgtggctcaacttcacgtagcagatccagcaaatcataggcactgattgcacccggttgggctgaaatcaagcgcagaatttcaaggcgttgaggtgttaaacgaacccctcgtgacagacagattgcctcagcctgcgtcagtaattttttttgattgatagttttcattacacctctcacgcctacacgatgctaatgacttaatattaccatgttttttgtggctgagagaggagttcacacgacgtattctattcttagatcattttaaggcctttgaatggattccagctatcatcaccttctttttcttttaggtaataagaataattagctgttacaccatataatgcagcattcatagctcccaggaaaatactaataaaatttgcagtttcaagggatagagggactatcgcactaatcataaagaaagcaaaaaataaagcgaccccgataccgagtatggttaatccttttttccacattccaagtacaataaagtagagaatgccaaagaaaaatgcaaagaagttcatatttatcttgatgcgcgttatataaggtgcctttttaaaagcagcttgatattctttagaagaaggagccccatttttttgaaaaaattcaaatcgttcttgccagttattagaatatttagaaatgtccattttatgccttaattttatttctcttacgcgataatatattgtaataattatcttaagattaaagataatcacagatattcgttactgttgaaatacatttagaaagatatttacctcagttatttttttaggtaacaaaaaatcttctcttagaatcaaagatacttatattaaaacactagaacaattattatcaatactgattttatatacatattttggcattaatcaccatgctaattgtttcattttttattttcttattagtgatgtgaaattatttggctttataattatgcatgtgaaaccattttcctaaattttccatataaatgactaaattaaaataatgctagataggtactgacttcttttccttcccgtaaaataatcagtgcgtatatactgtactgattcactggaagcactgaaagttatttgcgctgattttggtaattaactgattggtagatgaattatctacatctagttaattagatagattataaagctcatggggaaattgagtatagatcaatttttttcgatgattattctgttatccaaaatactagctggcctgcttcaaatagaggcgtttgtttggtaactaagatcaccgcaacagtaatcatccctagcggaaatatagtcgttactaaatatacattatcaggtacatcatatagccagtttgcaataatccaaataggaagtgattattttgaagtcactcacagagttaattatattacagagggaatttctgaataatatattgagcggatggaaaaaacagcaataatttaaccttgcttgcgttgttatattaatgtaaatacaggcagtaatttggatttatatttaaatgattgatgattcattaagataaacattaaatgccagaaagcttgattttattgttaggtatgattaattatggaatggagccaacctaaaatggataggtgaaaacctatatgctatagggaacctctaaaaactctcaatacaaaaaataagatcaattttgaactcaccaataactgaccttattgtgtatgactttttcttgcttgttcaggggaaaaaaacaaacgcatcactttttcatcacatctcgaaattaaaaagcatgaatacccgattttccgaaataaaccaaacgttgcaaatcatagcaggttgccttcatcgtcatcgcaaaattggctcgcagctggcctatcgtccgaataattttttcacccatctgagagagtgagccaaagatatgttctacgcgtgcccgagttttcgctattttcttatttcggcctttttggcagtgtgataagggcttattacgtgccgcttttctctgaatatgcacacgatagccctctttagagcac

SEQ ID NO: 1645 - DNA, 6829 bp, Xenorhabdus sp.; identical to SEQ ID NO: 1644
  CDS (3220)..(3591)

SEQ ID NO: 1646 - DNA, 6829 bp, Xenorhabdus sp.; identical to SEQ ID NO: 1644
  CDS (3)..(521)

SEQ ID NO: 1647 - DNA, 7316 bp, Xenorhabdus sp.
  CDS (726)..(1409)
ctttgtctcattcacaggaaatcgttgatagggtaaagcaaagtgctctgatcaatgttccttatacttcacatgtggtacacgaggaacggcctgaatggattgcaaatactatttgttattttcttaatgagactaactcgaattaaaatatttcgataaaagagtagttttctctctggataaaaaattatattgccatcagggttttctcatggaatttgaaatgtcgattggtgcgcctacgtttgccgcatttgtttaccttacccttattatgggagctgtctttatcattatagctgtgctcaatggtatttttcttctattcagaaaaaaatacaggtttttatggctcaatcttattggctcagctgtggcttattttacctgttttatcggtactgcatgctttgtaatgatttctatgttgtggcttgattggtttttagagaaaagtgagatccttagatttgttattatgatgatggatgaacatgtcattatcacgttcacgatttggcttgttattctttgctttatttggatttttagcatctattttgttaaaaaacatgttttatcgaaaatgaaaccgagcaacagtaattattaaacagctgtttttttgaatatgctggattttttctatggcataaaattgaactacattgatatttatgccaagacaattttgcattaatcttttcagaatggaaaataatatgaaaattgcctttctattgtatcctgatgtgactctacttgattttgctggtcccgcccaaattctagctcgtcttaaaggtgtttccttgcacttcgttgctaaaacaaaagatcttgttaccacagatgcaggctgttcagtattgccaacagattgccttagcgatcttcaatctgctgatatcttatgtgttcctggtggtttgagcagtattgacgtaatggaagatgaggaaataataagctgggttactaaaattggcgcacagtgccaatgggtcacaagtgtttgcactggttctatgattttggctgccgccggtcttttaaaaggataccgtgcaacatcacattgggtattgcgtgatgatctagcattattcggagcaattccaaccaaaggacgcgttgtttttgatcgtaatcgtgtaacaggtggtggtgttactgccggtattgattttggctttgcactttctgctgctattcagggggatgatcatgccaaactcatacagcttgaatatgagtatgatcctgtaattcctgtaagtggtggtacacctgaaactgccgagaagcatattctggctcaggctaaaagtgattttgaacatatgttacctaaccaccgtgagcgaagcattaaagtcgctgaacgcctttcacttaagcaatagactaattcatagcgcaaaaagccgtctatcttaatggtcgatggctcaatgacagagttttgccttcattatctgcacgaccacaacaaaaaaccaacaatagtgttctatctaggtcacttattgaacccctagtagcatggtccaaaacatcacgcaatcttgctccggaataaccgataagcaattccacttgttgtcacaataattaccagtaaaggccataggctgtgccagatcaccgaaaaatcagcgcctttcaaataaatctgtttagtgatgtcagtaaagtgccggattgggtttatccatgttatatcctgtaaccagatgggcatgttctcaacgggagagatatatccagaaagaaggatggcaggcatcataaatacaaacacgccgataaaggcctgttgctgtgtcgaacaaatagcggaaatcagcaagccaaacccgaccagcgatagcccataaatcaggatacagccgtaaaacatcagtagtgagcctgaaaaaggaatttgataacacaatgttccaatcagcaaaacgatacttgcctgtactgttgctaccactaacgccggaatagctttaccaatgaaaatttgccatgtggtcagaggggaaacgagcaattggtccaatgttccctgttctcgctctcgggcaacggaaagagcagtgacgatcagaacgccaatggttgttatcatggcaaccagagatggaactacgaaccatttataatccagattggcgttataccagttgcggataatgagttcgctgttattgagccctggtgtattgccctgtaattctttctgatagttcatcacaatctgttgaagatagttggccgcaatttgcgcgctgtttgagttacgtccatcaagcagaacctgaatggaagtaggggaatggctggcaatatgagcactgaaattttgtggaaaacgaactaatagcaaggcatcacggttatccagtgtcggtcgaatctcctgagagctgttcagcataataagatcagggaaggctttagatttcgccaaccgttgggtcagttcgatggatacctgccctttatcttcgtcataaattgcgatggtggcatttttaacttccagtgttgcagcccacggaaacagtatcatctgaaaaataacgggcagaatcaaagtcgcccgtgtctgaggatctcgcaggagagactgtaattctttcatgacgagtgtatataggcgatgaaacatgttctttcctttttaatccagatgtcggcgggttttccatgcagtcaggccaataaacacgatggcgctggcaattaaaaacagcaaatttgtgattaaaacggtaccgatattacccgccaaaaacagcgtttgtaagctactgacaaaataacgggcaggaacaatataagtagagagctgaattaacaacggcatactatttatttcaaatacaaagccggacagcataatggcgggtaaaaaagcagcattaagggaaatcattgccgcattaaattggttacgagttattgttgagattaataatcccatccctaaagcagtagcgagatacaagctggaaaccaaagccagtatccaaagcgaaccatgataaggaatacccataataaagacggcaaaaaccatgcaaagtaccatgacgaaagagccgagcacctgatagggcagtaatttggaaagcaataattcggttcgggtaacctgagtggataaaagagcctccatcgtgccccgttcccattctcgcgcgacaaccagagaagtcaggattgctccaacgactgttatgataattgaaatcgcaccgggaataagaaaatgctggctgattgcagccggattaaaccagtaacggatttgcatatcaatgagtggtgttattgaagttccctgattttgccctcgttgctgtaaccagatttgccaaacccctttagcgtaaccctgtacaaaattggctgtattaggttcactgccatctgtgatcacctgaattggcgcatgatcaccaacccgggcaagctgtgcatcaaaattgactggaataacaataatgccgcgaatttcaccggcctgtattttattgatcaaaagctggcggttattgctgatcgtggcatcaatataaggtgacccggtgaatgcatgaaccagttcctgtgcatctttgctctgttgctccatcaagataccgaggcgaagtttactggaatccagattaatcccgtaaccgaaaataaacagcagcataagtggaatcacgacagcaattaaggtactgctgggatctcgtataatctgcttactctctttaatacaaagtgcttttagtcgccgccatgaaaaactgacagctttttgagttttgagagcttgttcagcatgattttcttcattacgactcattgcggctccttatcgtaattcaccacgaggtcgataaaaacatcttccattgacgggttagggcgttctgtcgttgatacctgtcgcttcaatttgtcaggtgtacctgctgcaattagttttccgcgaaaaaccaaaccgatacggtcacaatactcggcttcatccatgaaatgtgtcgtgaccatcacggtaacacctttatccaccatcccattgatgtgtaaccagaattcacggcgtgtcagtggatcaacacctgatgtcggttcatccagaaacagaatatcgggttcatgcatcagagcgcaggcaagggccaaccgctgtttaaaaccgagtggcaggctgtcggtcgtttggtacaaaatgggtttcaggctaaaagaactaatcatttctgccatttttttcttttgctggcgaccacttaaaccataaacgccggaaaagaatttcaggttttgctctacagttaaatcaccatagagtgaaaatttttgcgccatataaccgaggtgttggcgagcctgacctgaatcagtctttaaatccatattcaataccagcgcattaccatgtgtcggaagcatcaatccacacatcattttgaatgtcgtcgattttccggctccattgggccccagtaagccgaaaatttcacctcgttttacctgaaagttcacatgatctgtagcagtaaaatcgccgaatttttttgtcacattacgggcttctattacgggttctgtccgatttgacgggttctgcggcatgatttctgccagctctgaacggcgggaagggatgccacccagtaaatcaataaaggcatcttcaaaacgtggttccgcatcaaagagcttgatatcaggtagtcctagttgctggcatagctcagcactgtcagcaccggctcttaaaattagccgaaggtatctgccttgaattacaccatcggtgacttgtggcaatgtgagtgcctgttgcagaattctccggcgggattctggtttgatatcaagcagaaaagagcgtccggcaataccctgagtcagtttttgcggctgaccgcgataaagtaattccccctgattcagcaataaaacatcagggcacagttcggcttcatctaaataggaggtgctccataaaatcagcatgccatcagaagcaagctcatgcaccatttgccataattcccgtcgggcaatgggatctacacctacaccgggttcatcaagcaatagcactttagggctgccgaccaatgtacaggccagacctagcttctgtttcatcccgccggagagcttacctgccagtcggccagtaaagcgggttaaatcagtaaaagtcagtagcttccggaaagtggattgtcgctcttctccagttacactacgcagatctgcatataaattgaggttttcctgtacggttaagtcttcatacaggccaaatttttggggcatatagcccagtttagaacgaacttctacgctgtctttgatgggatcaagccccatgatttcaatagtgccgcgatttggtttcagtaacccggccaacattcgtatcagtgtggtttttcccgcgccatccgggccgacaagcccagtcacagatcctccgaacagctctgcatttaactgggataccgccggaatttctaaccccggaaaagttttctccacaccgttcagttttattgtataggctgaactggtcatattgttgccttacttgtctgagtcagtaaaacgcaacgtaaccggcattccttgctttagcccttcatcgggatcactgacaataatacgcaggcgataaactaaatctgtcctcaagtcgggagtttcaacatttttcggggtaaattctgcggtcggggaaacaaaaccaattttgccgtggtaaggctgattttttcggccatcggtataaatcagaatatctcgtcctgctgttgcctgactgagatttggctcatcaatgtatgctcttatccagacaggattagtcagtgatagcgtaaagaccgtattgccggcggccagaattgtgcccggctcaatggctctggtaaggataattccgtcggaaggggaaagaagatgggtgtcctgtaaattgagttcagcctgagcgacagccgcctcagcctgagtgaactgggctttggctgaagcaatatcttctttacgatttcccgcctcaaactgacgtaatttatctttggctgcctgataagcggctaatgcctgacgttgcccggttttcgcgttttccagctcgttggctgaaatcattttgcgttgccataattcctgctggcgcttcaggaaactatcagtgaagcggaatgcagattctttttgagcaacttcagcacgcacctgtgcaatttcttcggagcgataacctgcttctgcttttataagatttgctttagcagcatctcggttggctctggcctgattcagggcgttaataaagggagagttatcgagctggcccagaagctggcctgcggtgatggtatctccttcatccacgtgcagggtttccagcttgccattgacccggaacccaaggttgactgttctgatatcaacattgccatatagggttaaatctttgtcatttcgttcctgataatagtaaataccaatggcagcagtaatgatgatgatcgctaataggacaagagcaaactttttagtgttcatactactatcccttatacgttattaaattttcgaatcgtcctgcgggcggttattttttcctcaggccattaagtaatatattaatatgctgagttaaaacctgattaattaactcatattctctggtaccaatattatcccagccggtctgacgtaaaagggcttcccttgccagccggaaagagaggatttcccctaataaggcatgtgtgtggatttgggtggaaacgtgaccttcatcagcgccgatataatgggcgatgagtttattcaggcgggaataaatcggagcaagcccctgttcatgaataacactataagcttctgtcggcgtcaattgttcatgcgacataatgcggctgagattaagactgcttttatcgaaaatgagatggttatagctgatcagcccctgatgaataaatgccagtatctgttctggcgggtaaggttgaggcgttgtgataaaaaattggtcaatagacgcaatcagcagggaaaattctgctttcagtctgtcggcaatatgttgtgcgacagcaaggtatagcccttctttagagccaaaataataagcaatggcggcgatattttgttttgcgtgttgagcaatattacggggtagttgcaccttccagacctgatttaccaaaaatctctaatgcagattcaagaaagttgttgcttagcttgttcgcctcgtgacgtctgagccgttttcgctg

SEQ ID NO: 1648 - DNA, 7316 bp, Xenorhabdus sp.; identical to SEQ ID NO: 461
  CDS (4649)..(5755)

SEQ ID NO: 1649 - DNA, 7316 bp, Xenorhabdus sp.; identical to SEQ ID NO: 461
  CDS (3458)..(4636)

SEQ ID NO: 1650 - DNA, 7316 bp, Xenorhabdus sp.; identical to SEQ ID NO: 461
  CDS (1746)..(3461)

SEQ ID NO: 1651 - DNA, 7316 bp, Xenorhabdus sp.; identical to SEQ ID NO: 461
  CDS (801)..(1715)

SEQ ID NO: 1652 - DNA, 7144 bp, Xenorhabdus sp.
  CDS (4405)..(6819)
gcgaccaggggaaataagtagacaccgatgcctcaatcgcaacatcaatatatagaaagaggtttgattgcaataaaatgtactacccttagtcaattccaagatgacgcgagcctgaccgcgtttcaactgatgccagacttgttgctacccaaagtttttgctatctaaggtgttaatcctgacttccaccagccacagccggaaaaaatcgtttggcatcacacacagggtgcaagattatacggactgtgcaataaagcgcaaggatcctacacggatcctgccatttgcttagtaattatactattgctttccctttgaattttaaacgatagctaaatggaatttgctatataccatgattccactacagtatcttctatgggctttatcttctccgcgtaccaaagcgtggtgatctccctgtggataaaaagcatcaaagctgtgtaaaagaatgaggatttatgtcgtcttttgcgttatgatcactggtcacgattccgatctcgctgtacggatcgttgggagagcgatgaaactagaaatcgccacaaggtactgcgagtcctctcatcgagaaatgttcttatcggtaatattcttatcgagagcatctttatcgataaagagtaatgccttgtgcccagtataacgtatctattattccagtttcttttattggtcttgttttaggggagttcgccgtgtcactttcgctttggcagcaatgtcttgcccgattgcaggatgagttacctgccacagaattcagtatgtggatacgaccccttcaggcagaactaagtgataacactttggctctttatgcacccaaccgcttcgtgctggattgggtcagagagaaatatataaataatatcaatttgttattaaatgatttctgtggtcctgaagtaccgttactgcgttttgaagtaggtaataagcctgtttcagcaagccagtctacatctcagaaaatcattgctgatatgccggtggttgctgctccatccagtttatctgtacgccctagctgggataatgcaaaagcgcagcctgagttatcttatcgttcgaatgtgaatccaaagcatacattcgataactttgtcgaaggtaaatccaaccaactcgccagagccgctgccaggcaagttgccgataatccgggcggagcttataaccctctgttcctgtatggcggtaccggtttaggtaaaacccaccttttacatgctgtcggtaacagcatcatggcacgcaaagccaatgcaaaagtggtatacatgcattctgaacggtttgttcaggatatggttaaggctttgcagaacaatgcgatagaagaatttaaacgctattatcgctcagtagatgccctgcttatcgatgatattcaatttttcgctaataaagagcgatcccaagaagaattctttcatacgttcaatgccctgctggaaggtaatcaacagattattctgacatcagatcgctatccgaaagagattaatggcgttgaagatcggttaaaatcccgttttggctggggtctgaccgttgccatagaaccaccggagctggaaacccgtgttgcgattctgatgaaaaaagcagacgaaaaccagattcagttgccgggagaagtggccttctttatagctaaacgcctgcgatccaacgttcgtgaactcgaaggcgctttgaatcgggttatcgccaatgctaattttactggtcgggcgattactattgattttgtacgcgaagcattacgtgacttattggctctacaggaaaagttggtaacgattgataatattcagaaaacggttgctgaatattacaaaatcaaagttgccgatctgctttccaagcgccgttcacgctccgttgcccgtccaagacagatggcaatggcgctggcaaaagagctgacaaaccacagcttgcctgaaatcggggatgcctttggtggtcgtgaccatactacggtacttcacgcatgtcgtaaaatcgaacaactgcgtgaagagagtcatgatatcaaagaagatttttctaacttaatcagaacattgtcttcctagcgctatgaaatttatcattgaacgtgagcaattattaaaacccctgcaacaggtcagcagcccattaggtggccgccctaccctgcctattttaggtaatttattgttgcaggtgacagaaggctccctgttactgacaggtacagatttagaaatggaaatgaaggctcgggtgacgctcactcagccacatgaacagggtgcaaccaccattcccgcgcgtaaattctttgatatctggcgcgggttgcctgacggtgccgaaatcagcgttgagctggatggtgaccgcattctggttcgatccggccgtagccgcttttcgctctctactctgcctgcttccgatttccccaatctggatgactggcaaagtgaagttgaattctcacttccacaggcaacactgaaacgcctgattgaatctacccagttctcaatggcgcatcaggatgttcgctattatctgaacgggatgctgttcgaaaccgaaggggaagaactgcgcactgtttccacagatggtcaccgtctggcggtctgctccatgaatatcggccagagcctgccttcgcattcagtgattgttccacgtaaaggcgtgattgaattgatgcgcttactggatggtggagataacccgcttcaattgcagattggcagcaacaatatccgcgcccacgttggtgacttcatatttacatcaaaactggttgacgggcgttttcctgactaccgccgtgtcctgccgaaaaatccggataaaacactgatagcaaactgtgacacgcttaagcaagcgttttcacgggcagcgattttatccaacgaaaaatttcggggggttcgcatctacctgagcgaaaatcagctcagaattactgccaataacccggagcaggaagaagcagaagagattgttgatgtcagctatcagggcacggaaatggaaatcggctttaatgtcagctacgtactggatgttctcaatgcactgaaatgcgagcaggtaagtttgctgctgacggatgccacatccagtgtaaaaatagagaattcagccagccaggccgcgacgtatgtcgtgatgccgatgcgcctgtaaataatacgcctgtatattaactcattgaacatgattctctcgcgtttattgatccgcgattttcgtaatatcgccaatgccgacctgccattggcgacgggctttaattttctggtcgggccgaatggcagcggaaaaacgagcgtactggaatccatttacacattgggtcacgggcgcgcttttcgcagcattcaggcgggaagagttatccgccatgatagtgaagagtttattcttcatggaagactggaacagcaatcccacgagcgaacgttatccgtcgggctgagcaaaaaccgtcagggtgacagcaaagtcagaatagatggcagtgatgggcataaaattgcagagctggcgaaaatgctgccgatgcagcttatcacgccggaaggttttacgttgttaaatggcggcccgaaatatcgtcgcgcttttatcgactggggttgctttcataatgaaccgcgtttttttgctggctgggctaatctgaaaaggttgctcaaacaacggaatgcggcattacggcaagtcacccgctatagccagatccagcattgggatcatgagcttgcgccattggcaactcagataagccaatggcgggctgaatatattgcaggtattgctgaagatattgagaaaacctgtaaacagtttttacctgaattcactctcaatatctcttttcagcagggctgggacaaagagagtgaatatgcagaactactcgcgcggcagtttgagcgcgataaggcattaacctataccgcatccggcccccacaaagccgatctgcggatcagggcagacggcacatctgtagaggatatgctctcacgtggtcagcttaagttactgatgtgtgctcttaggttagcgcagggtgaatatttcacccgacagagcgggcaaaaatgcctgtatctgcttgatgattttgcctctgaattggatgccggccgtcgtaagttattagccgagcgtctgaaatctacgcaggctcaggtgtttgtcagtgcaattactcccgagcaggttgcagacatgattgacgtaaatagcaggatgtttagcgtagaacatggcaaaatatgccctatggatttcgaattcagccagcatagtaaaggtgattcgaaagacgaagggtaagaggttcaaccacaggattaagataagcgagaaacgttgatgtcgaatacatatgactcctcaagtatcaaggtattaaaagggctggatgctgttcgtaaacgtccaggcatgtatatcggcgataccgatgatggtactggcctgcaccacatggtcttcgaggttgttgacaacgctatcgacgaagccctcgcaggtcattgtgacaaaatagttgttactatccatgcagataactctgtttctgtacaggatgatggccgcggtattcctaccggcatacacgaagaagaaggtgtttcagcagcggaagtcatcatgactgtgctgcatgcggggggtaagttcgatgacaactcctataaagtttccggcggtctgcatggcgtaggggtttctgttgttaacgccttatctgaaaaactggaactgactatccgtcgtgacggcaaagtgcacgaacagacttaccagcatggggttccacagtcaccactgaaagtagtcggtgatacagaacaaacgggaacaaccgtgcgtttctggcctagtatggatacgttcaaagttaacaccgagttcgaatacgatattctggcaaaacgtctgcgcgaattgtcattcctgaactccggtgtttccatccgtttagttgataaacgtaccaatgctgaagatctcttccattacgaaggcggaatcaaagcatttgttgaatacctaagccgcaataaaaacccgattcaccagaatgtcttctatttctccaccgaaaaagacggtatcggtgttgaaatttccatgcaatggaatgacggttttcaggaaaacatttactgcttcaccaacaacattcctcagcgcgatgggggaactcacttagtgggcttccgtaccgcgatgacccgtaccctcaacagttacatggataaagagggttacaacaaaaaatccaaagtcagcgcgaccggtgatgatgcccgtgaaggcctgattgccgttatctcggttaaagttccggatccgaagttctcttcccagaccaaagacaagctggtttcctctgaagtgaaaaccgccgttgaaacgctgatgaatgagaagctggtggagtacctgctggaaaacccgaacgatgccaaaaccgttgtcggtaaaatcattgatgcagcccgtgcccgtgaagcagcacgtaaagcgcgtgaaatgacccgccgtaaaggtgctctggatttggcaggtctgccgggcaaactggctgactgtcaggaacgtgatccggcccactctgaactttacttagtggagggtgattctgcgggtggttctgcaaaacaggggcgtaaccgtaagaatcaggcaatcctgccactgaaaggtaagatcctgaacgttgaaaaagcgcgttttgataaaatgctttcttcacaggaagtggcaaccctgattaccgcactgggctgtggtatcggccgtgatgagtacaacccggacaaactgcgttatcacagcattatcatcatgaccgatgccgatgttgatggctcccacatccgtactctgttgctgacattcttctatcgccagatgcctgagatcattgagcgtggttatgtctatattgcccagccaccactgtacaaagtgaagaaaggcaaacaagaacaatacatcaaagatgatgatgcaatggaagcgtatcagatgtccatcgcactggatggcgcatcactgtataccaatccacatgctccggctctgaaaggtgaagcactggaacagctggtcactgaattcaatgccgcgcaaaaaatcatcaaacgtatggagcgtttgtatcctcaggcattactgagcaatctggtttatcatccgaaactgacagaagataccttaaccgatcagaccaaagtggaagagtgggtcagtgccctgactattcgcctgaatgataaagagcagcatggcagcacttacagctatcagatccatgaaaaccgcgagcgtcaggtttatgagccggttctgtgtatccgcactcacggtgttgataccaactacaatctggatttcgatttcatccacggtggcgaataccgtcgtatcagcaaactgggtgaactgatcagcaacctgattgaagaaggtgcctacattgaacgtggtgagcgccgtcagcctgtgagcagctttgaacaagcgctggagtggctgagcaaagaatcacgccgtggtctttctattcagcgttataaaggtctgggagaaatgaacccagagcaattgtgggaaaccacgatgaatccggaaacccgccgtatgatgcgtgttactgtgaaagatgccattgcaacggatcaactgttcaccaccctgatgggcgatgcggttgaacctcgccgtgcatttatcgaagagaatgcgctgaaagcagcgaatattgatatttaatattcatctattaacccagataacaaccgttatctgggttatatgatataaaaaacctaccagtttattattttcagtaaaattaaaaaaatcagaatagataagtgccttctcaataaaaacaaaactgataataatggtttttatttatccactataaaatgaaatcataatggatgaagcaatttaagcattcattgataattatgatattcattaatattcttctaattcttatttttggaaaatttgtatttaataatcaccgccaatattatcatgcatcaattctattggcgggctactccaactatcacgctggcta

SEQ ID NO: 1653 - DNA, 7144 bp, Xenorhabdus sp.; identical to SEQ ID NO: 1652
  CDS (3235)..(4365)

SEQ ID NO: 1654 - DNA, 7144 bp, Xenorhabdus sp.; identical to SEQ ID NO: 1652
  CDS (2104)..(3204)

SEQ ID NO: 1655 - DNA, 7144 bp, Xenorhabdus sp.; identical to SEQ ID NO: 1652
  CDS (711)..(2099)

SEQ ID NO: 1656 - DNA, 8769 bp, Xenorhabdus sp.
  CDS (3332)..(3913)
aagtgttgtgctgtactgtactatcccttcttttattctttttgttatctctaatctattagacagtaatttttatttatcattaggcctgatatatattgcaacatcagttgccacggctatcattcagcctataggaataagtattattcctgaaataatggataacaaaaaactagacaaggcatttaaatatcgaggtctggtaaactccattaataccatgcttggcccggcgatttccggattaattattcattactttaatattgatggctcactgatttttatcgccgtaatgtcattactaccactgattgggttttattttatcaaaacaaattcagaaaaaacgccagagaaagccggacatcgcgggcaaaaaagtatcagaatcattaccaaaaattcaacagagataagactctcatttgttgcagctttttttaattttgcgattacgccattaatcatgtacatcctgcctattatcattttgaatcaatttaaactaagtgccttgcatgttggcattgctgaggcaacctttgggattggcatgatgctaggcagccttgttatcatcaatcaggtaaacaaaattttctgtaaggctcatactgcttttattgccgcattaactatggcgctctgtattgccggtatatctcatgccgattcttttactgaattatgctgttacatgttgatctgtggaatagggttagtaatttacaatataaataccacctccattcgttgccttgcaacaccagaaaattatcgtaattcaatggagtctaaatttacggctatttgcatggcatccattcctctgggtatgctgacagccacttatattattgagagttatgatattaaagtattattactcggattttctttcttcatggcattaatctcgttattgattctctcttcaccgagatatattgagatatcaaaaatgtcagaaagccagttaaatggatactacgaaaaaatctatcctgaggcattttatactaaaaaataaattattaaattggcctgcaatactcttgcaggccacctctgatttataccccatttgggaaaattaacgtctgccccggagattcacgattcagatgaataaaattcagatgcttctcataatggtcgagaatatcactgataatctgttcttttgtataccccatcaaatcattaccctgagttccttctattaagaaagtttccagccggaaataataagatttgcctaatcttgcacgataagtgaatcccggaacagaataacgctggggccaaatctgatagataaaattctgttcatctcccagatcgacaatcaactcaattggagtaagacgtttatcttcttctgacggcagcatattaaactgcacacttgcaccacgtaactccagctcttttgcaacttcctgcatcgcaggacgacacaccatatccagcatacgctgagtacttttcgtacccggaaaatgcatcatacggctcaggcgctgtttccagttcagcgatccattatcatgcaccaatgtcggagatgtattctgcaatgcgctggctttgcgaaaatcctcaacccgcaacgatttatataatcctgccatgataaagaagatcacaaaactaaaaggcaaccccataattaccgtcatattctgtaacgctgagatgccgtcagtcatcaaaatacccagcgtcagtacaccaattgccacagaccagaatattcgcaaccagttcggtgcatcgttattaatgtcactgagattagacgtaaaattacctaaaaccagtgagccagaatctgccgacgtaacataaaacagcagccctgtaattgtggcaacagaagcactcaacgtgaaagccggataaagtgccagcaggttataaaacccccgctcaggatgaactaacaccgtttccgctaattcgtggttgccgtgaataatttcatataacgcgctattgccaaaaacagacagccaaatcagggtaaacacaaatggaataatcagcgtacccatcacaaactggcggatcgttcgacctcgggaaatacgggcaagaaataatccgacaaacggtgaccaggcaacccaccacgcccagaaaaacaacgtccagctattcatccactccgtcggtcgctcaaatgcgaaactattgagagtcatgcccataaaccggctgatgtaatcacccacattctgtaccagcccattaagcagaaattctgtatctcccacaaacagaataaacagcactaaccctaacgctaacagtacattcagctcagacagaaaccgaatacctttgttgacaccagaggttacagatattgttgccacgataaccgacagcaatattaacccgccctgaactcccaacccctgcggcaatccaaacaacacctttagcccgtagtttaactgtacaaccccgatcccaagtgttgtcgcgatgccgaaaatcgtccctatcactgcggcaatatccacggtatgaccaatcggccctttgatacgattcccgaaaataggataaagcgccgaacggatagttaacggcagattgtaacgataactgaaatagcccagtgcaatccccatcaaagcatacatagaccagcccgtcagtccatagtgaaacagtgtccacaccatcgcctgacgagctgcttcaattgtttctccttcacccgttggcggacgcatatattgagtaatcggctcagccacggagaaaaacatcaaatcaatgcctatgccagccgcaaacaacattgccgcccaactgagcagactgaactcaggtttggattgttccgggccgagcttaatagcgccaaagcgggaagctgccacaaaaatgacaaagacaatgtaaagcgtggctgccagcaagtagtaccaaccaaatgttttcgaaacccagttcagggtgttttttatccagatgcttgttgcatccgtaaaaaagagcgtgaaaagcgaaaagagaataattaatgcggctgaggtaaaaaaaacgacagagtttagtgaatccttctgagtgttttttggactgtctccgatattcataggcagttcctgaagtaagtgaaaaagaaaaaacaaaaaagagcaacatccataatatattgaataacataataaaaactaaatcatcttcaataatctcaactgatttttgtaaaaatattgtaataaaacatatttaattttgattgaacattcaatcaaaaaaaagtttaatagccatcgaatcattgattgctgagcgtaaaatcatgcccaaagttggaatacagtcaataagaaaacagcaacttattgatgctacattagctgtcatcaatgaagttggaatgcaggaagcaagtattgcgcaaatagccaaaaaagcgggcgtttctaacggtatcatcagccattacttcaaagataagaacaagttacttgaagcggccatgcggcacttattgcatcaactccagatggcggtggcgcgacgattaaggctgctcgacaacgcaacccctcttcacaggctaaaagccatcattgaaggaaattttgacaccagtcagattaatagtgcggccatgaaaacctggctggctttttgggcaagcagtatgcatcaacccagtttataccgcttacagcaagtcaacgaacgtcggctatattccaatagctgtgtcgaattcaacagggctttgcccagaagagaagcacagcttgcagcgcaggggctggcagctctgattgacggcatctggctgagaagtgccttaagtagcaaaccttttgacgtagaaagtgcattcactattactttcgattacatcgagcagaaactcagatgaccactcttcctgaattctggcctaaggagaacccatgacccattttggtttacagaaactttatatccacggtgcttatgttgatagcacccaccctgataaaaatatttttgatgctgtcaatccggctaatggtgaaatcattgcacagctacaatctgcaactgaacaggatgtccagctagcagtggaaagtgcgcaaaaagggcagaaaatctgggcagcaatgacggcaacagaacgttcccggatcctgcttaaagccgtagatattctgcgtgaacgcaataatgaactggctgaactggaaacgctggacaccggtaaacccctctctgaaacccagcaagttgacatcgttaccggtgccgatgttctggaatattatgcaggcctgatcccggcactcgaaggccagcaaatgccattgcgcgaatcctcttttgtctatacacggcgagaaccgctgggtatcgtcgcaggcattggggcatggaactacccaatccagattgctctgtggaaatcagctcccgcactggcagcgggtaatgccatgatttttaaacccagtgaagtgacatccctcaccgctctgaaacttgctgaaatttataccgaggcaggtctgcctgatggtgtatttaacgtactgacaggcatgggacatgaagcaggccattatctggctgtccatccgaaaattgccaaaatgtcttttaccggcgggatcaccaccggtaaaaaagtgatggctaatgcatccggttcaacactgaaagaagtcacgatggaactgggtggaaaatctcctctgattatttttgacgatgccaatctggatcgggctgccgatattgccatgatggcaaactacttcagctctggtcaggtctgtaccaacggcacacgtgtttttgtcccgaaaacactgcttcccgattttgaaaataaaataatggaacgcgttaaacggatccgcgttggttcacctctcgatctgaataccaatttcggccctctggtgagtttcccccatatggaatcagttctgcgctatatagaaagcggtaaaaatgcgggcgcacgattgctgtatggcggtcaacgccttatggacggtgaactggcgaaaggggcatttgttgcaccaaccgtcttcacagactgcacagatgacatgcttattgcacgggaagaaattttcggcccggtgatgtctattctggcctatgaaacagaagatgaaatcatcgtccgtgcgaacaatacggattacggcctcgccgccggagtggtgacaaacgatctctcccgcgcgcatcgcgtaatccaccagctggaagcagggatctgctggatcaacacttggggagaatcaccggctgttatgcctgtcggcggctataaacattccggggtcggtcgtgaaaacggattggtcacactgcaacattacacacagactaaatctgtacaggttgaactgggtaattttgaatcactattttaaacaatgactgaaacagaggagataacaatggtatttgactacattattatcggtgctggttcagcgggtaatgtgcttgcaactcgtttaacggaagatccgaatatcactgtcctactgctggaagctggcgggcctgattatcgatttgactttcgcactcaaatgccagcaacgctggcatatcccttgcagggaacccgttataactgggcgtatgaaaccgatcctgaaccctatatgaataaccgccgtatggaatgcggacgaggcaaagggttaggaggatcatcactgatcaacggcatgtgttatatccgtggtaatgcgctggattttgaccactgggcaaaacagccgggtctggaagactggtcataccttgattgcctgccttatttccgcaaggcggaatcacgggatatcggccagaacgattatcatggcggagatggccccgtcagcgtgacaacgccaaaagccgacaataatgaacttttccatgcaatggtggaagcgggtattcaggcgggttatccggctacggatgatctgaatggttaccagcaggaaggctttggcccaatggatcgcacagttacgcccaaaggccgtcgttccagcactgcccgtggttatctggatcaggccagacagagggctaacctgaccatcattacccatgccttaacggatacaatcacatttgaaggtaaaaccgcggttggcgttactttttatcagggtaataactccacactaacgcaggccactgcacaaaaagaagtgttactttgtgccggagcaatagcttccccccagattttacagcgttcaggggttggccctgaggaagttctgcaagaatcatcgattcctgctgtgcatatcctgccgggagtcgggcaaaatcttcaggatcatcttgagatgtatctgcaatacgaatgcctcaaacctgtttcgctctatccttccctcaaatggtacaaccaacccatgattggcgcagaatggttatttaaggggacgggagtgggtgccagcaatcagtttgaagccggtggctttatccgtaccagtgaaaaatttgactggcccaatattcagtttcatttcctgccggtagccattaactacaacggcagcaacgcagtcaacgagcatggttttcaggctcatgttggttcgatgcgttccccgagccgcggtcacgtgaaaatcaaatcacgtgacccacgccagcacccgagtattctgtttaactacatgtctaccgaacaggactggcaagaattccgcgatgctatccgtatcacgagagaaattatggcacaacctgctctcgcgccctattgtggccgggagataagccccggagcgaatatccagacagatgatcaactggatgcttttattcgtgaacgtgctgaaaccgcttttcacccatcctgtagctgcaaaatggggcttgatgagatggcggtggttgatggtcaggggcgtgtacatggcgttgagaatttacgggtcattgacgcctctattatgccggaaatcattaccggtaatctgaacgccacaacgattatgatggcagagaaaattgcggataaaattcgggggaatgcacctctgccccgcagtcaggcaaaatactatgtcgccaatggcgctcccgcccgaaaatcagggctaagcagttcgtctacaaattaatacttataccctatggatttcgagttgcatcgcggcggcgagggaactcatccccgggagcatagaaaactatgtgactgggggtgtgagcgtagccaacaaagaggcagcttgaaagacgacgggtatattgaaaaatcgattattaatacgggaaatagcaaagtcatttttagctacttttcccgtattacatataatgtttacaataaatctaattccataaaaatatgctctgctccgtcttccatatagatttcaccttttgtttgataaccaaggctttcataaaatggctgagcatgacattgtgaggataaaccaatcgtcgccaccccatttttgcgggcataattctcaatgaattccattaccagacggccgattccttgaccccgataggctttcaaaacagcaacacgccccactttaagcatatcgttgtgctgtggaacagctcttaagacggcaataggattttcagcatcaaataccacgacatgcagggcaatatcatcatattcatcaatatcaatttcatcagcaaacccttgctcatccgtgaaaacgtacttgcggacattgaaagcatgctgaatcaattcagggtcttgtcttcctaaactgtgttttattttcattgttatatcctaaaaataatgacgtacagaagaatggaatagtaaaaatagtgacaagaatgtaaaaaaacaagggcactctttgccagagcgcccttctgatttcaactaacaaactatatccaatggatttctagaagaacctaaagagaggaaaggtattatccttcttctttcttactatcatcacctttaattttattaattaaatcatccgtttttttatcggcctcggattttatttctttcgatttcgattttgcatcatctgtaagctgattaattttatccgtagcctgctgctgtatttcccctgttttatttttcagctgatcagccgcatcattgacagatttagtgatgtcattctttaaatcttccgttttggatggcagttggcttatggttttctcagtcgaactccccgtactactctggccttccttcgaattatctaccgctttctggtcttcatgattagcattgtcttgcgttccctgtggcttttcctttgtatccaagttgttctgctctgaatccgtcttcatttgcgttgcactatcttcaaccggtttggttgagtcttccgcttttttggctgcatcatcacagcccgcaatgaatgccacaattccaaccagaaatagagcactaagaatcttcttcattgactaaccccttgcacttacggaaataaccattgcaaatgggtgttctggctttctatgccaaaacatccataagctctttgtcgtaaaccttgccgataaaaataattctcatttttatctgcccgatttgctctcttaggtgacttatagcaatgcaatatttcatacagacatatttcgggaaatttatggcaaataatagtcaaaatttaggaaaacgcccaatcgcaacttttatccgaaaaattttaaacggaacattttccggcactctggtgctgggaacagcattttccagctctgtttcgggta

SEQ ID NO: 1657 - DNA, 8769 bp, Xenorhabdus sp.; identical to SEQ ID NO: 1656
  CDS (3948)..(5426)

SEQ ID NO: 1658 - DNA, 8769 bp, Xenorhabdus sp.; identical to SEQ ID NO: 1656
  CDS (5430)..(7145)

SEQ ID NO: 1659 - DNA, 8769 bp, Xenorhabdus sp.
  CDS (5660)..(7690)
tacccgaaacagagctggaaaatgctgttcccagcaccagagtgccggaaaatgttccgtttaaaatttttcggataaaagttgcgattgggcgttttcctaaattttgactattatttgccataaatttcccgaaatatgtctgtatgaaatattgcattgctataagtcacctaagagagcaaatcgggcagataaaaatgagaattatttttatcggcaaggtttacgacaaagagcttatggatgttttggcatagaaagccagaacacccatttgcaatggttatttccgtaagtgcaaggggttagtcaatgaagaagattcttagtgctctatttctggttggaattgtggcattcattgcgggctgtgatgatgcagccaaaaaagcggaagactcaaccaaaccggttgaagatagtgcaacgcaaatgaagacggattcagagcagaacaacttggatacaaaggaaaagccacagggaacgcaagacaatgctaatcatgaagaccagaaagcggtagataattcgaaggaaggccagagtagtacggggagttcgactgagaaaaccataagccaactgccatccaaaacggaagatttaaagaatgacatcactaaatctgtcaatgatgcggctgatcagctgaaaaataaaacaggggaaatacagcagcaggctacggataaaattaatcagcttacagatgatgcaaaatcgaaatcgaaagaaataaaatccgaggccgataaaaaaacggatgatttaattaataaaattaaaggtgatgatagtaagaaagaagaaggataatacctttcctctctttaggttcttctagaaatccattggatatagtttgttagttgaaatcagaagggcgctctggcaaagagtgcccttgtttttttacattcttgtcactatttttactattccattcttctgtacgtcattatttttaggatataacaatgaaaataaaacacagtttaggaagacaagaccctgaattgattcagcatgctttcaatgtccgcaagtacgttttcacggatgagcaagggtttgctgatgaaattgatattgatgaatatgatgatattgccctgcatgtcgtggtatttgatgctgaaaatcctattgccgtcttaagagctgttccacagcacaacgatatgcttaaagtggggcgtgttgctgttttgaaagcctatcggggtcaaggaatcggccgtctggtaatggaattcattgagaattatgcccgcaaaaatggggtggcgacgattggtttatcctcacaatgtcatgctcagccattttatgaaagccttggttatcaaacaaaaggtgaaatctatatggaagacggagcagagcatatttttatggaattagatttattgtaaacattatatgtaatacgggaaaagtagctaaaaatgactttgctatttcccgtattaataatcgatttttcaatatacccgtcgtctttcaagctgcctctttgttggctacgctcacacccccagtcacatagttttctatgctcccggggatgagttccctcgccgccgcgatgcaactcgaaatccatagggtataagtattaatttgtagacgaactgcttagccctgattttcgggcgggagcgccattggcgacatagtattttgcctgactgcggggcagaggtgcattcccccgaattttatccgcaattttctctgccatcataatcgttgtggcgttcagattaccggtaatgatttccggcataatagaggcgtcaatgacccgtaaattctcaacgccatgtacacgcccctgaccatcaaccaccgccatctcatcaagccccattttgcagctacaggatgggtgaaaagcggtttcagcacgttcacgaataaaagcatccagttgatcatctgtctggatattcgctccggggcttatctcccggccacaatagggcgcgagagcaggttgtgccataatttctctcgtgatacggatagcatcgcggaattcttgccagtcctgttcggtagacatgtagttaaacagaatactcgggtgctggcgtgggtcacgtgatttgattttcacgtgaccgcggctcggggaacgcatcgaaccaacatgagcctgaaaaccatgctcgttgactgcgttgctgccgttgtagttaatggctaccggcaggaaatgaaactgaatattgggccagtcaaatttttcactggtacggataaagccaccggcttcaaactgattgctggcacccactcccgtccccttaaataaccattctgcgccaatcatgggttggttgtaccatttgagggaaggatagagcgaaacaggtttgaggcattcgtattgcagatacatctcaagatgatcctgaagattttgcccgactcccggcaggatatgcacagcaggaatcgatgattcttgcagaacttcctcagggccaacccctgaacgctgtaaaatctggggggaagctattgctccggcacaaagtaacacttctttttgtgcagtggcctgcgttagtgtggagttattaccctgataaaaagtaacgccaaccgcggttttaccttcaaatgtgattgtatccgttaaggcatgggtaatgatggtcaggttagccctctgtctggcctgatccagataaccacgggcagtgctggaacgacggcctttgggcgtaactgtgcgatccattgggccaaagccttcctgctggtaaccattcagatcatccgtagccggataacccgcctgaatacccgcttccaccattgcatggaaaagttcattattgtcggcttttggcgttgtcacgctgacggggccatctccgccatgataatcgttctggccgatatcccgtgattccgccttgcggaaataaggcaggcaatcaaggtatgaccagtcttccagacccggctgttttgcccagtggtcaaaatccagcgcattaccacggatataacacatgccgttgatcagtgatgatcctcctaaccctttgcctcgtccgcattccatacggcggttattcatatagggttcaggatcggtttcatacgcccagttataacgggttccctgcaagggatatgccagcgttgctggcatttgagtgcgaaagtcaaatcgataatcaggcccgccagcttccagcagtaggacagtgatattcggatcttccgttaaacgagttgcaagcacattacccgctgaaccagcaccgataataatgtagtcaaataccattgttatctcctctgtttcagtcattgtttaaaatagtgattcaaaattacccagttcaacctgtacagatttagtctgtgtgtaatgttgcagtgtgaccaatccgttttcacgaccgaccccggaatgtttatagccgccgacaggcataacagccggtgattctccccaagtgttgatccagcagatccctgcttccagctggtggattacgcgatgcgcgcgggagagatcgtttgtcaccactccggcggcgaggccgtaatccgtattgttcgcacggacgatgatttcatcttctgtttcataggccagaatagacatcaccgggccgaaaatttcttcccgtgcaataagcatgtcatctgtgcagtctgtgaagacggttggtgcaacaaatgcccctttcgccagttcaccgtccataaggcgttgaccgccatacagcaatcgtgcgcccgcatttttaccgctttctatatagcgcagaactgattccatatgggggaaactcaccagagggccgaaattggtattcagatcgagaggtgaaccaacgcggatccgtttaacgcgttccattattttattttcaaaatcgggaagcagtgttttcgggacaaaaacacgtgtgccgttggtacagacctgaccagagctgaagtagtttgccatcatggcaatatcggcagcccgatccagattggcatcgtcaaaaataatcagaggagattttccacccagttccatcgtgacttctttcagtgttgaaccggatgcattagccatcacttttttaccggtggtgatcccgccggtaaaagacattttggcaattttcggatggacagccagataatggcctgcttcatgtcccatgcctgtcagtacgttaaatacaccatcaggcagacctgcctcggtataaatttcagcaagtttcagagcggtgagggatgtcacttcactgggtttaaaaatcatggcattacccgctgccagtgcgggagctgatttccacagagcaatctggattgggtagttccatgccccaatgcctgcgacgatacccagcggttctcgccgtgtatagacaaaagaggattcgcgcaatggcatttgctggccttcgagtgccgggatcaggcctgcataatattccagaacatcggcaccggtaacgatgtcaacttgctgggtttcagagaggggtttaccggtgtccagcgtttccagttcagccagttcattattgcgttcacgcagaatatctacggctttaagcaggatccgggaacgttctgttgccgtcattgctgcccagattttctgccctttttgcgcactttccactgctagctggacatcctgttcagttgcagattgtagctgtgcaatgatttcaccattagccggattgacagcatcaaaaatatttttatcagggtgggtgctatcaacataagcaccgtggatataaagtttctgtaaaccaaaatgggtcatgggttctccttaggccagaattcaggaagagtggtcatctgagtttctgctcgatgtaatcgaaagtaatagtgaatgcactttctacgtcaaaaggtttgctacttaaggcacttctcagccagatgccgtcaatcagagctgccagcccctgcgctgcaagctgtgcttctcttctgggcaaagccctgttgaattcgacacagctattggaatatagccgacgttcgttgacttgctgtaagcggtataaactgggttgatgcatactgcttgcccaaaaagccagccaggttttcatggccgcactattaatctgactggtgtcaaaatttccttcaatgatggcttttagcctgtgaagaggggttgcgttgtcgagcagccttaatcgtcgcgccaccgccatctggagttgatgcaataagtgccgcatggccgcttcaagtaacttgttcttatctttgaagtaatggctgatgataccgttagaaacgcccgcttttttggctatttgcgcaatacttgcttcctgcattccaacttcattgatgacagctaatgtagcatcaataagttgctgttttcttattgactgtattccaactttgggcatgattttacgctcagcaatcaatgattcgatggctattaaacttttttttgattgaatgttcaatcaaaattaaatatgttttattacaatatttttacaaaaatcagttgagattattgaagatgatttagtttttattatgttattcaatatattatggatgttgctcttttttgttttttctttttcacttacttcaggaactgcctatgaatatcggagacagtccaaaaaacactcagaaggattcactaaactctgtcgttttttttacctcagccgcattaattattctcttttcgcttttcacgctcttttttacggatgcaacaagcatctggataaaaaacaccctgaactgggtttcgaaaacatttggttggtactacttgctggcagccacgctttacattgtctttgtcatttttgtggcagcttcccgctttggcgctattaagctcggcccggaacaatccaaacctgagttcagtctgctcagttgggcggcaatgttgtttgcggctggcataggcattgatttgatgtttttctccgtggctgagccgattactcaatatatgcgtccgccaacgggtgaaggagaaacaattgaagcagctcgtcaggcgatggtgtggacactgtttcactatggactgacgggctggtctatgtatgctttgatggggattgcactgggctatttcagttatcgttacaatctgccgttaactatccgttcggcgctttatcctattttcgggaatcgtatcaaagggccgattggtcataccgtggatattgccgcagtgatagggacgattttcggcatcgcgacaacacttgggatcggggttgtacagttaaactacgggctaaaggtgttgtttggattgccgcaggggttgggagttcagggcgggttaatattgctgtcggttatcgtggcaacaatatctgtaacctctggtgtcaacaaaggtattcggtttctgtctgagctgaatgtactgttagcgttagggttagtgctgtttattctgtttgtgggagatacagaatttctgcttaatgggctggtacagaatgtgggtgattacatcagccggtttatgggcatgactctcaatagtttcgcatttgagcgaccgacggagtggatgaatagctggacgttgtttttctgggcgtggtgggttgcctggtcaccgtttgtcggattatttcttgcccgtatttcccgaggtcgaacgatccgccagtttgtgatgggtacgctgattattccatttgtgtttaccctgatttggctgtctgtttttggcaatagcgcgttatatgaaattattcacggcaaccacgaattagcggaaacggtgttagttcatcctgagcgggggttttataacctgctggcactttatccggctttcacgttgagtgcttctgttgccacaattacagggctgctgttttatgttacgtcggcagattctggctcactggttttaggtaattttacgtctaatctcagtgacattaataacgatgcaccgaactggttgcgaatattctggtctgtggcaattggtgtactgacgctgggtattttgatgactgacggcatctcagcgttacagaatatgacggtaattatggggttgccttttagttttgtgatcttctttatcatggcaggattatataaatcgttgcgggttgaggattttcgcaaagccagcgcattgcagaatacatctccgacattggtgcatgataatggatcgctgaactggaaacagcgcctgagccgtatgatgcattttccgggtacgaaaagtactcagcgtatgctggatatggtgtgtcgtcctgcgatgcaggaagttgcaaaagagctggagttacgtggtgcaagtgtgcagtttaatatgctgccgtcagaagaagataaacgtcttactccaattgagttgattgtcgatctgggagatgaacagaattttatctatcagatttggccccagcgttattctgttccgggattcacttatcgtgcaagattaggcaaatcttattatttccggctggaaactttcttaatagaaggaactcagggtaatgatttgatggggtatacaaaagaacagattatcagtgatattctcgaccattatgagaagcatctgaattttattcatctgaatcgtgaatctccggggcagacgttaattttcccaaatggggtataaatcagaggtggcctgcaagagtattgcaggccaatttaataatttattttttagtataaaatgcctcaggatagattttttcgtagtatccatttaactggctttctgacatttttgatatctcaatatatctcggtgaagagagaatcaataacgagattaatgccatgaagaaagaaaatccgagtaataatactttaatatcataactctcaataatataagtggctgtcagcatacccagaggaatggatgccatgcaaatagccgtaaatttagactccattgaattacgataattttctggtgttgcaaggcaacgaatggaggtggtatttatattgtaaattactaaccctattccacagatcaacatgtaacagcataattcagtaaaagaatcggcatgagatataccggcaatacagagcgccatagttaatgcggcaataaaagcagtatgagccttacagaaaattttgtttacctgattgatgataacaaggctgcctagcatcatgccaatcccaaaggttgcctcagcaatgccaacatgcaaggcacttagtttaaattgattcaaaatgataataggcaggatgtacatgattaatggcgtaatcgcaaaattaaaaaaagctgcaacaaatgagagtcttatctctgttgaatttttggtaatgattctgatacttttttgcccgcgatgtccggctttctctggcgttttttctgaatttgttttgataaaataaaacccaatcagtggtagtaatgacattacggcgataaaaatcagtgagccatcaatattaaagtaatgaataattaatccggaaatcgccgggccaagcatggtattaatggagtttaccagacctcgatatttaaatgccttgtctagttttttgttatccattatttcaggaataatacttattcctataggctgaatgatagccgtggcaactgatgttgcaatatatatcaggcctaatgataaataaaaattactgtctaatagattagagataacaaaaagaataaaagaagggatagtacagtacagcacaacactt

SEQ ID NO: 1660 - DNA, 8769 bp, Xenorhabdus sp.; identical to SEQ ID NO: 1659
  CDS (984)..(1421)

SEQ ID NO: 1661 - DNA, 8769 bp, Xenorhabdus sp.; identical to SEQ ID NO: 1659
  CDS (355)..(822)

SEQ ID NO: 1662 - DNA, 9960 bp, Xenorhabdus sp.
  CDS (6009)..(6674)
gaatggctctatccggcaaatggcgatcggtgatatatttcaccgacagttcgacagccgcccgaatagcttttgctgtgtagcgcacatcgtgatgcgcctcatacttagcacgtaacccattaatgatctgtaccgtttcttcggaagacggctccagaatatcaattttctgaaaccgacgggccagagcgcgatctttttcaaaaatattgctgaattcctgataggttgtcgaaccaatcacgcgaatacgaccgctggataaaagaggcttaatcagattagctgcatccacctgcccccccgaagcggccccagcaccgataatggtatggatttcgtcaataaagagaatacttttgctgtcctgttccagggtttttaacaaggttttgaagcgcttctcaaaatcacctcgatattttgtccctgccaacaatgaaccaatatccagcgagtaaattgtgcaatccttcatcactgccggaacatctttttgcacgatgcgccatgcaagcccttcagcaatcgcagttttaccgactccggattccccaacaagcaatgggttatttttacgccggcggcacagcacctgaattgttctttccaattcatgctgacgaccaaccagcggatcaatttgccctttttgtgcagattgattcagatttgtagtgaaattttccaatctatcctcacctatcgcttgttcttcctgaactggattaacattatgatgactctcattatcgagctcatctttacgtgttccgtgagatataaaattcacaacatccagccgactgacgtcatgcttgcgcagtaagtaagccgcctgagattcttgttcactaaaaattgcaaccagtacattcgccccggaaacttctgagcggcctgaagattgaacatgaaacaccgctcgttgcaacacacgctgaaagctcaatgttggctgggtatcccgatcatcattctctggtaataaaggggttgtttgagtaataaaattttccagttcctggcgtaaaactgccagctcgaccttacaagcctccagtgcttctcgcgctgatgtgttacttaacaacgccagtagcaggtgctcgacagtcataaattcatgtctgttatcccttgctttggcaaaagcaatgttgagactcagctccaattcttgattgagcataagcacctcctccaaaatcaataagccagatcagactttttccagcgtgcaaagtaacggatgctcgtgctccttagcatacatgttcacttgcgcagctttagtttctgcgacctctgctgtataaataccgcaaattgccttcccttggtaatggacatccagcattagttgcgttgctcgttcaatatcataagaaaagaacttttgtaatacgtcaaccacaaactccatgggggtatagtcatcattattcaaaattatcttgtacatagatggcggctgtagcgcttgcttttctttatcttctataaattcttcaagattcaaaatgttataaaactgactcattgtctttccactgagtattatctttctatcggattttagtatgaactaattcgttctacctctatatattttatcactacataaagcactctgcttattcccgtagacgatcagggccagtattccacctaaaagtctgataccgttatctatatcaaactttggcgatttgagacaacctgtcataacttctgcacttgacgataaaatgaatttcactacagtgtattttatgaacaccattcctagctggacgactgttcatgatcctgaaatttttagtgattcctaaacccgaaatcataatacgagggatagagaagtatggaaacaggtacagttaaatggttcaataatgcgaagggctttggatttatttgcccggcaagtggcggtgaagatatatttgctcactattcaaccattcagatggatggttataggacgctgaaagccgggcaaaaagtgaatttcagcgttaatcaaggtcctaaaggcaatcatgcctgtgttattgttcctttggaagatggctcaaaattaaaaaagagtaaccaatagtttcgtaattcacacgccacaggtaaattccccctttatttgtggcgtgttatttagcggataacctcactgtctccctcccctaagaacctactcgtgtttagtcacaataaatataattgagtgtgatgtaaatcaattggatttaaatgaaacagatgtaaaaatcaggagagttttatcatcaaatatcagccataactgacgcatatctctaagacagccgtgttccatactatacaaaaagatattaccctgttttgctttgaatttacttgatttttttgtgagtctcaaatgacaggatagcaaaaatgggctgaatttcagtaggtttccctttccacgacatgttatagtagtgtgaattatttgttgttgcagattttttggtttttatgaccagtcaaagatataccaatggatttcgaggtatgcccttcaacaaaaaagcaacttgaaagacgagcgtataaagccagattaaaatacgtttattataaggatatgtgacatgttttcaggattactaattatcctccttccattgagcctgggttatctgattcacctaaataataaaacgatacttaccagagttcaccaattgctcaatgtcatggtttatctcattctcctgcttatggggatcagtcttgcaatgctggataatctgggtagtaatttgctttctatcctactgtatgcgatgacattttttctgtgcatatttgcaactaactggcttgcgcttttttttctggataaaaaagaaccgtggattattacaggacataaacaggaaagtcccccttcccgcctgcatatggcacttgactccatcaaattatgtggtgcactgatattcggttttttgctcggtctgactgaatggtcatggtttaattttgccggcaaggccagtgaaatcaccttaattttcttactgttttttgttggtatccaactacgtaataacggcttgagcctaaagcaaacattcatgaatcgccgtggagctgttgttgcgattattgtcgctatcagttcacttattggtggcatgatagcagcattcctgcttggcttaccaaccaagactggcttggctattgcatccggatatggctggtattctctttccggcattttaatttctgatgcctacgggccagtatttggcagtacagctttttttaatgatctggctcgtgaactggcatctattatgctccttcccatgctaatcaatcgctatcgctcaactgcactgggtttaaccggagctgcatcaatcgatttcacattacccatactacagcgttgtgggggtataagtattgtacccgcagccatcgttcacggtttcattttaagcctgatgacgcctatatttatcgcattttttacccaatagatttatataaataaacgcataacattatttaataatcttatatttatgctaaaaatagtacctaacaaaaggtaaaaaaagaacacagcatgattattaaatccataaaactgactaaaacaacgattttatacgcacattattgcatagttattcttttgggattaatatcccatcaactaattaactattcatagttttcgcatgaaaatccaattaaaaaatatcaattgtttctatggaattaatcaggctctgtttgatatcaattttgaatgtggatcaggggaaaccgtcgttctgcttgggcctagtggtgcaggcaaaagctccttactgcgagtcctgaatttacttgagatgcctcgttccggtcagttaagtgtagcaaagcatcagtttgattttaaacaaccccctaacacaaaagaaatccgtgccctgcggcagaatgtagggatggtttttcagcaatataacttgtggccacatttaaccgtaatggataacctgactgaagctccctgtcgggtgcagaggttatccaaacagcaatctatggaaaaagcggccagattactttcccgtcttcgtcttgaagagtttgctaatcgctttccgctgcacttgtcaggggggcaacagcaacgggtcgctattgcacgtgcgctaatgatggaacctcaggtgctgttatttgatgaaccaacagctgcacttgatcccgaaatcacatctcaggtcgttaacatcataaaagaactggcagaaacaggaattacccaaattattgtgacacatgaagtggaacttgcccgtaaaacggctagccaggttatctacatggaaaaaggacgaattatagaaaaaggtgatgcaagtcattttttaaagcctcaaaccgaagcttttgctcattatttgtcacactaagtttggcatactgagccagccatacagataatttcagaaaaataaccatcaatcacatgatcatcagttacaggacatggctatgaaaaaattcttgcttgcagctttattaaccacagtcactctatcagcaaccgcagcggagaaagaaactctgcgtttcgcgactgaagcaacttatcctccatttgaattcgtgggtgatgacaacaaaattcagggcttcgatgtagatctggcagatgcaatgtgtaagaaacttaatgctgaatgtagtttcaccaatcaggcctttgacagtcttattcccagcctgaaattccgtcgcgttgatgtgttaatggcaggtatcgatattacgcctgacagaaaaaaacaggttgattttactgatacttattatgataactccgccaattttgtaactgtcaaaggcaagttttccaaaattgatgaattaaaaggcaaattagtaggtactcagaatggcacgacacatcaaaaatacctgatggaacagcataaagagctacaaacagtgccatatgatagctaccagaatgcaattctcgatctaaaaaatggccgtgttgatgcaatatttggtgacactgctgttgtcaatgaatggctaaaaaagaataaagagctaggtaccattggtgagaaagtcactgataaagattactttggcaccggtttaggtatcgctgttcgtaagggtaatacagacttattaaataagctgaataaggctctggcagaaatcagacaggatggcacttatgacaccatctacgaaaaatggtttggcaaaaataattaattgaactccaatgaatgaatttcaatctttaattagtgccgccggtatcaccgtcggccttgctgtttcctctcttatagccggtttgattctggcaatgatttttgctggctgggaatcttcccgctggaaaacctttgcacttttaggctcctgctgggttaccctgatccggggattacctgaaattctggtggtcctttttatctacttcgggagttcacagcttcttatcattttatctgaaggtcttgatatcaatcttgtagtctggcagttcagaatacagatggaaattgataattttgacgtcagtcctttcctgtgcggtgtcattgcgctttccctcctttattctgcctatgcatcccaaacaataaaaggggcattaaaggctattcctatcgggcaaagggaagcgggtcaggcactgggattaagccaaagccgcatctttttccggctggtcatgccgcaaatgtggcgtcatgctttacccggattaggtaatcaatggttagttttattaaaggacacagctctagtctcattaatcagcgttaatgatttgatgttacaaacaaaaagtatcgccactcgcacacaagagccattcacctggtacatggttgccgcaatcatctatttagttatcacactggtgagccaatttatccttaaacgacttgaagtacgtgcgactcattttgaacggagtgcttctgatgcttgagtatataaaggatatcttaccgggcctacacaccagcctgagtctgactttcacagcattgctggtggcgtttatgctatcagtcatcctgactgtcattctgacaatgaaactgccggtgctctctcaattggtgaaaggctatataacactatttaccggcactcccttactcgtacaattttttttgatttactatggtcccggacaatttccagccataaaagcatacccgtggttatggcagttaatgtccgagccatggctctgtgcgatggtgacgctggcgctaaatagcgcagcatattccactcaacttttttatggggcagttaaagcaatcccggaaggacaatggcaatcctgttatgcacttggtatgtcacaggcacactctattcgcatattgctgccgtatgccttcaaaagagcactctcgtcctactcaaacgaagttgtgttaatttttaaaagcacctcactggccagtacgattactctgttggatattatgggatacagccagctacaatttggccgcagttatgatgcaaccgtttttgttgcagcaggtatcatttacctctgcataaatggtcttttaacattgctgatgcgtacttttgaacggcgtacactatcatttgagcaacgcaattaaacaatcaaccgctatttataatgtatctttgcttccattgctgattaccaacaatggaagctattccttattacgggctaaccgttattcagaaccaacagagccagtgtttcataatgctcagtgtgtggaaacatatcgaataactgcactttttctattcggtatcgttcgagcatggtgatatcttttgccatcgtttccgcattacaacttgagtaaagaatatactcaggtgccattcggttaagatactggcaaagttctttaccaattccccttcgaggcggattaactaataccaactccggagtttgagatttctcaagggcgaaatgcgtagaatccagagcctgaaactcaacatgtttgagcccgagactgtcagctgaatttctggcacaggcaatagcttcctcactgatttcaatgcctgtcagcttggtttctttatctgcacaatgcagaccaaaacctcccgcgccacaaaacagatcccacatactgcctatattcagctccctgacccactgccctgctttcatatataactgcgaagcaatagccggattcgtctggaagaaactccggggccgaatatacaacggaatattattgaaattttccttcaacattttcttttcagtgaaaataatctctttttcaccttcaaggatcgccatatgtgtcggttggatattcgcagaaattaccgtcagctgtggtaactgttcctgtaaccagggtaaggctcgttgtaactgttccagttttatttctgaacgtaacacaaacctcagcatcatctctttatcagcccgactttcggtcaacaaaatgtatttcagttcaccttttttacgtgcaacgttgtatgggactaaccccgctttcgcaataaatatttttattacgtcaaagactggctgaaagtgttgcggatacaaaggacagccacaaagatcgactgttctaccatccctatgcagcattccgagcagcgggcgctcaacactgccactcacgaccattttagctttattacgaaactcactgagctggctggcaacagggggttgccagcgtgtgttcggagtatctcgtaaaagctgttgtaaatgttcttgtttatctgataactgatttaaataggacttatcaagccactggcaggagtgacaatgccccgcggtatactgcgcacactgcattgtaaaaaaccacttaaaaaatattagtgcaaggtaaacgttgatgtttctgtcgaagcctgtgcctcatcttcttcatcctctacttccatttcattttccatatcactcgtgacataaaggaaattgttactgtgaacttcaaagatcacattggcaatttgctcctcaccgagtttcagaaaatgagagaattgctggaacgtcataccggcggcgataggaaatgactgacaaacaataagttttggcaaattttcatcctgaatatcaaggaatgccttcacagtcagagaactggcattaatctggctcagattcgcaaccaatggaatgatcgctgttggccggacttctgccaaagcggagaaaaagacaacatcccccagcagatcaatcttggcatcaaacaggccttcaatgttctgcatatgaggcaaatgcaatacttggcttgcttcattttcaaaataagaaattttcagcttatcaagccaattacgtaatgttgctaaatttggggtaaccatagaatccattgaatcaacctcatatgactaaaagtgacacctgctaccttcagaaaacactctattaggatagcaacatgaaatcgttaacctattttgttttttctccatcagagacaacccgatgattgctgccctctttcttatgatcaatacctaaaaaagagagattatagatcgcacgccagataatatggatagctgcgggaatcaaacagccgatacccaataagatcatagcaacgtgtgcttctgtcgtcattaataaaggtgatagaattagactatcagttatcgataaatagactaacgctaataacccgatacccaatatttccaataaaataaccagctttggcatatcagccaacgaacgcatctcttttgatatacttttcttcatttgttgactaccttccaaatctgatacgggtgataaattttgaccatatctcaccagataatcatacctgaaccacttgtattggcaggactaattaaagcgaaaggaaattcctgcttttttttaccgacacttacaggcatagtaactcaagatgacatatcaatgtagcccatgatcattactacttaaggagtttatatgtacactgtcatttttggtcgccctggttgcccatactgtgtccgcgcaaaagaactggctgaaaaattaaaaacagagcgtgaagactttgattaccgctatgtagatatcttggcagagggtatcaccaaagaagacttgtcaaaaacggtaggcaaaactgttgagaccgttccccagattttcattgatgaaacacacattggcggttgcactgactttgaagcctacgccaaagaaaatctagaactgtataaataatcgcagcaccattgctgttcaggcaaaagaattctcttagcttgagcagcaaatatctcattaattccaaaagaaattccagaccacaccattcaaaaatcccaccagatagaaaaaattatgtaatttttttacgatcgtcagaactttcaggttttcgtacagtctcaattagtgccactgcttttctttgatgtccccatattgaggagcccgatagtcatcccctttggttaaagactatcgggttttttgtttatacggggtattaaatgagtgaaaaataacttatcccatatcatgaatacattattgacctacctaactgcaataatcattaaataaaatgacaaatgaaggcgatatcactttactgatccacatgctaaaattattgtttttaccgataaattgataaacacgttatcacatttttactccaaggcacgtgtgaggctcattttgctagaacaactgaaccacgatttgtttaaccttatcaatgcaacaccagattcatcatcaggcatgatcatgttttcaatctttattgcaaaatatctggtgtatgtatatcccataacactcccagttttctggctttgggggaaaaaagaggccatctcacatcaacgtgatgttgtcagtaaatcctgtattgcttttgccttagc

SEQ ID NO: 1663 - DNA, 9960 bp, Xenorhabdus sp.; identical to SEQ ID NO: 1662
  CDS (1871)..(2107)

SEQ ID NO: 1664 - DNA, 9960 bp, Xenorhabdus sp.; identical to SEQ ID NO: 1662
  CDS (2751)..(3524)

SEQ ID NO: 1665 - DNA, 9960 bp, Xenorhabdus sp.; identical to SEQ ID NO: 1662
  CDS (3729)..(4457)

SEQ ID NO: 1666 - DNA, 9960 bp, Xenorhabdus sp.; identical to SEQ ID NO: 1662
  CDS (4606)..(5283)

SEQ ID NO: 1667 - DNA, 9960 bp, Xenorhabdus sp.; identical to SEQ ID NO: 1662
  CDS (5294)..(6016)

SEQ ID NO: 1668 - DNA, 9960 bp, Xenorhabdus sp.; identical to SEQ ID NO: 1662
  CDS (9023)..(9286)

SEQ ID NO: 1669 - DNA, 9960 bp, Xenorhabdus sp.
  CDS (8766)..(9959)
gctaaggcaaaagcaatacaggatttactgacaacatcacgttgatgtgagatggcctcttttttcccccaaagccagaaaactgggagtgttatgggatatacatacaccagatattttgcaataaagattgaaaacatgatcatgcctgatgatgaatctggtgttgcattgataaggttaaacaaatcgtggttcagttgttctagcaaaatgagcctcacacgtgccttggagtaaaaatgtgataacgtgtttatcaatttatcggtaaaaacaataattttagcatgtggatcagtaaagtgatatcgccttcatttgtcattttatttaatgattattgcagttaggtaggtcaataatgtattcatgatatgggataagttatttttcactcatttaataccccgtataaacaaaaaacccgatagtctttaaccaaaggggatgactatcgggctcctcaatatggggacatcaaagaaaagcagtggcactaattgagactgtacgaaaacctgaaagttctgacgatcgtaaaaaaattacataattttttctatctggtgggatttttgaatggtgtggtctggaatttcttttggaattaatgagatatttgctgctcaagctaagagaattcttttgcctgaacagcaatggtgctgcgattatttatacagttctagattttctttggcgtaggcttcaaagtcagtgcaaccgccaatgtgtgtttcatcaatgaaaatctggggaacggtctcaacagttttgcctaccgtttttgacaagtcttctttggtgataccctctgccaagatatctacatagcggtaatcaaagtcttcacgctctgtttttaatttttcagccagttcttttgcgcggacacagtatgggcaaccagggcgaccaaaaatgacagtgtacatataaactccttaagtagtaatgatcatgggctacattgatatgtcatcttgagttactatgcctgtaagtgtcggtaaaaaaaagcaggaatttcctttcgctttaattagtcctgccaatacaagtggttcaggtatgattatctggtgagatatggtcaaaatttatcacccgtatcagatttggaaggtagtcaacaaatgaagaaaagtatatcaaaagagatgcgttcgttggctgatatgccaaagctggttattttattggaaatattgggtatcgggttattagcgttagtctatttatcgataactgatagtctaattctatcacctttattaatgacgacagaagcacacgttgctatgatcttattgggtatcggctgtttgattcccgcagctatccatattatctggcgtgcgatctataatctctcttttttaggtattgatcataagaaagagggcagcaatcatcgggttgtctctgatggagaaaaaacaaaataggttaacgatttcatgttgctatcctaatagagtgttttctgaaggtagcaggtgtcacttttagtcatatgaggttgattcaatggattctatggttaccccaaatttagcaacattacgtaattggcttgataagctgaaaatttcttattttgaaaatgaagcaagccaagtattgcatttgcctcatatgcagaacattgaaggcctgtttgatgccaagattgatctgctgggggatgttgtctttttctccgctttggcagaagtccggccaacagcgatcattccattggttgcgaatctgagccagattaatgccagttctctgactgtgaaggcattccttgatattcaggatgaaaatttgccaaaacttattgtttgtcagtcatttcctatcgccgccggtatgacgttccagcaattctctcattttctgaaactcggtgaggagcaaattgccaatgtgatctttgaagttcacagtaacaatttcctttatgtcacgagtgatatggaaaatgaaatggaagtagaggatgaagaagatgaggcacaggcttcgacagaaacatcaacgtttaccttgcactaatattttttaagtggttttttacaatgcagtgtgcgcagtataccgcggggcattgtcactcctgccagtggcttgataagtcctatttaaatcagttatcagataaacaagaacatttacaacagcttttacgagatactccgaacacacgctggcaaccccctgttgccagccagctcagtgagtttcgtaataaagctaaaatggtcgtgagtggcagtgttgagcgcccgctgctcggaatgctgcatagggatggtagaacagtcgatctttgtggctgtcctttgtatccgcaacactttcagccagtctttgacgtaataaaaatatttattgcgaaagcggggttagtcccatacaacgttgcacgtaaaaaaggtgaactgaaatacattttgttgaccgaaagtcgggctgataaagagatgatgctgaggtttgtgttacgttcagaaataaaactggaacagttacaacgagccttaccctggttacaggaacagttaccacagctgacggtaatttctgcgaatatccaaccgacacatatggcgatccttgaaggtgaaaaagagattattttcactgaaaagaaaatgttgaaggaaaatttcaataatattccgttgtatattcggccccggagtttcttccagacgaatccggctattgcttcgcagttatatatgaaagcagggcagtgggtcagggagctgaatataggcagtatgtgggatctgttttgtggcgcgggaggttttggtctgcattgtgcagataaagaaaccaagctgacaggcattgaaatcagtgaggaagctattgcctgtgccagaaattcagctgacagtctcgggctcaaacatgttgagtttcaggctctggattctacgcatttcgcccttgagaaatctcaaactccggagttggtattagttaatccgcctcgaaggggaattggtaaagaactttgccagtatcttaaccgaatggcacctgagtatattctttactcaagttgtaatgcggaaacgatggcaaaagatatcaccatgctcgaacgataccgaatagaaaaagtgcagttattcgatatgtttccacacactgagcattatgaaacactggctctgttggttctgaataacggttagcccgtaataaggaatagcttccattgttggtaatcagcaatggaagcaaagatacattataaatagcggttgattgtttaattgcgttgctcaaatgatagtgtacgccgttcaaaagtacgcatcagcaatgttaaaagaccatttatgcagaggtaaatgatacctgctgcaacaaaaacggttgcatcataactgcggccaaattgtagctggctgtatcccataatatccaacagagtaatcgtactggccagtgaggtgcttttaaaaattaacacaacttcgtttgagtaggacgagagtgctcttttgaaggcatacggcagcaatatgcgaatagagtgtgcctgtgacataccaagtgcataacaggattgccattgtccttccgggattgctttaactgccccataaaaaagttgagtggaatatgctgcgctatttagcgccagcgtcaccatcgcacagagccatggctcggacattaactgccataaccacgggtatgcttttatggctggaaattgtccgggaccatagtaaatcaaaaaaaattgtacgagtaagggagtgccggtaaatagtgttatatagcctttcaccaattgagagagcaccggcagtttcattgtcagaatgacagtcaggatgactgatagcataaacgccaccagcaatgctgtgaaagtcagactcaggctggtgtgtaggcccggtaagatatcctttatatactcaagcatcagaagcactccgttcaaaatgagtcgcacgtacttcaagtcgtttaaggataaattggctcaccagtgtgataactaaatagatgattgcggcaaccatgtaccaggtgaatggctcttgtgtgcgagtggcgatactttttgtttgtaacatcaaatcattaacgctgattaatgagactagagctgtgtcctttaataaaactaaccattgattacctaatccgggtaaagcatgacgccacatttgcggcatgaccagccggaaaaagatgcggctttggcttaatcccagtgcctgacccgcttccctttgcccgataggaatagcctttaatgccccttttattgtttgggatgcataggcagaataaaggagggaaagcgcaatgacaccgcacaggaaaggactgacgtcaaaattatcaatttccatctgtattctgaactgccagactacaagattgatatcaagaccttcagataaaatgataagaagctgtgaactcccgaagtagataaaaaggaccaccagaatttcaggtaatccccggatcagggtaacccagcaggagcctaaaagtgcaaaggttttccagcgggaagattcccagccagcaaaaatcattgccagaatcaaaccggctataagagaggaaacagcaaggccgacggtgataccggcggcactaattaaagattgaaattcattcattggagttcaattaattatttttgccaaaccatttttcgtagatggtgtcataagtgccatcctgtctgatttctgccagagccttattcagcttatttaataagtctgtattacccttacgaacagcgatacctaaaccggtgccaaagtaatctttatcagtgactttctcaccaatggtacctagctctttattcttttttagccattcattgacaacagcagtgtcaccaaatattgcatcaacacggccattttttagatcgagaattgcattctggtagctatcatatggcactgtttgtagctctttatgctgttccatcaggtatttttgatgtgtcgtgccattctgagtacctactaatttgccttttaattcatcaattttggaaaacttgcctttgacagttacaaaattggcggagttatcataataagtatcagtaaaatcaacctgtttttttctgtcaggcgtaatatcgatacctgccattaacacatcaacgcgacggaatttcaggctgggaataagactgtcaaaggcctgattggtgaaactacattcagcattaagtttcttacacattgcatctgccagatctacatcgaagccctgaattttgttgtcatcacccacgaattcaaatggaggataagttgcttcagtcgcgaaacgcagagtttctttctccgctgcggttgctgatagagtgactgtggttaataaagctgcaagcaagaattttttcatagccatgtcctgtaactgatgatcatgtgattgatggttatttttctgaaattatctgtatggctggctcagtatgccaaacttagtgtgacaaataatgagcaaaagcttcggtttgaggctttaaaaaatgacttgcatcacctttttctataattcgtcctttttccatgtagataacctggctagccgttttacgggcaagttccacttcatgtgtcacaataatttgggtaattcctgtttctgccagttcttttatgatgttaacgacctgagatgtgatttcgggatcaagtgcagctgttggttcatcaaataacagcacctgaggttccatcattagcgcacgtgcaatagcgacccgttgctgttgcccccctgacaagtgcagcggaaagcgattagcaaactcttcaagacgaagacgggaaagtaatctggccgctttttccatagattgctgtttggataacctctgcacccgacagggagcttcagtcaggttatccattacggttaaatgtggccacaagttatattgctgaaaaaccatccctacattctgccgcagggcacggatttcttttgtgttagggggttgtttaaaatcaaactgatgctttgctacacttaactgaccggaacgaggcatctcaagtaaattcaggactcgcagtaaggagcttttgcctgcaccactaggcccaagcagaacgacggtttcccctgatccacattcaaaattgatatcaaacagagcctgattaattccatagaaacaattgatattttttaattggattttcatgcgaaaactatgaatagttaattagttgatgggatattaatcccaaaagaataactatgcaataatgtgcgtataaaatcgttgttttagtcagttttatggatttaataatcatgctgtgttctttttttaccttttgttaggtactatttttagcataaatataagattattaaataatgttatgcgtttatttatataaatctattgggtaaaaaatgcgataaatataggcgtcatcaggcttaaaatgaaaccgtgaacgatggctgcgggtacaatacttatacccccacaacgctgtagtatgggtaatgtgaaatcgattgatgcagctccggttaaacccagtgcagttgagcgatagcgattgattagcatgggaaggagcataatagatgccagttcacgagccagatcattaaaaaaagctgtactgccaaatactggcccgtaggcatcagaaattaaaatgccggaaagagaataccagccatatccggatgcaatagccaagccagtcttggttggtaagccaagcaggaatgctgctatcatgccaccaataagtgaactgatagcgacaataatcgcaacaacagctccacggcgattcatgaatgtttgctttaggctcaagccgttattacgtagttggataccaacaaaaaacagtaagaaaattaaggtgatttcactggccttgccggcaaaattaaaccatgaccattcagtcagaccgagcaaaaaaccgaatatcagtgcaccacataatttgatggagtcaagtgccatatgcaggcgggaagggggactttcctgtttatgtcctgtaataatccacggttcttttttatccagaaaaaaaagcgcaagccagttagttgcaaatatgcacagaaaaaatgtcatcgcatacagtaggatagaaagcaaattactacccagattatccagcattgcaagactgatccccataagcaggagaatgagataaaccatgacattgagcaattggtgaactctggtaagtatcgttttattatttaggtgaatcagataacccaggctcaatggaaggaggataattagtaatcctgaaaacatgtcacatatccttataataaacgtattttaatctggctttatacgctcgtctttcaagttgcttttttgttgaagggcatacctcgaaatccattggtatatctttgactggtcataaaaaccaaaaaatctgcaacaacaaataattcacactactataacatgtcgtggaaagggaaacctactgaaattcagcccatttttgctatcctgtcatttgagactcacaaaaaaatcaagtaaattcaaagcaaaacagggtaatatctttttgtatagtatggaacacggctgtcttagagatatgcgtcagttatggctgatatttgatgataaaactctcctgatttttacatctgtttcatttaaatccaattgatttacatcacactcaattatatttattgtgactaaacacgagtaggttcttaggggagggagacagtgaggttatccgctaaataacacgccacaaataaagggggaatttacctgtggcgtgtgaattacgaaactattggttactcttttttaattttgagccatcttccaaaggaacaataacacaggcatgattgcctttaggaccttgattaacgctgaaattcactttttgcccggctttcagcgtcctataaccatccatctgaatggttgaatagtgagcaaatatatcttcaccgccacttgccgggcaaataaatccaaagcccttcgcattattgaaccatttaactgtacctgtttccatacttctctatccctcgtattatgatttcgggtttaggaatcactaaaaatttcaggatcatgaacagtcgtccagctaggaatggtgttcataaaatacactgtagtgaaattcattttatcgtcaagtgcagaagttatgacaggttgtctcaaatcgccaaagtttgatatagataacggtatcagacttttaggtggaatactggccctgatcgtctacgggaataagcagagtgctttatgtagtgataaaatatatagaggtagaacgaattagttcatactaaaatccgatagaaagataatactcagtggaaagacaatgagtcagttttataacattttgaatcttgaagaatttatagaagataaagaaaagcaagcgctacagccgccatctatgtacaagataattttgaataatgatgactatacccccatggagtttgtggttgacgtattacaaaagttcttttcttatgatattgaacgagcaacgcaactaatgctggatgtccattaccaagggaaggcaatttgcggtatttatacagcagaggtcgcagaaactaaagctgcgcaagtgaacatgtatgctaaggagcacgagcatccgttactttgcacgctggaaaaagtctgatctggcttattgattttggaggaggtgcttatgctcaatcaagaattggagctgagtctcaacattgcttttgccaaagcaagggataacagacatgaatttatgactgtcgagcacctgctactggcgttgttaagtaacacatcagcgcgagaagcactggaggcttgtaaggtcgagctggcagttttacgccaggaactggaaaattttattactcaaacaacccctttattaccagagaatgatgatcgggatacccagccaacattgagctttcagcgtgtgttgcaacgagcggtgtttcatgttcaatcttcaggccgctcagaagtttccggggcgaatgtactggttgcaatttttagtgaacaagaatctcaggcggcttacttactgcgcaagcatgacgtcagtcggctggatgttgtgaattttatatctcacggaacacgtaaagatgagctcgataatgagagtcatcataatgttaatccagttcaggaagaacaagcgataggtgaggatagattggaaaatttcactacaaatctgaatcaatctgcacaaaaagggcaaattgatccgctggttggtcgtcagcatgaattggaaagaacaattcaggtgctgtgccgccggcgtaaaaataacccattgcttgttggggaatccggagtcggtaaaactgcgattgctgaagggcttgcatggcgcatcgtgcaaaaagatgttccggcagtgatgaaggattgcacaatttactcgctggatattggttcattgttggcagggacaaaatatcgaggtgattttgagaagcgcttcaaaaccttgttaaaaaccctggaacaggacagcaaaagtattctctttattgacgaaatccataccattatcggtgctggggccgcttcgggggggcaggtggatgcagctaatctgattaagcctcttttatccagcggtcgtattcgcgtgattggttcgacaacctatcaggaattcagcaatatttttgaaaaagatcgcgctctggcccgtcggtttcagaaaattgatattctggagccgtcttccgaagaaacggtacagatcattaatgggttacgtgctaagtatgaggcgcatcacgatgtgcgctacacagcaaaagctattcgggcggctgtcgaactgtcggtgaaatatatcaccgatcgccatttgccggatagagccattc

SEQ ID NO: 1670 - DNA, 9960 bp, Xenorhabdus sp.; identical to SEQ ID NO: 1669
  CDS (8436)..(8735)

SEQ ID NO: 1671 - DNA, 9960 bp, Xenorhabdus sp.; identical to SEQ ID NO: 1669
  CDS (2073)..(3206)

SEQ ID NO: 1672 - DNA, 9960 bp, Xenorhabdus sp.; identical to SEQ ID NO: 1669
  CDS (1534)..(2049)

SEQ ID NO: 1673 - DNA, 9960 bp, Xenorhabdus sp.; identical to SEQ ID NO: 1669
  CDS (1086)..(1451)

SEQ ID NO: 1674 - DNA, 7557 bp, Xenorhabdus sp.; identical to SEQ ID NO: 67
  CDS (1928)..(2593)
  unsure (1)..(7557): unsure at all n locations

SEQ ID NO: 1675 - DNA, 7557 bp, Xenorhabdus sp.; identical to SEQ ID NO: 67
  CDS (2656)..(2832)
  unsure (1)..(7557): unsure at all n locations

SEQ ID NO: 1676 - DNA, 7557 bp, Xenorhabdus sp.; identical to SEQ ID NO: 67
  CDS (3507)..(3689)
  unsure (1)..(7557): unsure at all n locations

SEQ ID NO: 1677 - DNA, 7557 bp, Xenorhabdus sp.
  CDS (6666)..(7532)
  unsure (1)..(7557): unsure at all n locations
ggtagtttgcagcaaagatttgccgccagtgtcttctggctcctgatattcctcttcaaagaaagcgaagttagcgtaatggtcaaaaatcaggaattcggttttgtgtttgccaggcccgaaaagattgtgccgtaggcgcgtacctcggccaatcatctgccagaatttcacccaacttttcacaggcttggcgaaaacgagattaaccacctcaggcacgtcgatgcctgtatcaagcatgtcgaccgaaatagcgatgcgaaactcgttgtcagcctttttgaactctttgatcaggctttccacatggggaatggaattatggatgaccttgcataccttagtaccgtactgcgggtacagcttgcagaacagttcttccagatgctcagcgtgatcctggcgttgggcaaagatgatagttttaccgaccagggagccagtttcatctttgatgccattgtttatcaggttttccagaataatgcggtcagtatcttcactgaagatcttacggccaatgtctttacctgcaatagtggtattacgggcctcttcctcgcccaagtcttcttcgagttggcgcttctgctcttcggtgaggttattgtagtgaataccatcacgcaggaaatcagtggtaagatctttaacccgaaacggtaccaaatacggtggttcgttgttaatcgctgcatccagcccgaactcaaatgttgagtcagtggtttcgcagtcgaacatatcgaacgtattgcgactgataaatttcaccggggtcgcggttaagcccacttgaagggcatcgaagtaatcgaacagatcgcggtatttgttgtagatactgcgatgggattcatcggcaatgatcagatcgaagaagcctacatccaattgagagaaacgggttcatcataccggggtaagtgncaatatagatacgcgcacttttatcaatcttgttggtttcaccaatcacacaacgcgnctcagagggtagattttgcttaaaagcatcgtcggcctgtacccgcagttctttgcgatcacacaaaaacagagcgcgcttggcccagccagtacgaagcagtaattcagccaatgcaatggcaacacgggtttttcctgtaccggtcgcctgaataatcagcgccttgcggcgctgactttgaaagtgtgccgcgactgttttgatggcttcgatctgataaggacggtcagcaatgctgagctctgggttgaatttttccagctcagcggcacggtaatggcgctggtagatcagataatccaggctgtcctttctgtagaagccatacaccggacgataggtgttgtactgatgatcatcccaaatgaaggtttcgtaaccgttggaatagaaaatcaccgggcgctggtagcccatgtgttcaaaggcatcggcatagaggcgagcctgctcacgacctgcttgaaggttggtattgccggattttttcgcttcgataacagcaagcggatgaccgttatcaccccatagcacataatccacataacccttacctgagggattattgggaaagatcacttcaaattcctggctaacctgatcggggttctggatatcccagccagcttgcaacagcatggcgtcgatcaatagtgcacgggttttggcttcgttccattgaaggctgtcggccactagctggctctgctgccggcgtttttgtcggtcagacttggtgggtggctcaagcttgtcgatatttcgggtgcgctcacgctccagctgctcgatcaccctttcgagctcttcctgctgcttttgtaattctttttcgtagcttgaaacggatttttgcagttggttcaaagttgccgtagggtcttttatatcgacaaaagaggggatctgatccttctttttgttgtagtatttaatacccatatacatggccaactgatgtgccgtgcccaatgccatttgagcattacgcaattcgccttctgcaccatgggcggtatcgttaccttgaatacgcaaaaagttgatctggtgaatcagtgacttgctgacgcagtcttcaaaaaccgggtttttgatcagctcatagaagttggattgcggcatgtgcggcagcagttcttccttataaatggccttggtcagtacttcagcaaagctgcgcaggcgggtcagggcactacccggatcaatatgcagtactgcctcggcgtaactaccaaggttggcaagcaaatcattttcaggtcgcaagaattcgaagttcgctgatttcatcaaaattattttgtccatatattctgtccatacctgcatcgtctctatgtacagagagtttgagcaaaggacgtgccaattttatttaatcactaggaaataccgtatttttccatccaattgttcagtgtctggtagtttttcagccccagcagctgtgctgctcgggtcttgttttggccactatgatccaacgccttacgtatataagtcgcagcaacgctgccaattatatattgtatatcaatgctttgagatatatccatattcatcaaccctgtttccggctctggcatatggaacagcgcctgacggatatcagcgacggtaatatcgtcaccttggcaccatagagctgctcgcagcaatgtggactgcaattcacgcacatttcctcgccaagggcattgaaggataagattttttgcatcaggagaaattttcttatgcctaagcatcgagtcatggatactcatcgctttgaccaagctatctgccagtaatgatagatctccatcacgctccctcagaggcggtagatgtagtactccaacagccactcgatagaacaaatcctccctaaagctaccattggaaaccgcttctatcaggttgcggtgggtcgccgtaatcaagcggacatcaaccttttgctctttggtgccgcctacagggttgaacgtcccctcctgtaatatgcgtaataaacgcacttgtatgctgggttccagttcgccaaattcatccagaaatagagttccaccattagcttgctcgaataaacctgccttgtcggctagagcaccggtgaaggcacctttcttatgaccaaagaggactgaatcgaccagctcggtcggaatagcaccgcagttaaccggcacaaacggcttgttggttctatgactggcattatgaatagcacgtgcaaagagctctttacctgtaccgctctccccatagagcaacactggcacttcacgttctgccagtatttgcgcctgcgcttttagagactgcatgcgggggttacgggtgacaatgttgtcgaaggctgcattgataggggcactggcctctgccagctggctaatctttgcgctgtcaatgcttttagcggcgggcaggtattccgctgaaacctcaaaggggatatccacttgttggacaccctgctctagtgatgattggtaaaactgacagggataatgggttttacccaataagatccacacagcctgcatggccggtgttcctgggcttaacaagatggataactcgcagccctctacggtaagcttagatagctgctgattggcctggacatagatttcaccgaagttaacaggtgaagatagcgaaatggcgtgagcacagataggcatggtaactagctcctgcaaccaagccagataggacctcacctgatcttccgggtagttgtaaagtagttctacggcatcaaacgcttgtgctgtaagagtcgccgcaatcggcccaagcacctgaccatcagctccggtgctgccggtggctttgaggtcgttccccccaatccagctgaccagtgtatggggcttagccttgcacatccgtgaactccagcatatcagccacctcacattcaaataagcggcaaagtttatccaaagcctcaatgtcgatcttttgcgcagattctttgtacatcagcgttacagtattcctgctaagaccggtttcacgcaagacgtcggaaattttcatttttcgctctcccatcaggcgagcgagatggcaacgtatcatggcctgactctacgatgtacacaattaggtctaataatatcccaatattctgaaaaaattaaagattaactgaaatatttacgcgtaacgataaaaatgcgggctgcgtcgattaatttttgatcgttcgttgtatgcaactagctaactcaactcggtagcagctataagatggctgcggatcttagatatgcctctggtgctgataccagaccgctatgaatgctgtcattgatatcatgaagcttacttgttgaacaacactctacagtaatcaaggggtatttatcccaggatttatgtgatgaatttgaagcagaagttgtcacgttaaggcgttagtaaaaggcttaaccgggcatctctatggtgacaaagggtatttatcgcaagcattatgcgatgagatgaaaactgaggggatcacactgatcacccatgttcgtcgtaatatgaaagccaaatttttatcactttgggacagtgttatgttaagaaagtggtttttgatagagacagtgaatgactaattgaaaaatatttctcagatagaacattcaagacaccggagcatagtcggctttttactggaggttgtatcgggacttattgcttatacattccaacccaaaaagccgagtttaggtttacatgattctggaattgggatgcttaaacaaaactgaggttaattgagctttcccactactacttgcttgtcggggaaccaaccctagccaagccgccagttgcctgccgttattgaattgctttccatcaccgacataagcgataaatgcagaggcgattacctgaaagcccatcttctgtagaatcaaagtcgtggccgctccgcccagcccacaaccgatgacggcaacgcgcttcattttgttggcccgccatcagtccggcaatcattcttgctggcgagcagttcgagcaatttctcccggttgtccggcatgtcgtggccatggtcgatttcgacaactttctcgacgtactgccagaaactggagctttgattgatgccgtacttcggcgccatcgagacaagccggatactggacatcaagtccggcttctgatcgggcttgcttggattgcgaatggtgccggcattcaggaaatagggaaggatcgaaacatccggcgtgtcgggcgtccacaccaggtacagttcctgcggctcatcggtgacgttggcgaagccatgcacgatgtagcgctcgccgtaaaagagttccttcggtcgcatcttcacgatgtgcaacgtgtccttcggcgcaccttctcctggcgcccgttgcaggtcggggtagcggttttgtcccataaaaatcacgaaaccgccattgggtgcatagaaccattcgtccgtccagtgatgaacatgcggtggcggcccgacatgcgccggcacaacaagtttggcaaagaggtacttgccgcaagtctgcttgccggtgcggatgaagtcgaatgtctcgcctgccgggccgagtacaaccggctcattggcggactttgatagttctgggaagtcgaacggagtataatcacggcacaccgtcgggcacgggccgatgaaatggccggggccatgtcgatgtttacgcagggctttgaaggagaactgttcaaccagcccggcactccgtggccggaagtggatgtgacgttaattgatttggggacattggcacgtgagaactactcggcacagatggcactggcgatggtgtcactgattaacaccgtcaatatccatagtgcaaaaaatctaatctattcgtcattcgttattaggccaaccaagtctaactacttgattattaatcttttaattgaaatcatggccatcattgctatttaatacgattttattcccaggctcctacggcgtggtaaggaattagtcataaaaagatcgaaactgtatggtttcttaacttatggattatcaactgcctcagttggtttgcagaaacttacgattgttgtactaagaaattggacgatacgaaggtactgctattatatgccgcaacttccagcaatttacacatacatgaaagttgagattggacttgatacattggtggtcgaggtgtagaattcctgtcatgactagatcaactacttcccctcaggctgtgaaacgtgtaccggttgattataccgaccgtttgtattggaacggcattattaagatgagtttgtccaaattcttcatcttgagtgtattacggaatcgcccaatgcacggttatgaaatcgcgcgcgaagtggaatgttctaccaaaggttgctgtgcgccgaccgaaggaacaatatatccagtcttgcgtgaattcgagcaaggtaactacgtcacagtacatactgaaacggttgcgggtcgtgggcgtaaggtctatacactgacggaaaaaggcaatgaggcctttgctgtagcagtcgaggcatggctggaagtgactgcacatatcactcgccaaaagtgattttttttgagcttatacatagatcatctatgcattgaacgggaatgcttatgaacctaaataccttcactgagactatgaagttctttgccatcattagcggagagctgatcgtgttatttttaatcgtcagctttatagtagcgatgatgcaggagtatgttccagccagtactgtccaacgtttgttaactggccgtggtttacgtggcaatattgttggtgcggggctagggacggtaacaccattttgttcctgttcaaccattccggttacagtcggcttgcttaacgcaggggcaccatttggcgctaccatgtcatttttgatttcatcaccgattctgaaccctgtcattctgggtttgctggtcacattattcggatggaaattcacgttgttctatgcaatatcgacttttatcctagcggttgtggtcggtgtggtttggcagtttttcggattagaaaaagacattaaaaaagtgcgagtggtcggtgaggcagacatattgaagtcgacagacttcaaatcacgtttgttccgtgcaggtcattcagccttcagtttgttcaaaacatccttgccatatttgttgattggtgccggtattggctcgttaatttacggtgtggtaccaggcgagtggattgccaatgtagctggtgccgacaatccatttgccgttccggtagcagcagccatcggtgtaccgctatacattcgtgccgaaaccctgattcctatagggatggccttgcaggctcagggaatgagcataggtgcggttgcagcgctgattattgctggtgctggtgcaagcattccagaggtaactttgcttaacactatttttcgccctcgcttagttagtatttttgtattaaccatttttactgttgctatcggcgtgggatatatcgccaacctattgtttatgtaaggagaataaaagatctttagagcac

SEQ ID NO: 1678 - DNA, 7557 bp, Xenorhabdus sp.; identical to SEQ ID NO: 1677
  CDS (6238)..(6588)
  unsure (1)..(7557): unsure at all n locations

SEQ ID NO: 1679 - DNA, 7557 bp, Xenorhabdus sp.; identical to SEQ ID NO: 1677
  CDS (5673)..(5957)
  unsure (1)..(7557): unsure at all n locations

SEQ ID NO: 1680 - DNA, 9478 bp, Xenorhabdus sp.
  CDS (2766)..(3563)
ggtgtaaggcatcacgcattgccagaccattcattactgttgccaacatgcccatgtggtcgccgactacacggttcattcctgcttcagccagaccggctccgcgaaacaggttgcctccgccaataacgacgccgacttgaatacccagctcaaccagttctttgatttcctgagccatgcggtctaagacgctagcatcgataccaaaaccttctgcgccttgcagggcttctccactgagcttaagcaggattctctgatatacgggttttgcattggttgccatggtgtttcagtcctaagcagataaggattattgggggttactacaattattcagttaatacacatccatgctatgcagccagatgtaaaaaattcttcttaaataaaacagaaccgccaatcggcggctccgttaagacaattaagactgtttgctcatcgcagcaacttctgctgcgaagtcagcttcaactttctcgatgccttcgccaacttcaaaacggatgaagttgataactttagcgttgttctctttcagcagagcgccaacagttttgcttggatccatcacgaagttctgaccattcagagagatttcgccggtgaatttgttcatacggccagaaaccattttctctgcgatttcgcgtggtttgccagactgcattgcgatgtccagctggatctgatgctcgcgcgcaacaacgtcagcaggaacgtcagatgggtcaacatattctggtttgcttgcagcaacgtgcattgcaacgtgcttgatcagttcttcgcttgcaccttcagcagcaaccagaacaccgatacgagcaccgtgcaggtaagaacctacagcttcgccttccagaatagcaacacggcggatgttgatgttttcaccgattttagcaaccagttcagtacgctgttcttcgaacttagctttcagtgcatcgatgtcagaatttttgtcagccataacggaagtgataacttctttaccgaatgccaggaagccagcatctttagcaacgaagtcagtttcacagttcagttcaacgatacctgcgaatttagcatctgctgaaacttcaaccaggataacgccttcagctgcaacacggcctgcttttttagccgcttttgcctgacctgatttacgcatgttatcgatagccagctcgatatcaccattcgcttcaaccagtgcctttttacattccatcatgcctgcgccagtacgctcacgcagttcttttaccagagcagcggtaatgtcagccatttgtttaattcctcgatgtgtctcgcgggaagataatattccgcgtggaaagttatcagataatatccttcgtctttcaagctgcctctttgttggctgcgctcgttcaccccagtcacatagttatctatgctcccggggattactgagaggctcctgcctctcaccggaggccagcctttggctgggcaaattcgttcccgacgaatttgtcacttccttgccgccgcgatgcaactcgaaatccattgggtatagttctatatcagatatgtaaagggggccgtgacaggccccctaaccaatatatttcaatacctggtcaataagggctcagaaatgagcatgccttattattcagcgtctacaagaccttcttcagcctgaacagccagatcctgtgaacggccttcacgaacagaagtcgcagcagcagtcaggtacagttttactgcacggattgcgtcgtcgttaccagggataatgaaatcaacgccatctggatcagagttagtatcaacaacagcgaatactgggatacccaggttgtttgcttctttgatagcgatgtgttcatgttcagcatcgataacaaacagagcatcaggcaggccgcccatgtctttgataccgcccaggctgttttccagtttgccaagctcacgagaacgcatcagcgcttcttttttagtcagcttgtcaaaagtaccgtcctgagactgagcttccagatctttcagacgtttgattgactgacgaacagttttccagttagtcagcataccacctaaccaacggtggttaacgaagtattggtcacagcccagagctgcttcttttactgcttcgcttgcagcacgcttggtgccaacaaacagaattttgcctttacgggaagcaattttgttcagttcagccagagcttcgttgaacattggaacagttttttccaggttgatgatatgaactttgttacgagcgccaaagatgaaaggtttcatttttgggttccagtaacgagtctggtgaccgaagtgaacgcccgcttgcagcatatcgcgcatggaaacagttgccattttagacctctataaagttaattggggttatgcctccacagatcccatgacaccgactctttaactgtgtgctattcataccgcatgaaagagattcatacgaattagtcacatgagagcaccccggtgtatgtgccgatccgtgtgtgttatttacacaaatgagtttatttagcatttctgaaatattgcttccacaggaaacaattacacagaataccggcgcgctttataccataatccgaccctatacaccaacatttgttatcgctttctgacgtcttagcaatcaacggttattgttagatatcaggcaggctgataccattaactccatcattttttcattaactaatatcaaagaatcggtgatttaccggttctaatggactgatttcatggctattactatcaaaacagacgaagatattcagaaaatgcgcgttgccggtcgtctggcagctgaagttctggagatgatcgagcaacacgttaaagcaggcgttaccacgggtgaacttgatcggatttgccacgaacacatcacgaataaacagcaggctatttctgcctgtctgggttatcacggttttcctaaatccgtctgtatttcggtcaatgacgtgatttgccacggtattccaagtgatgacaaggtactgaaagacggcgatatcgttaatatcgatgttactgttattaaagatgaattccacggcgatacctccaaaatgttcatcgttggtaaaccaacgattcagggcgaacgtctgtgccgtgtgactcaggaaagtctgtaccttgcgctgaaaatggtgaaaccgggtatccgtctgcgtactatcggcaaagcgattcagcaatatgtggaagggaatgatttctcagtagttcgtgaatattgtggtcacggtattggtcgggttttccacgaagaaccgcatgtacttcattacgatgccgatgatggcggtgttgtgctgcaaaaaggcatggctttcaccatcgaacccatggtcaatgcgggtgattatcgtatccgtaccatgaaagatggctggactgtcaaaaccaaagatcgcggctggtctgcacaatacgagcacactattgtcgttactgacaacggctgcgaaatcatgacatggcgcaaagaggaagaagcgcagatttcagcggtattggttaacgcgtaatagcttagcgagtagttacgtaaaccaaccacagattaatcgataacaatctgctgacataatttgttcactcctgccaaagatcccgttgtcaggatagcattgccaaatgaagcccttgtacataaactgtcctcacagggcttcatcatcgactacaaaatcgactacaaacgcctgcccatctcacagtttcttatcataggtttctgaatatgccagttgatattgcttttgcgcacgccccgattcctcctgtctctccggtagaattttcatgtgatgatctgcaatgcccggtgctgaagcagcatattgatgagtttcaactatggcttgaacaggcattcaaagcgggtatttccccgaccgcactgatttatgcacgtagtgattatattgataaacttctgacccggttatggcagcagtatgggtttgatcagatagatactctttccctgattgctgttgggggttatggaagacgcgagttgcatcctctttcagatatcgatctgctgattctgagtgaacacccgctgactgaagaacaatcaacccagattggacgctttattgctctgctctgggatatccgtctggatgtcggccacagtgtcagaactctcgaagagtgccttgaaaaagggctttccgatctgactatcgctactaacttagtggaatcccgcttaatctgtggtgatttacctctgttcctgcgcttacaaaaacacattttcagtgatgatttctggccatcagcccaattttttgcctccaagctcaccgaacagaaaaatcgtcatcagcgataccacagtaccagctacaatctggaacctgatataaaaagcagcccgggaggattacgtgatatccatactctcctttgggtggctcaccgtcatttcggggcgacatctttagatgaaatggtcgattttggttttctgactcacgaagagcgggatgaattaaacgaatgccagaattttctctggcgtatccgttttgccctccatctgtctgttacccgttatgataatcggctgttgtttgaacagcagtttagtgtcgctcagcttctcggctataaaggcgaacataatcagcctgttgaacgtatgatgaaagatttctatcgcgtgacccgccgagtcagcgaattgaacgacatgctgttgcaactgtttgatgaagcaatcctgacactacaaccagatgaaaaaccccgtcccctgaacgaggcctttcagttacggggagatcttatcgatgttattgatgaatcactgtttacccgtgatcctgcctcaattctgagcatgttttatcacatggccgttcaccgggaaattaacgggatctattccactacgttacgccagcttcgctatgcccgccggaaccttaagcagccattgtgcgaacttcctcaagcccgaaaaatttttatggcaatcctgaggcaccctcacgcagtcaaaagtgctttactgccaatgcatcgtcacagtgtattaagtgcctatactcctctttggagcaacatcgtcggccaaatgcagtttgacctgttccatgcttataccgtcgatgagcacaccatccggttattacagaaactggaaagttttgccgatgaaaataaccgcatacttcatcctgtgtgtgttgaactctatccacgcataccgcagcctgaaatactgcggctggccgcttttttccatgatattgccaaagggcgcaatggcgaccattccgagctgggagcgaaagatgcgtttaccttcgccaaacagcatggattgacaacttacgaagctgaattgatagagtggcttgttcgctatcatttactgatgtcaatcactgctcaacgacgggatattcaggatccagaagtcattcagcaatttgcctgtcaggtcaaaaatcagaatcgcctgaattacctgctttgcctcactgttgccgatatttgtgccacaaacgccaaactatggaacagctggaaacagagcctgctgcgtgagctttatttcgcgactgaaacccagttacttaaagggatacaaaatacgcctgatttacgggagcgtatccggcataaccgcttacaggctttggcattgttacgtcaggaagcgattgacgaagaaaggttacataatatctggagccgctgccacgcaaattattttttgcgccatacgccggatcaactggcatggcatgccagccatttagttaaccatcaatatcccgacccaatggtattgattagtacttcattttctcatggaggaacggaaatatttatctggtgtcaggatagaccttctcttttcgcggctgtcgtgggggaattagatcggcgcaatttaagtgttcataatgcccagatctttactaatcgggacgaaatggcaatggatacctttgtcatactggatccgaatgatcactctctggcgcctgaccgccatgagcctatccgacagtctttgctcaaagccattaacgatcctcatccgaaagcacccaaaacgcgtaaattaccggctaaattacgccactttgacgtacctcccaaaatcagtttcttaacaacacaaaatacccggcgcacttatatggagctagtcgctttggatcaacccggcttactggccaaagtcggcagtatttttgccgaattaggtatttccctgcatggtgcgcgcattacaaccatcggtgagcgggtagaggatttttttgtactgacggataaagattatttggcactggataaaaaaatcaaagatgaattgtcagaaaggttgacagaagcccttaacaccaaggataaagtatagcgttcactaacccatatttgactaagaataaaggatcccttaccaatgcagcaaatacaacctattgccgagttaatgggcattattgaaaatgcatttgaaaaccgtaccagcatcactccagcaactgttgatgaaacaacacgtgatgccatcaatcaggtcattcaaatgttggacagcggtaaactgcgtgtcgctgaaaaaatcgcaggtgagtgggtaacacatcagtggctgaaaaaagcagtcctgctctctttccgcattaatgacaatcaggttatggaaggtgctgaaagccgctatttcgataaagtaccgatgaagtttgctgattatgatcaggcgcgtttcgaaaaagaaggcttccgtgtcgtaccaccggcagcagtacgtcagggcgcctatattgcacgcaatactgtattaatgccatcttacgtcaatctgggtgcttatgtggatgaaggcacaatggtcgatacatgggcaacagtcggttcctgtgctcaaattggcaaaaatgttcacttgtccggcggtgtcggcattggtggtgttctggaaccattacaggccaacccaaccatcattgaagacaactgctttatcggtgcacgctctgagattgtagaaggggttatcgtagaagaaggttctgtgatctcaatgggtgtttacatcggccaaagtaccaaaatctatgatcgtgaaaccggtgaaatccattatggtcgggtgcctgcgggttctgtcgtcgtatcaggtaacctgccttccaaagatggcagctacagcctgtattgtgctgttatcgtgaaaaaagtcgatgccaaaacccgtggcaaagtgggtatcaatgaattgctgcgtacaatagactaactctttgaatagcggataatagatccgctatttttttcaggcaaaaactcaattattttctctgaaatcctgagctattcttgccagataattcatgatacttgggtttctggctttttggtgggcatcaggatgcattattgctagggcgtgttgacgttttgtcttcatcatttattcgacccacatgggtaaggtaatgcttaaaaaatgttttattattgaaacgattaatgggcagttaaaaaatatctctcaaatagaacattctcgtcaccgacatataaccggatttttgttaactattttaacttattgataactttaatcctcataatctataaggctaatgtaaagaatatgggtttttaattaagggtatatatcgtcaatcttttcaatgcctgatattttttttagaacacctaaatattctatttcattttcatataaccagtgaacaatactattgttactaaggagcttcgctatatagcccttcactattgttaggctcaggctattttctgcatattcatcttttaaattttgtgtttctatttgtagggcagccatttctttttcaagcctggctaatgtcttaatgatatctttgttttcagattgatttttatttttagcaactaaatgttctggggaaagagcatgtagcattgatagtgcaaattttcttgtaaaattattcaaagtaatcattgtggtaacaaattccatttgtttataaggtttgatttttcttaatacatcaaaaacattttgtggaatgtttttctcagctagtagagcaatgacctctcccgatatgccatcagaaatgtggagtcgagtattgattatattgggtgatacaccaagaacagcgctaagtttttcaattggaacgcctgattctacagctttctttagcattttttgctcctgtaaaattgacagacgactaacccgtttattgtaagaataggcttcatcaacaggagatatcagacagtgagcatgggatatacccaagtctttcagcgcttcaatccgaaggtgtccgtccagaattttttgccccccgttatcatctaaataaataataactggttcaattagtccaatttcagaaatggaagtcaatatttgcttgtatttgttactcgactttatattaataggcagtgttctggattgagataatttttcaatggcaaaagtttggaaatggttttcaaagcattgttttatcatgatgagaaactcatttagtatgatgctgggacaaaatagctggcatgtctgtgatattgttatctctaagtagagagcgaaaattttcattaaccattaattttttaaatatttctttggcaaacataagtgtttcactcgtatattttgcttttgtttgaatacttaaatgttcatttgcatttttttgataaatttctgataattcctctggcgtatatcttttctggatacgattattcacgaaatttttatttaacaaacctttatctcccagttttcttcgctctataattcgctttattatgttgatttgacttccctttatctttccattaattaatgcttctgtcagtgatttctgtatttcatcatcgtttgctctagatatttcaacggctaggtaaagcggaatatgtccggcttcaaaagcagctaaaagcttcttctcccctttttctaaaagactcatgacgccattaacccaactaacaacatatcctaaacgttcaccaatttctttatctgtgagtccttgtattttaagttgttttacgctctctaataattcagttgtacgaggttttcttctggcaatattttcggtcaggctcatcaagtgtcctgtttcttcatcaacatctttaataattgctggtatatgtgtctcactaacttgttggtaagcctccagccttccttgcccacatatcaaagcgtaaagaaaatcaccgtgaattatttttcttacagtgattggacgttttaggccaatattatgtatgttcgttttaatttcatcgtgagtaaacttatctctttctcgtggattagtaataagtattttagatatttctatcattgttattttttctttatgcatttttttcttcctgaatagtcttt

SEQ ID NO: 1681 - DNA, 9478 bp, Xenorhabdus sp.; identical to SEQ ID NO: 1680
  CDS (3809)..(6433)

SEQ ID NO: 1682 - DNA, 9478 bp, Xenorhabdus sp.; identical to SEQ ID NO: 1680
  CDS (6503)..(7321)

SEQ ID NO: 1683 - DNA, 9478 bp, Xenorhabdus sp.
  CDS (9190)..(9477)
aaagactattcaggaagaaaaaaatgcataaagaaaaaataacaatgatagaaatatctaaaatacttattactaatccacgagaaagagataagtttactcacgatgaaattaaaacgaacatacataatattggcctaaaacgtccaatcactgtaagaaaaataattcacggtgattttctttacgctttgatatgtgggcaaggaaggctggaggcttaccaacaagttagtgagacacatataccagcaattattaaagatgttgatgaagaaacaggacacttgatgagcctgaccgaaaatattgccagaagaaaacctcgtacaactgaattattagagagcgtaaaacaacttaaaatacaaggactcacagataaagaaattggtgaacgtttaggatatgttgttagttgggttaatggcgtcatgagtcttttagaaaaaggggagaagaagcttttagctgcttttgaagccggacatattccgctttacctagccgttgaaatatctagagcaaacgatgatgaaatacagaaatcactgacagaagcattaattaatggaaagataaagggaagtcaaatcaacataataaagcgaattatagagcgaagaaaactgggagataaaggtttgttaaataaaaatttcgtgaataatcgtatccagaaaagatatacgccagaggaattatcagaaatttatcaaaaaaatgcaaatgaacatttaagtattcaaacaaaagcaaaatatacgagtgaaacacttatgtttgccaaagaaatatttaaaaaattaatggttaatgaaaattttcgctctctacttagagataacaatatcacagacatgccagctattttgtcccagcatcatactaaatgagtttctcatcatgataaaacaatgctttgaaaaccatttccaaacttttgccattgaaaaattatctcaatccagaacactgcctattaatataaagtcgagtaacaaatacaagcaaatattgacttccatttctgaaattggactaattgaaccagttattatttatttagatgataacggggggcaaaaaattctggacggacaccttcggattgaagcgctgaaagacttgggtatatcccatgctcactgtctgatatctcctgttgatgaagcctattcttacaataaacgggttagtcgtctgtcaattttacaggagcaaaaaatgctaaagaaagctgtagaatcaggcgttccaattgaaaaacttagcgctgttcttggtgtatcacccaatataatcaatactcgactccacatttctgatggcatatcgggagaggtcattgctctactagctgagaaaaacattccacaaaatgtttttgatgtattaagaaaaatcaaaccttataaacaaatggaatttgttaccacaatgattactttgaataattttacaagaaaatttgcactatcaatgctacatgctctttccccagaacatttagttgctaaaaataaaaatcaatctgaaaacaaagatatcattaagacattagccaggcttgaaaaagaaatggctgccctacaaatagaaacacaaaatttaaaagatgaatatgcagaaaatagcctgagcctaacaatagtgaagggctatatagcgaagctccttagtaacaatagtattgttcactggttatatgaaaatgaaatagaatatttaggtgttctaaaaaaaatatcaggcattgaaaagattgacgatatatacccttaattaaaaacccatattctttacattagccttatagattatgaggattaaagttatcaataagttaaaatagttaacaaaaatccggttatatgtcggtgacgagaatgttctatttgagagatattttttaactgcccattaatcgtttcaataataaaacattttttaagcattaccttacccatgtgggtcgaataaatgatgaagacaaaacgtcaacacgccctagcaataatgcatcctgatgcccaccaaaaagccagaaacccaagtatcatgaattatctggcaagaatagctcaggatttcagagaaaataattgagtttttgcctgaaaaaaatagcggatctattatccgctattcaaagagttagtctattgtacgcagcaattcattgatacccactttgccacgggttttggcatcgacttttttcacgataacagcacaatacaggctgtagctgccatctttggaaggcaggttacctgatacgacgacagaacccgcaggcacccgaccataatggatttcaccggtttcacgatcatagattttggtactttggccgatgtaaacacccattgagatcacagaaccttcttctacgataaccccttctacaatctcagagcgtgcaccgataaagcagttgtcttcaatgatggttgggttggcctgtaatggttccagaacaccaccaatgccgacaccgccggacaagtgaacatttttgccaatttgagcacaggaaccgactgttgcccatgtatcgaccattgtgccttcatccacataagcacccagattgacgtaagatggcattaatacagtattgcgtgcaatataggcgccctgacgtactgctgccggtggtacgacacggaagccttctttttcgaaacgcgcctgatcataatcagcaaacttcatcggtactttatcgaaatagcggctttcagcaccttccataacctgattgtcattaatgcggaaagagagcaggactgcttttttcagccactgatgtgttacccactcacctgcgattttttcagcgacacgcagtttaccgctgtccaacatttgaatgacctgattgatggcatcacgtgttgtttcatcaacagttgctggagtgatgctggtacggttttcaaatgcattttcaataatgcccattaactcggcaataggttgtatttgctgcattggtaagggatcctttattcttagtcaaatatgggttagtgaacgctatactttatccttggtgttaagggcttctgtcaacctttctgacaattcatctttgatttttttatccagtgccaaataatctttatccgtcagtacaaaaaaatcctctacccgctcaccgatggttgtaatgcgcgcaccatgcagggaaatacctaattcggcaaaaatactgccgactttggccagtaagccgggttgatccaaagcgactagctccatataagtgcgccgggtattttgtgttgttaagaaactgattttgggaggtacgtcaaagtggcgtaatttagccggtaatttacgcgttttgggtgctttcggatgaggatcgttaatggctttgagcaaagactgtcggataggctcatggcggtcaggcgccagagagtgatcattcggatccagtatgacaaaggtatccattgccatttcgtcccgattagtaaagatctgggcattatgaacacttaaattgcgccgatctaattcccccacgacagccgcgaaaagagaaggtctatcctgacaccagataaatatttccgttcctccatgagaaaatgaagtactaatcaataccattgggtcgggatattgatggttaactaaatggctggcatgccatgccagttgatccggcgtatggcgcaaaaaataatttgcgtggcagcggctccagatattatgtaacctttcttcgtcaatcgcttcctgacgtaacaatgccaaagcctgtaagcggttatgccggatacgctcccgtaaatcaggcgtattttgtatccctttaagtaactgggtttcagtcgcgaaataaagctcacgcagcaggctctgtttccagctgttccatagtttggcgtttgtggcacaaatatcggcaacagtgaggcaaagcaggtaattcaggcgattctgatttttgacctgacaggcaaattgctgaatgacttctggatcctgaatatcccgtcgttgagcagtgattgacatcagtaaatgatagcgaacaagccactctatcaattcagcttcgtaagttgtcaatccatgctgtttggcgaaggtaaacgcatctttcgctcccagctcggaatggtcgccattgcgccctttggcaatatcatggaaaaaagcggccagccgcagtatttcaggctgcggtatgcgtggatagagttcaacacacacaggatgaagtatgcggttattttcatcggcaaaactttccagtttctgtaataaccggatggtgtgctcatcgacggtataagcatggaacaggtcaaactgcatttggccgacgatgttgctccaaagaggagtataggcacttaatacactgtgacgatgcattggcagtaaagcacttttgactgcgtgagggtgcctcaggattgccataaaaatttttcgggcttgaggaagttcgcacaatggctgcttaaggttccggcgggcatagcgaagctggcgtaacgtagtggaatagatcccgttaatttcccggtgaacggccatgtgataaaacatgctcagaattgaggcaggatcacgggtaaacagtgattcatcaataacatcgataagatctccccgtaactgaaaggcctcgttcaggggacggggtttttcatctggttgtagtgtcaggattgcttcatcaaacagttgcaacagcatgtcgttcaattcgctgactcggcgggtcacgcgatagaaatctttcatcatacgttcaacaggctgattatgttcgcctttatagccgagaagctgagcgacactaaactgctgttcaaacaacagccgattatcataacgggtaacagacagatggagggcaaaacggatacgccagagaaaattctggcattcgtttaattcatcccgctcttcgtgagtcagaaaaccaaaatcgaccatttcatctaaagatgtcgccccgaaatgacggtgagccacccaaaggagagtatggatatcacgtaatcctcccgggctgctttttatatcaggttccagattgtagctggtactgtggtatcgctgatgacgatttttctgttcggtgagcttggaggcaaaaaattgggctgatggccagaaatcatcactgaaaatgtgtttttgtaagcgcaggaacagaggtaaatcaccacagattaagcgggattccactaagttagtagcgatagtcagatcggaaagccctttttcaaggcactcttcgagagttctgacactgtggccgacatccagacggatatcccagagcagagcaataaagcgtccaatctgggttgattgttcttcagtcagcgggtgttcactcagaatcagcagatcgatatctgaaagaggatgcaactcgcgtcttccataacccccaacagcaatcagggaaagagtatctatctgatcaaacccatactgctgccataaccgggtcagaagtttatcaatataatcactacgtgcataaatcagtgcggtcggggaaatacccgctttgaatgcctgttcaagccatagttgaaactcatcaatatgctgcttcagcaccgggcattgcagatcatcacatgaaaattctaccggagagacaggaggaatcggggcgtgcgcaaaagcaatatcaactggcatattcagaaacctatgataagaaactgtgagatgggcaggcgtttgtagtcgattttgtagtcgatgatgaagccctgtgaggacagtttatgtacaagggcttcatttggcaatgctatcctgacaacgggatctttggcaggagtgaacaaattatgtcagcagattgttatcgattaatctgtggttggtttacgtaactactcgctaagctattacgcgttaaccaataccgctgaaatctgcgcttcttcctctttgcgccatgtcatgatttcgcagccgttgtcagtaacgacaatagtgtgctcgtattgtgcagaccagccgcgatctttggttttgacagtccagccatctttcatggtacggatacgataatcacccgcattgaccatgggttcgatggtgaaagccatgcctttttgcagcacaacaccgccatcatcggcatcgtaatgaagtacatgcggttcttcgtggaaaacccgaccaataccgtgaccacaatattcacgaactactgagaaatcattcccttccacatattgctgaatcgctttgccgatagtacgcagacggatacccggtttcaccattttcagcgcaaggtacagactttcctgagtcacacggcacagacgttcgccctgaatcgttggtttaccaacgatgaacattttggaggtatcgccgtggaattcatctttaataacagtaacatcgatattaacgatatcgccgtctttcagtaccttgtcatcacttggaataccgtggcaaatcacgtcattgaccgaaatacagacggatttaggaaaaccgtgataacccagacaggcagaaatagcctgctgtttattcgtgatgtgttcgtggcaaatccgatcaagttcacccgtggtaacgcctgctttaacgtgttgctcgatcatctccagaacttcagctgccagacgaccggcaacgcgcattttctgaatatcttcgtctgttttgatagtaatagccatgaaatcagtccattagaaccggtaaatcaccgattctttgatattagttaatgaaaaaatgatggagttaatggtatcagcctgcctgatatctaacaataaccgttgattgctaagacgtcagaaagcgataacaaatgttggtgtatagggtcggattatggtataaagcgcgccggtattctgtgtaattgtttcctgtggaagcaatatttcagaaatgctaaataaactcatttgtgtaaataacacacacggatcggcacatacaccggggtgctctcatgtgactaattcgtatgaatctctttcatgcggtatgaatagcacacagttaaagagtcggtgtcatgggatctgtggaggcataaccccaattaactttatagaggtctaaaatggcaactgtttccatgcgcgatatgctgcaagcgggcgttcacttcggtcaccagactcgttactggaacccaaaaatgaaacctttcatctttggcgctcgtaacaaagttcatatcatcaacctggaaaaaactgttccaatgttcaacgaagctctggctgaactgaacaaaattgcttcccgtaaaggcaaaattctgtttgttggcaccaagcgtgctgcaagcgaagcagtaaaagaagcagctctgggctgtgaccaatacttcgttaaccaccgttggttaggtggtatgctgactaactggaaaactgttcgtcagtcaatcaaacgtctgaaagatctggaagctcagtctcaggacggtacttttgacaagctgactaaaaaagaagcgctgatgcgttctcgtgagcttggcaaactggaaaacagcctgggcggtatcaaagacatgggcggcctgcctgatgctctgtttgttatcgatgctgaacatgaacacatcgctatcaaagaagcaaacaacctgggtatcccagtattcgctgttgttgatactaactctgatccagatggcgttgatttcattatccctggtaacgacgacgcaatccgtgcagtaaaactgtacctgactgctgctgcgacttctgttcgtgaaggccgttcacaggatctggctgttcaggctgaagaaggtcttgtagacgctgaataataaggcatgctcatttctgagcccttattgaccaggtattgaaatatattggttagggggcctgtcacggccccctttacatatctgatatagaactatacccaatggatttcgagttgcatcgcggcggcaaggaagtgacaaattcgtcgggaacgaatttgcccagccaaaggctggcctccggtgagaggcaggagcctctcagtaatccccgggagcatagataactatgtgactggggtgaacgagcgcagccaacaaagaggcagcttgaaagacgaaggatattatctgataactttccacgcggaatattatcttcccgcgagacacatcgaggaattaaacaaatggctgacattaccgctgctctggtaaaagaactgcgtgagcgtactggcgcaggcatgatggaatgtaaaaaggcactggttgaagcgaatggtgatatcgagctggctatcgataacatgcgtaaatcaggtcaggcaaaagcggctaaaaaagcaggccgtgttgcagctgaaggcgttatcctggttgaagtttcagcagatgctaaattcgcaggtatcgttgaactgaactgtgaaactgacttcgttgctaaagatgctggcttcctggcattcggtaaagaagttatcacttccgttatggctgacaaaaattctgacatcgatgcactgaaagctaagttcgaagaacagcgtactgaactggttgctaaaatcggtgaaaacatcaacatccgccgtgttgctattctggaaggcgaagctgtaggttcttacctgcacggtgctcgtatcggtgttctggttgctgctgaaggtgcaagcgaagaactgatcaagcacgttgcaatgcacgttgctgcaagcaaaccagaatatgttgacccatctgacgttcctgctgacgttgttgcgcgcgagcatcagatccagctggacatcgcaatgcagtctggcaaaccacgcgaaatcgcagagaaaatggtttctggccgtatgaacaaattcaccggcgaaatctctctgaatggtcagaacttcgtgatggatccaagcaaaactgttggcgctctgctgaaagagaacaacgctaaagttatcaacttcatccgttttgaagttggcgaaggcatcgagaaagttgaagctgacttcgcagcagaagttgctgcgatgagcaaacagtcttaattgtcttaacggagccgccgattggcggttctgttttatttaagaagaattttttacatctggctgcatagcatggatgtgtattaactgaataattgtagtaacccccaataatccttatctgcttaggactgaaacaccatggcaaccaatgcaaaacccgtatatcagagaatcctgcttaagctcagtggagaagccctgcaaggcgcagaaggttttggtatcgatgctagcgtcttagaccgcatggctcaggaaatcaaagaactggttgagctgggtattcaagtcggcgtcgttattggcggaggcaacctgtttcgcggagccggtctggctgaagcaggaatgaaccgtgtagtcggcgaccacatgggcatgttggcaacagtaatgaatggtctggcaatgcgtgatgccttacacc

SEQ ID NO: 1684 - DNA, 9478 bp, Xenorhabdus sp.; identical to SEQ ID NO: 1683
  CDS (8191)..(9048)

SEQ ID NO: 1685 - DNA, 9478 bp, Xenorhabdus sp.; identical to SEQ ID NO: 1683
  CDS (7112)..(7837)

SEQ ID NO: 1686 - DNA, 601 bp, Xenorhabdus sp.
  CDS (1)..(327)
cttctcggccactccgcgaagggccttgaatatgcgctccccaccataggtggtgccgccgggcgaggaaatcgacacgatcagccctttgacattgtcgctcctggcgatcttgtcgagccgttccagaagttcggtattgtcctggatcagaccggaaatctcgacacgggcaatgtgtggtctggcgctttgctgcggcctgtcccacaaaaaccggtagaggccgaaggcgccggcgacgagcaggaaaacagcggcaatccgccagaaagtcagcttgcggcgcaatcgcctgcgatccgctatcgccatattatccattgaaaacctctgccatccggccttatgacaccaccctgcctcacggccatatggttcttctagcgcgaagccgcaaggaaacaataaggaaaccagaattacgataaaattcgcatttcccttgcacctttccagacaaaaaccatattggcaggacaaagcactcgtgccaaacacattacgataaacatacaagcttcaattgcgcgccagaatggcgcccaggaagatttccggatccactcttatgcttgaaagactccgggaacccgcgcca

SEQ ID NO: 1687 - DNA, 6002 bp, Xenorhabdus sp.; identical to SEQ ID NO: 195
  CDS (3301)..(4332)

SEQ ID NO: 1688 - DNA, 6002 bp, Xenorhabdus sp.; identical to SEQ ID NO: 195
  CDS (2455)..(3138)

SEQ ID NO: 1689 - DNA, 6002 bp, Xenorhabdus sp.; identical to SEQ ID NO: 195
  CDS (1423)..(2346)

SEQ ID NO: 1690 - DNA, 6002 bp, Xenorhabdus sp.; identical to SEQ ID NO: 195
  CDS (785)..(1042)

SEQ ID NO: 1691 - DNA, 6002 bp, Xenorhabdus sp.; identical to SEQ ID NO: 195
  CDS (3)..(377)

SEQ ID NO: 1692 - DNA, 9011 bp, Xenorhabdus sp.
  CDS (8143)..(8232)
agggcattgagcaaatttgtctggccatctgaacgcagtgcttccaacggaatctgtgaccctgtcacgataacgggcttgttaagattttcaaacatgaaagagagggctgaggaggtaaaagccatggtatctgtaccatgcaggatcacaaaaccatcgtaatcatggtaattctgataaatatcactggcaataattccccaatcatctggactcatatcagaagaatcaataaggggatgatgctcacggatagtgaatgttggcatttctgggcggtgaaactcgggcatttttgtcagctgccgctgtaaatgaccggaaacgggaatatagccattgggggaatgctgcatcccaatggttccacccgtataaacaacatagatagatttcttctgcatggtcgtaacccagtaacggtagtttaaaaattctttgccgattatagggagtataaggaataaaaaaagcctgatattggtatatatacacttcgtctttcaagttgcctctttgttggctgcgctcgttcaccccagtcacatagctatctatgctcccggggatgaactcccttgtcgccgcgcgcatcttgaaatccattgtgtatggcaatcaggctttatatttaattgtgattatcacgttatggtgatgaattctcagcggatatcgctacagttcaggcaataagcataaatattttgtggatcattcatgcggttataaaataccgcctgctttttcatatcctgtgctgcctgagcaaatggagctggcaacattgactgtaaagtatttggcataattgcctgtgctgatgaagaaaattccagcattagtttttcagtaaatgaaagttcaggctgcatccagcttagcgatactgttttaaggcctgccagttcagcggctttcttaacggcgtcatcgaaatcgcctaactgatcaaccagaccattctttttagcatcactaccactccagacacggccttcagcgattttttcaatctcagcggttgtcttgtggcgagaatttgctaccagcccgataaactggctatagccgttttcaatcgacatttgtatgacttcagaaaacagaggatttaacccttttgttgtagaaatatcagccagtggataagttgaaacaccatctgtatttacgccaagataatcaaggcttttttcaaaagtagtgatagcgccaaaaacaccaattgagccagttaaagtattcggggaggcgataatatagttagccggtgtggatacccagtaaccgcctgatgcagcaagccctcccatggaaacaacaatcggcttttgattgatctttttaccatttacatcagtaccttcccgaatggccaccagttcactgcggataagttcagatgcactgatactgccgccggggctgtttactcgcaagataatggctttaatattagggttcagacgtgcttggcgtagttgttctgcgatggtatcactgccagctatactgccggattgtttgccatccatgatttccccttcaaccacaattactgcaatattaccatcgttctgataagcatcttcgatgggttttttagcaatataatcattgatagtgatgtagttgaaatgctgatttttcttatcccagccgaatttcttttccagcttttgttcaatgacattcagaggcgcgattctatctaccagaccattctggagggcatagagagcactattaccacctgctttacggagtttttcaataaatactgaaggttcaggaagtacctgactgattgggatttttctattggcggcaatatcctgtcggtaattattccaaagttcattcagccagagggaatctgctgcgcgggcagcatccgacatatcattccgcatcattggctctacggctgatttatatgtaccgacacggaaaatatgggtagaaattttcaggttttctaataatgacttatagaacaaatggttatttgaataacctttaagagagacactgccttgaggggtaaggagtattttgtcagcatagctggctaaatagtattgtggctggctgtagctctgtccgatagctgtaacggatttacctgagcttttaaattcgttgatgactttgccgatataaagcatcgatgcctgatcagctcctgcaaaatcatccagtttcaacaccataccggtaattttggtgtcattttttgcccgtcgaatactatcaacaatatcaaatagcgaagtttgttgaatacgcccgctggaaggatagacaagatcccagcccagttgatccagcggattgcgggcagatacccgatcaacgatagtaccagataaattgacgtacaatgctccaccataatcactatcatctgcgggaaactgttctttataaataagaacgccagtggcaactaatacaataaataaaataaacaatagattggaaataaattggcgagcgaaatttagcagtttccaactccatttaagtagccctgctataagcttccacaaagtatgcatactatctccgatgatgagatcaaataagattatcctaatcagctaactgataaatgtcagccagaaatcacgaaaatgattgaaaaaataatatttacactttcattcggtaacgaataaacagagaatgtccggtcgtgatagattatcttattcaggaggaaactatgaaagccttggaactcttattgaatcgtcgttctgtttcacgtttaactactccggtccctgcgggggatgaattgcagaatatccttgctgccgggatgagagcaccagaccatggagcattacgtccctggcactttattgtcatgcaaggggaaggaattgataaattcagcaaattgctcgaacaggcagcaattaatggtgaaatgggtgacgatgtggcagaaaaagcaaaaaatgccccttatcgtgcaccgatgattatcactgttattgctaaagtagttgagcatgtaaaagtgccagaatgggaacaagttgtagcagcaggctgtgcagtacatgccatgcaaatggcagccgtggctcaagggtttggtggaatatggcgttctggttcttggacagaagacttaacagtcagagccggactgggatgtgaagagcacgacaaaattgttgggttcctctatctgggtacaccagaacttaaatcaccaatgaaagtctcttcaccagatttaactgattttgtcagttatttctaaaaattactgttagagttactagatacatcattacctgatgtggtggataggataaacaccactacatcagcttatcccattaatttattgcctaggtgaactgaattaaccacactcagacagggcattgattgaagttgttacaaattacatgcgtctttttattgctgaaaaacctagcctcgcacgtgctattgccgatattttaccgaaacctcatcgtcggggagatgggtttattgagtgtggtgatagtcaggttgttacctggtgtgtaggtcatttgttagaacaagctgagccagatgtatacgatcgccgttatgcgcgctgggtcttggctgatttgccaattattcctgaaaaatggcaattaaaaccacgagaagcggttgctaaacagctcaatacgattaaatctcttttggcaagggctgatgaaattgttcatgccggagacccggatcgcgaagggcagttgctggtggatgaagtgctggattttttgcagttggaagacaataaaaagcagaatgtccaacgttgtctgatcaacgatttaaatcctcaggcagtacttaaagccgtcgagcgtctgaggagtaaccgggaatttatccccctgtgtgtttcagctttagccagagcaagagctgattggctttatgggatcaatatgacccgggcttataccttattgggtcggaatgctggttatcaaggggttctatcggttggccgagtgcagactcctgtactgggcttggttgttcgtcgtgatgaagaaatagaacattttataccaaaggatttctttgaggttaaagctcatattattaccccgaaagaagagcggttcaccgctgtatggcagcccagtgagtcctgtattgattttcaggatgaagaagggcgggttattcaccggcctttagcagaacatgtagtaatgcgcattatggggcagcctgcttatgttgctgcctatcaggacaaacgggaatcagaaacagcgcctttgccattttctctttcttcattacagatcgaagcagccaggcgttttggtctgagtgctcaggatgtgctggatatttgtcagcggttgtatgaaacccataaattgattacatacccgcgttcagactgtcgttacctaccagaagaacactttgcgggtcgtcaggctgttttaaacgctatttcggtacatgccagccatttgttgcctcaggatgcgcttgatacggaaaaaaagaatcgttgctgggatgataaaaaagttgatgcacatcatgcaattattcccacagcgcgaagcagtcaggttaagttgacagaaaatgagcagcatatttatggattggtagccagacagtatctgatgcagtttttcccggatgctatattccggaaatgcacaattgaactggatattgctggtggaaaattcattgccaaggctcgctttctggcagaggctggctggcgaactttattaggtaacaaagagcgtgatgaggagaatgagggtactcctctgccgattgttgctaaaggtgatgaactgttatgcgagaaaggagaagtcgtggaaaggcagactcagccaccacgtcatttcactgatgccactttattatctgctatgaccggtatcgctagatttgttcaggataaagcgctgaaaaaagttttacgggcaacagatggtttggggacggaagcaacaagagccggaattattgaattattgttcaagcgggaatttctgtataaaaagggacgatatattcatgcaacaccagcaggctgtgcgttaatccatgttttacctgatatggctgtcttgcctgatatgaccgcgcattgggaatccaaactgactcaaatcagtgagaagcaattccgttatcaggattttatgtcgcctcttcatgaaacattgcaacaattgatttggcaggcaaagcagtatagaaatttgaaagccttcagggacctgcctcccgctcctgtgaaagggaaaaaaagtaaaggtaagcaagctaaaaccaagcagacaaataaagctgaataatttaataaataaagagagaagaatacagcaccgaaattgtacgatgctgtattttattttaaatcttaaactcagcccagactggtgcgtgatcggaaggtttttccatggcgcggatatcataatcaataccagcagagaggcatttttctgctaatggctggcttgcaagcaacaagtcaatgcgaagtccacgattatcgttaaaccctttagagcggtaatcgaaccacgaaaattggtcactgatttccggatgatgagcccggaatgtatcaaccagcccccagttttttagacgttccatccattctctttcttcaggcaggaaagaacattttccggtttttaaccaacgtttctgattattctctcctattccaatatctaggtcagtcgggctgatattcatatcacccataatgagaatattggatcccggagattgatttgtttccagataggtttgcagatcctgataaaatttttcttttgcagggaattttatctcatgattacgactttcaccttgtggaaaataaccgttaatcacagtcagtaagccggaaggagtttcgatatctgccatgataatgcggcgttgagcatcatcatcgtcagttggaaaaccttttctgacagctgttggctgttggcgagtcagtagggcaactccataatgagatttttgaccgtgatagaagatatgatagccaagttgactgacttcttctaaaggaaacatctcatcatgaacttttgtttcctgtaatccgataacatcaggttgatgttgttcaacaatcgcagcaagttggtgaggacgcgcccgcaatccattaatattgaatgatataaatttcatatcgttataatcacctaaataatgtttttcttttcaatcttatcagatataaataagaatgtaaccatttattaaataataattttaggcggattatctagatgtttcactattttactcatatatgtaatgtgatattgaatataattcgcttattattcaaatttaaagaatgtaatcatgttaaataatagaaaagcatatgattaataagtggagatttaataaataaatgcttatttaattagtaatgctctgttatattcacattcgatattatgtttttaggtgagatttttcattcttgaaatttattctatgtcacgcgttacaaaaaataattaatgaaaaagtagaacagttaatcaatctctgatagaaaattgaacctgtaggccatgtttatatttattaatggtttacattcacgatggaatattcatcatgatacaggtgaataatatagttcatctgaaccgcatttttgcatcaggggctggcatttcatataaatgccatttgaaaaatagctatttttattgtacaaaattataccttcacaatatcaagtttgatttagcggttacctgatgagaaggccatttcaaggatattattttagccacaagttacataggaacggtgaattatgtttttttctcgtaaattagaagcattcatggcggtggtggaaatgggttctttaagcaaagcggcaagagtgatgaaccgtacgactcccccagtcgctaaatcaattaaagactttgaggcgacgttaggaaagcgcttatttaaaagggagaagtttgggatgatactgactaaagacggagcggatctatataatgacttaaaagaactttatttgaaagaaaaagaaattacaaagaaacactttagtgggactatttgtaatagtgttaatatctactatgattgggggaaagatagacatctgatttcgctgtataaagctgcagatagaaataatgctcaagttaatatattacgattcagttatgataacatcgatgaaatagttgattatgaaggaaataccataatcctaagttctgaaaaaatcctcagtgatagattcagtctggtgcgaaaaattgaaggccagaatttaggagtttgttgtcgtcaggaattaattgatgaatccaatggtgatttaacccagctattgaaaaataaaacatggttatgcgatccagttctctataaaagtgattttataaagaatttggaagaggatatgcagaaaaatggagaaaaggctaatataagacaaatggacaatatggagtgttgtcttaattttattcagtctaaagattatatttttattacagatgcccgttatggtgcattagaggaaggaaaaagtttgggttttattccaatttcacgagctgatgcagtgaatcagtgttacgtctataaatctaaatcacactcaagcgtgttgaatcgttttatcgattctgttagtgatatggagtaaccgattgcataagcggagcgaattgcagatcctccagagctccgctattggtgttttgtgagcacgccaattttacaatattcatttactcattgagtaaattagatggttcttcccccaagcaatatatctgttagctttgacagtaaatgcaaataatggaatataattttgaatatggtgggggaaggatgacgcgctactacgatttatacttaccttacatttttttatctcgcagctcagaatgccgcacatatcgtgatttcattgcgtttatctgaatatagccgaataatttcaatatattccctaacgaaactcgtgaaaattgctcctcattgaagcaaggtgcgattttacttgagtaatatgatagctaataaacggattatctggatggtggtgggggaaggattcgaaccttcgaagtctgtgacggcagatttacagtctgctccctttggccgctcgggaaccccaccaaattttgaattgtacgctgttgttgtcagcggacggcatcatatcaaatgagccgccgctgtaaagtaaatattaaaaatcaggtatcaagtgctggttatttaatccctgagggcaaatttcactccattataagattacagtgcgattgccatagacaaatactcgctgggaaagaacagagtgtagtgctttactcagcacatttttctcaacatctcgtcctgcccgcatcatgtcttcagccgtataaccgtgatccacattaattacatcctgagtgatgatagggccttcatccagattatcattgacgtaatgtgcagtagcaccaatgattttaactccacgttcataggcttgatgataagggcgggctccaatgaatgcaggcaagaatgagtgatggatattaataatttgattcgggtaatgctgaacaaatgccggtgttaaaacgcgcatatacttagcaagtacaacataatcgggattatattgatcaatctgagccattagagcttcgtcatgttgttcccggcttaaactttcatgactgatatgatggaatggaataccgaattgctcaactaatgattgcagagtggtgtggttaccgataactgcggctatttccacatccaaaccttcgtaagcgctttttactaatatatcaccaatacagtgagcttcttttgttaccatgataacaatacggcgtcggcctgctgtatttaattcacggctagagccggtaggaagggcatcatctttagagcac

SEQ ID NO: 1693 - DNA, 9011 bp, Xenorhabdus sp.
  CDS (2)..(652)
gtgctctaaagatgatgcccttcctaccggctctagccgtgaattaaatacagcaggccgacgccgtattgttatcatggtaacaaaagaagctcactgtattggtgatatattagtaaaaagcgcttacgaaggtttggatgtggaaatagccgcagttatcggtaaccacaccactctgcaatcattagttgagcaattcggtattccattccatcatatcagtcatgaaagtttaagccgggaacaacatgacgaagctctaatggctcagattgatcaatataatcccgattatgttgtacttgctaagtatatgcgcgttttaacaccggcatttgttcagcattacccgaatcaaattattaatatccatcactcattcttgcctgcattcattggagcccgcccttatcatcaagcctatgaacgtggagttaaaatcattggtgctactgcacattacgtcaatgataatctggatgaaggccctatcatcactcaggatgtaattaatgtggatcacggttatacggctgaagacatgatgcgggcaggacgagatgttgagaaaaatgtgctgagtaaagcactacactctgttctttcccagcgagtatttgtctatggcaatcgcactgtaatcttataatggagtgaaatttgccctcagggattaaataaccagcacttgatacctgatttttaatatttactttacagcggcggctcatttgatatgatgccgtccgctgacaacaacagcgtacaattcaaaatttggtggggttcccgagcggccaaagggagcagactgtaaatctgccgtcacagacttcgaaggttcgaatccttcccccaccaccatccagataatccgtttattagctatcatattactcaagtaaaatcgcaccttgcttcaatgaggagcaattttcacgagtttcgttagggaatatattgaaattattcggctatattcagataaacgcaatgaaatcacgatatgtgcggcattctgagctgcgagataaaaaaatgtaaggtaagtataaatcgtagtagcgcgtcatccttcccccaccatattcaaaattatattccattatttgcatttactgtcaaagctaacagatatattgcttgggggaagaaccatctaatttactcaatgagtaaatgaatattgtaaaattggcgtgctcacaaaacaccaatagcggagctctggaggatctgcaattcgctccgcttatgcaatcggttactccatatcactaacagaatcgataaaacgattcaacacgcttgagtgtgatttagatttatagacgtaacactgattcactgcatcagctcgtgaaattggaataaaacccaaactttttccttcctctaatgcaccataacgggcatctgtaataaaaatataatctttagactgaataaaattaagacaacactccatattgtccatttgtcttatattagccttttctccatttttctgcatatcctcttccaaattctttataaaatcacttttatagagaactggatcgcataaccatgttttatttttcaatagctgggttaaatcaccattggattcatcaattaattcctgacgacaacaaactcctaaattctggccttcaatttttcgcaccagactgaatctatcactgaggattttttcagaacttaggattatggtatttccttcataatcaactatttcatcgatgttatcataactgaatcgtaatatattaacttgagcattatttctatctgcagctttatacagcgaaatcagatgtctatctttcccccaatcatagtagatattaacactattacaaatagtcccactaaagtgtttctttgtaatttctttttctttcaaataaagttcttttaagtcattatatagatccgctccgtctttagtcagtatcatcccaaacttctcccttttaaataagcgctttcctaacgtcgcctcaaagtctttaattgatttagcgactgggggagtcgtacggttcatcactcttgccgctttgcttaaagaacccatttccaccaccgccatgaatgcttctaatttacgagaaaaaaacataattcaccgttcctatgtaacttgtggctaaaataatatccttgaaatggccttctcatcaggtaaccgctaaatcaaacttgatattgtgaaggtataattttgtacaataaaaatagctatttttcaaatggcatttatatgaaatgccagcccctgatgcaaaaatgcggttcagatgaactatattattcacctgtatcatgatgaatattccatcgtgaatgtaaaccattaataaatataaacatggcctacaggttcaattttctatcagagattgattaactgttctactttttcattaattattttttgtaacgcgtgacatagaataaatttcaagaatgaaaaatctcacctaaaaacataatatcgaatgtgaatataacagagcattactaattaaataagcatttatttattaaatctccacttattaatcatatgcttttctattatttaacatgattacattctttaaatttgaataataagcgaattatattcaatatcacattacatatatgagtaaaatagtgaaacatctagataatccgcctaaaattattatttaataaatggttacattcttatttatatctgataagattgaaaagaaaaacattatttaggtgattataacgatatgaaatttatatcattcaatattaatggattgcgggcgcgtcctcaccaacttgctgcgattgttgaacaacatcaacctgatgttatcggattacaggaaacaaaagttcatgatgagatgtttcctttagaagaagtcagtcaacttggctatcatatcttctatcacggtcaaaaatctcattatggagttgccctactgactcgccaacagccaacagctgtcagaaaaggttttccaactgacgatgatgatgctcaacgccgcattatcatggcagatatcgaaactccttccggcttactgactgtgattaacggttattttccacaaggtgaaagtcgtaatcatgagataaaattccctgcaaaagaaaaattttatcaggatctgcaaacctatctggaaacaaatcaatctccgggatccaatattctcattatgggtgatatgaatatcagcccgactgacctagatattggaataggagagaataatcagaaacgttggttaaaaaccggaaaatgttctttcctgcctgaagaaagagaatggatggaacgtctaaaaaactgggggctggttgatacattccgggctcatcatccggaaatcagtgaccaattttcgtggttcgattaccgctctaaagggtttaacgataatcgtggacttcgcattgacttgttgcttgcaagccagccattagcagaaaaatgcctctctgctggtattgattatgatatccgcgccatggaaaaaccttccgatcacgcaccagtctgggctgagtttaagatttaaaataaaatacagcatcgtacaatttcggtgctgtattcttctctctttatttattaaattattcagctttatttgtctgcttggttttagcttgcttacctttactttttttccctttcacaggagcgggaggcaggtccctgaaggctttcaaatttctatactgctttgcctgccaaatcaattgttgcaatgtttcatgaagaggcgacataaaatcctgataacggaattgcttctcactgatttgagtcagtttggattcccaatgcgcggtcatatcaggcaagacagccatatcaggtaaaacatggattaacgcacagcctgctggtgttgcatgaatatatcgtccctttttatacagaaattcccgcttgaacaataattcaataattccggctcttgttgcttccgtccccaaaccatctgttgcccgtaaaacttttttcagcgctttatcctgaacaaatctagcgataccggtcatagcagataataaagtggcatcagtgaaatgacgtggtggctgagtctgcctttccacgacttctcctttctcgcataacagttcatcacctttagcaacaatcggcagaggagtaccctcattctcctcatcacgctctttgttacctaataaagttcgccagccagcctctgccagaaagcgagccttggcaatgaattttccaccagcaatatccagttcaattgtgcatttccggaatatagcatccgggaaaaactgcatcagatactgtctggctaccaatccataaatatgctgctcattttctgtcaacttaacctgactgcttcgcgctgtgggaataattgcatgatgtgcatcaacttttttatcatcccagcaacgattctttttttccgtatcaagcgcatcctgaggcaacaaatggctggcatgtaccgaaatagcgtttaaaacagcctgacgacccgcaaagtgttcttctggtaggtaacgacagtctgaacgcgggtatgtaatcaatttatgggtttcatacaaccgctgacaaatatccagcacatcctgagcactcagaccaaaacgcctggctgcttcgatctgtaatgaagaaagagaaaatggcaaaggcgctgtttctgattcccgtttgtcctgataggcagcaacataagcaggctgccccataatgcgcattactacatgttctgctaaaggccggtgaataacccgcccttcttcatcctgaaaatcaatacaggactcactgggctgccatacagcggtgaaccgctcttctttcggggtaataatatgagctttaacctcaaagaaatcctttggtataaaatgttctatttcttcatcacgacgaacaaccaagcccagtacaggagtctgcactcggccaaccgatagaaccccttgataaccagcattccgacccaataaggtataagcccgggtcatattgatcccataaagccaatcagctcttgctctggctaaagctgaaacacacagggggataaattcccggttactcctcagacgctcgacggctttaagtactgcctgaggatttaaatcgttgatcagacaacgttggacattctgctttttattgtcttccaactgcaaaaaatccagcacttcatccaccagcaactgcccttcgcgatccgggtctccggcatgaacaatttcatcagcccttgccaaaagagatttaatcgtattgagctgtttagcaaccgcttctcgtggttttaattgccatttttcaggaataattggcaaatcagccaagacccagcgcgcataacggcgatcgtatacatctggctcagcttgttctaacaaatgacctacacaccaggtaacaacctgactatcaccacactcaataaacccatctccccgacgatgaggtttcggtaaaatatcggcaatagcacgtgcgaggctaggtttttcagcaataaaaagacgcatgtaatttgtaacaacttcaatcaatgccctgtctgagtgtggttaattcagttcacctaggcaataaattaatgggataagctgatgtagtggtgtttatcctatccaccacatcaggtaatgatgtatctagtaactctaacagtaatttttagaaataactgacaaaatcagttaaatctggtgaagagactttcattggtgatttaagttctggtgtacccagatagaggaacccaacaattttgtcgtgctcttcacatcccagtccggctctgactgttaagtcttctgtccaagaaccagaacgccatattccaccaaacccttgagccacggctgccatttgcatggcatgtactgcacagcctgctgctacaacttgttcccattctggcacttttacatgctcaactactttagcaataacagtgataatcatcggtgcacgataaggggcattttttgctttttctgccacatcgtcacccatttcaccattaattgctgcctgttcgagcaatttgctgaatttatcaattccttccccttgcatgacaataaagtgccagggacgtaatgctccatggtctggtgctctcatcccggcagcaaggatattctgcaattcatcccccgcagggaccggagtagttaaacgtgaaacagaacgacgattcaataagagttccaaggctttcatagtttcctcctgaataagataatctatcacgaccggacattctctgtttattcgttaccgaatgaaagtgtaaatattattttttcaatcattttcgtgatttctggctgacatttatcagttagctgattaggataatcttatttgatctcatcatcggagatagtatgcatactttgtggaagcttatagcagggctacttaaatggagttggaaactgctaaatttcgctcgccaatttatttccaatctattgtttattttatttattgtattagttgccactggcgttcttatttataaagaacagtttcccgcagatgatagtgattatggtggagcattgtacgtcaatttatctggtactatcgttgatcgggtatctgcccgcaatccgctggatcaactgggctgggatcttgtctatccttccagcgggcgtattcaacaaacttcgctatttgatattgttgatagtattcgacgggcaaaaaatgacaccaaaattaccggtatggtgttgaaactggatgattttgcaggagctgatcaggcatcgatgctttatatcggcaaagtcatcaacgaatttaaaagctcaggtaaatccgttacagctatcggacagagctacagccagccacaatactatttagccagctatgctgacaaaatactccttacccctcaaggcagtgtctctcttaaaggttattcaaataaccatttgttctataagtcattattagaaaacctgaaaatttctacccatattttccgtgtcggtacatataaatcagccgtagagccaatgatgcggaatgatatgtcggatgctgcccgcgcagcagattccctctggctgaatgaactttggaataattaccgacaggatattgccgccaatagaaaaatcccaatcagtcaggtacttcctgaaccttcagtatttattgaaaaactccgtaaagcaggtggtaatagtgctctctatgccctccagaatggtctggtagatagaatcgcgcctctgaatgtcattgaacaaaagctggaaaagaaattcggctgggataagaaaaatcagcatttcaactacatcactatcaatgattatattgctaaaaaacccatcgaagatgcttatcagaacgatggtaatattgcagtaattgtggttgaaggggaaatcatggatggcaaacaatccggcagtatagctggcagtgataccatcgcagaacaactacgccaagcacgtctgaaccctaatattaaagccattatcttgcgagtaaacagccccggcggcagtatcagtgcatctgaacttatccgcagtgaactggtggccattcgggaaggtactgatgtaaatggtaaaaagatcaatcaaaagccgattgttgtttccatgggagggcttgctgcatcaggcggttactgggtatccacaccggctaactatattatcgcctccccgaatactttaactggctcaattggtgtttttggcgctatcactacttttgaaaaaagccttgattatcttggcgtaaatacagatggtgtttcaacttatccactggctgatatttctacaacaaaagggttaaatcctctgttttctgaagtcatacaaatgtcgattgaaaacggctatagccagtttatcgggctggtagcaaattctcgccacaagacaaccgctgagattgaaaaaatcgctgaaggccgtgtctggagtggtagtgatgctaaaaagaatggtctggttgatcagttaggcgatttcgatgacgccgttaagaaagccgctgaactggcaggccttaaaacagtatcgctaagctggatgcagcctgaactttcatttactgaaaaactaatgctggaattttcttcatcagcacaggcaattatgccaaatactttacagtcaatgttgccagctccatttgctcaggcagcacaggatatgaaaaagcaggcggtattttataaccgcatgaatgatccacaaaatatttatgcttattgcctgaactgtagcgatatccgctgagaattcatcaccataacgtgataatcacaattaaatataaagcctgattgccatacacaatggatttcaagatgcgcgcggcgacaagggagttcatccccgggagcatagatagctatgtgactggggtgaacgagcgcagccaacaaagaggcaacttgaaagacgaagtgtatatataccaatatcaggctttttttattccttatactccctataatcggcaaagaatttttaaactaccgttactgggttacgaccatgcagaagaaatctatctatgttgtttatacgggtggaaccattgggatgcagcattcccccaatggctatattcccgtttccggtcatttacagcggcagctgacaaaaatgcccgagtttcaccgcccagaaatgccaacattcactatccgtgagcatcatccccttattgattcttctgatatgagtccagatgattggggaattattgccagtgatatttatcagaattaccatgattacgatggttttgtgatcctgcatggtacagataccatggcttttacctcctcagccctctctttcatgtttgaaaatcttaacaagcccgttatcgtgacagggtcacagattccgttggaagcactgcgttcagatggccagacaaatttgctcaatgccct

SEQ ID NO: 1694 - DNA, 9011 bp, Xenorhabdus sp.; identical to SEQ ID NO: 1693
  CDS (2781)..(3587)

SEQ ID NO: 1695 - DNA, 9011 bp, Xenorhabdus sp.; identical to SEQ ID NO: 1693
  CDS (6445)..(8343)

SEQ ID NO: 1696 - DNA, 9011 bp, Xenorhabdus sp.; identical to SEQ ID NO: 1693
  CDS (8605)..(9009)

SEQ ID NO: 1697 - DNA, 9011 bp, Xenorhabdus sp.; identical to SEQ ID NO: 1692
  CDS (6956)..(7744)

SEQ ID NO: 1698 - DNA, 9011 bp, Xenorhabdus sp.; identical to SEQ ID NO: 1692
  CDS (3438)..(5366)

SEQ ID NO: 1699 - DNA, 9011 bp, Xenorhabdus sp.; identical to SEQ ID NO: 1692
  CDS (2735)..(3286)

SEQ ID NO: 1700 - DNA, 9372 bp, Xenorhabdus sp.; identical to SEQ ID NO: 196
  CDS (3720)..(3914)

SEQ ID NO: 1701 - DNA, 9372 bp, Xenorhabdus sp.
  CDS (1495)..(1971)
ccgatagttccgatatgagaagcaatgactttttttacccgcccattgacaatcaaaggccccagaccaatattaacgagcgcggtatcattggtaataagggtcaaatcttttacccctgtatcaaataacgctgtaactaaatgtggtggagtgccaaccgccataaatccgccaaccataatggtcattccatcacaaaagaattcctttgcctgctcaatcgttatttgtttatttttcatgttactttccttattaataaaatcctcttcaacaatgaaataataaagtggataaaaaaatattaaattttaatttttccacccataatagaataattaagacaacaaattttatttaatctatataaattgatagaaattagcttattatgcggtaataaaatttaaatactgagaaatttatgacatgaaaatcccaaacgaaaaaataattctaaaaacaaataattggattgttaatcataggattgattcatcccttcctggctatgtgatactacaatccagtcataaccacatgaatctttgtgatttatcaaacaaagccatacaggaaatgggaattctgatgggatatattgaaaaaaccttaaaaaaatttatctttccaaaatatatctatataggaagatatggtcatacacccaatacaccatttcactttcattttatacctgtatcacaatggatattgaatttattctggagtgatgaacgttatcggatattaggtgattttgggaaatcatcagagtcacaccttactgatggagctgagctaactttttttatttggcgtgaattttgcgagaaagaaatttcaccgccagtgcaaggaatttctgttgatgagattattgcagcactaaaaatagaactaaaaaacgcaataaccgtttcatgagaaaaatcatccagaaaattcaattaataatcaaagtattaaccacctaaagatcgatgttatcattacaggttatgacacgtattgtattcaaatttataaaaaaagagagagctatttattagctgtttattgtatgctagattcatgtaacatatattattatcaaagtatgttttcacacaccctcatttgcttcttattattccttaaccctccctgttttctgggagggttctttgttatatatacccaccttcttttagaaattctctccttctattacacctgtaatataaattaagtatttataacttaatgattttgttataaacactcatatgtattactgtataaatcacatatattttataatagtgatttaatataacacattaataaatttactatttttacagtcaagcacggaaaataggacttttatcatgaatattaaaaagccattattgttagtaggactgacagctttattctctactcctctatttgctaatgctgagtctcagaatcgccatggctatatagaaaaccctccaagcaccagcgcttttgtgtaaaaaaggaatcaataaaaattgtgggcctgtcatgtatgaaccccaatctgttgaaggcccgaaaggatttcctgaagcagggccacctgatggccagatagccagtgcgggtgttggacaattcaaacagctcaatgaacaaagcgcagatcgttggcatcacgttccggttaataaaggacaaaatacatttaagtggcatttaactgcccgacacagtacgacatcatggcagttttttataactaaacctgactgggatccgaataaacctcttgctcgcgcacaattcgatcttacgcctttctgttcacaggaagatcatgggaaacggccagaacaggaagtgaatattaactgtgaagttcctgatcgctcaggctaccacgtaatccttggtgtctggacaatcgctgatacgtccaatgctttctatcaagtcattgatgctgatataaaatagttatctggggcattaattatgtgctggtgaaagagccagcacatgatagaaacattttttgttcggattttcgacgggccagtaacgcggataattcgtgcccgttggcctgatcccatttcagaaattcctgcgcagcaccttgataattaccctcattcaattttttcagtaacgttgaacgaagaaaattaccaatacccacattaaaaatgaacgaacataacgcatcgaattgtccctgtgttaaagctaccttaacgaatcgctgtaagacggcataaataggggttaaatcttcacgtaaaaatgcttctgcttgttggctggtaatcacctgaccgggaacaactccttttgtatgtccataacctattgtccaaggctcagcgcctgtcgcagggtctggataagcttttagtctcaggccctcataactttttattgcattgataccattttcactgatttccataagcgctctccaatagttgaactcactatcaggttaaaacttattcttttggataaagtatagacagattaaaaagttatacgcatatgtcacagtgcaaatggtgataaatcaacaggttatagttacacaactaaccaattaaaattttaatttcaattggttacattaagttgcaaaaatattttaaattttaaaaaaataatttaataaataccttgactcttttctgtttgtgcataaaatgccactcagaatttagattttcgtgaagtaaatcacaatttataaactctgaaaggaaaccatcatgaaatctgtaaagtctttcttctctaatgtacattgtgttgttattcgtctgtcaacaaaacgtttcatgtaaaaaactatgccaatgctgaaaaaataagccagttaaaataaaaaactggctttttattattcaattctcaaaatagtctgactgattctctaaaatgtactagtcgcaatgtgagctatcacattagattgaaaggcaagattcagatgaatggctatgaggagcggcagcatgaagaattactcagtagtttgtaacgttttataataaaaatccattaacaacataggctaatttaactcaataacctgatttttttaggtaaaattgtctccagtattactcattgttttttgacacagtactctaaagagagaatataagccctttttaggctagggatatttattttagaaataaaaaactcatttttacccggtctaaaataccccaacccataacctttcccaccatatatcaaagtattttcacctatctctaagagctcttttttatttaagatgccaaatttagtgataagggttaatttaggactgacgaattcttgaggttttatttcatgaataataaaactcgcattcttataggaaactgtagctgtatcctgatttgcagaaaaaaaatacatcccgccactcttaagagtagcatcattcaattccttatttattttgcataaatattcgccatcataaggtgattttgcttcagcggtattatatatggctgtaactacccctaccgtcatgacaatcacaactaaccgtactcccatcatagactcctgacaatcttcgtaatggtctatactcgtcgtcttttaagttgccttgttttctggctgcaccctacctctgatgactatcgttaaccataaacgcatagttatttgtctatgctccagaaaatttattctattgctaccacaacacagtttaagatattttcagcataaaacactttatataatccatggattaaaaaaatccataaagaaaacattaagattagattagcatttaccaaagagcaaggaggaaacaaaaaagcataacaatatatacgattaaaacaataacaatatatacgattaaaacaataaatttcacctaaaacagatattacctataatttatattaataatggcatagagtttcaaaaaggcacgatattaataatttaccaatattatcaattggttaatttatatgataaagatataaatggaattatattcagtgaagattagaattgtattctggcagtaaaggaaaaatcagctcagccaatggctaatttttggtgagattttgatacatctctggtcaccatattttataaataagatgaccggttgaagaggtgtagtcccaaagagacagcttaaaagataaagagtgtaattcgttcttatcgtttgccgggactgtatttaatacaaacaaactctaagataagacattaatgaaaatttcatgaaatcatattacgaataattattctattatttcctaggctttgtgaaaatacttttcaactaaagcatatataattgcgatggtttctatatcagaaattccatcataatttgactggcgaaagtgcatttgaaatgctttaatcaaatttttaaaaccgtcattatcattcaagtcagggacatcataaccatactggctaaatttctccagaatattggctctatcaggaaaagactggttaaactttttaatatatttttgttttacctcttcgtcataccacgctcctactcctgcttcatacaactctttccaggggaacgcagggcctggatcacttttcctacccacagcaatatcagaatgcccgataacatgagtcggggtaatatccgggtatcgctgtagtatattaatgactaactccttgatcgcattaacctgctctggatgatagggtggaaaagttatgacaccacaattatcactggcttcattaataatttctatgccgatagatgtatcattcaggttatttcgccctgaccaactactcattcccgcgtgccaggctctttcaggctcatcaaccagattaaatatacgaatactgtcaaatccagctgctttatatgttgggtcatcagggttaggcactaaataatgcgcactgactccctcacccgtcaatgcctcaatagatttttcgaaatttaatgcagtgtaatgcatcactaaaaaacggggacgtcgattaaaacttttgattgaacggtatgagttataatcaattttatacatagatatgctccttaccttttacttatcttataggttaaattgttttaaatgaaacactctgccaaaaacagcagagaattaaatcctaataaattaaaatctcataaaatatctataatcactgaattaactaaaattatctttctggcactgtcaatattcagtaaggattgaatagtatttataaagataagggaattaataacaagaagcaatgcaaaagaaagggaaacaacgagaaaaaaagtaagcatatcgattcatatctctaatatacttactattaataatgattttaatattggacagcagtaaaaatttacaatttctttgccttatttactatctaccggaaagaaaattgccgtcaatatcaatcaaggctcaatttcaatatcagaaaggggataacagctacaaggtaaaatctcgccctcattaacaaatgctaatggcttacaaggataccctaccttcccttttagcaatcgaacacgacaagaaccacaatatccttcacgacattgatattcaatctgtactttgccttgttctaaagcttccaacaaattactgtgaagatgggaagagtaatagacagataatccctgcctcaaaggcagggtaactttgtaatcagccatatcagagttcgaaaccgctgagatcctcagtattgacttccgaatcaatctgaccaaccaaataagagctgacttcgacttcctgtggagccacctgaacattgtcagaaaccaaccacgaattgatccaaggaatcgggtttgagcgaatttcaaatggcagcttcaagcctacagcctgcatgcgaatattagtaatatattcaacatattgactcagaatgtctttattcaggccaatcatcgagccatctttaaacagatactctgcccattctttttcctgttcagctgcctgtacaaacaggtcataacactgctgttcacactcttgtgcaatttctgccatttcaggatcatcctgaccagagcgcagcaggttcagcatgtgttgagtgcctgttaaatgcagggcttcatcacgagcgatcaatttaatgatttttgcattgccttccatcaattcacgttcagcaaacgcaaatgaacaagcaaagctgacatagaaacgaatcgcttccagcgcattaacactcatcaagcataaataaagctgttttttcagtgcgcgcaaactcactgtgatttcctgacccgcaacattatatgtaccctcacccaactggtgatagtaattggtcatttcaatcagatcgtcgtaatactttgaaatatcttgtgctcgtttcaggatctgctcatttgtaacaatatcgtcaaatataacagcaggatcattcacgatattacggataatatgtgtataagaacgcgaatgaattgtttctgaaaacgaccatgtttcaacccacgtttctaattccgggattgaaatcagcggcaggaacgctacgttcgggctgcggccctgaatagaatccagcaacgtctgatatttcagattactaataaaaatatgtttttcatgatccggcagcgcgttgtaatcgatgcgatcacgggaaacatcaacttcctcaggacgccagaaaaacgagagctgtttttcaatcagcttttcaaaaatagggtacttctgttgatcataacgcgctacattcacaggttggccgaaaaacatcggctcctgtaactgatcattttttacttgcgaaaaagtagtataggacatagtttcctcagattaaattttacacgcgccgccttcacaatcggaatcagcagattcgacaacttcttccaaatcatcctgagcatcttccgcaccatctcgggtgttgtggtaatacagagtcttcacgccatatttgtaagcgagcagtaaatctttcagcaattggttcatcggaactttgccgttagggaaacgcgctgggtcatagttagtgttggcagaaatagactgatcgataaatttctgcatgatccctaccaattgcagataaccgtcaatgcttggcatttgccacagcaattcataagaccttttcagacgatcatattccggtacaacctggcgcagaatgccatcttttgatgccttaatgctgacgtaacctcttggtggttcaataccattcgttgcattggaaatctgtgaagaagtttccgatggcatcagcgctgataaagttgagttacgcagaccatattgcaggatatcgctacgcagagcttcccagtccatatgcaatggttcactggtcaatgtatccagtgattttttataggtatcaatcggcagaatgccccgtgaatacgttgtttcaccgaaccacggacatgctccctgctctttagccagcttattggaagctttcagcaaataatactgaatggcttcaaatgttttatgcgtcaaaccattcgcactgccatcagaataacgaacaccgtttttcgccagataataagcaaagttaatgacaccaatacccagtgtacgacgccccattgaaccctgtttagccgcaacaatcggataatcctgataatccagtaaggaatccagtgcgcgaacagccaaatctgccagttcttccagctcactcaggttctcaatggctccaaggttgaacgcagacagcgtacataatgcgatctcgccattttcatcggtaatgttatccagcggtttggtcggcagagcaatttccagacacagattcgactgacgaacaggcgcaatagccggatcaaacgggctgtgtgtattacagtggtcaacgttctgaatataaatacggccggttgaagcacgttcctgcatcatcaaagagaacagctctactgccttgatacgctctttacggatattgctgtcattttcatattgcgtatacaggcgttcgaattcatcctgatcagcaaagaaagcatcatataaccccggtacatcggacgggctgaacagagtaatgtcttgccctttgatcaaacgctcatacatcagcttgttgatctgcacaccataatccatatggcgaacacggtttccttcaacaccacggttgtttttcagcaccagcaggctttctacttccagatgccacattgggtagaacaatgtcgccgcaccaccacgaacccccccctgagagcaggatttcactgctgtctggaagtgcttgtagaatggaatacagccagtatggaaagcctcaccaccgcggatcgggctgcccaatgcacggatacggcctgcattcaccccaatacctgcacgctgggatacatatttcacaatcgcactggatgttgcattgatagaatcaaggctgtcaccacattcaatcagaacacaggagctgaactgacgggttggagtgcgaacccctgccataatcggcgttggcaatgaaattttaaaagtagaaaccgcatcgtaaaaacggcggatataatccagacgtgtttccttcggataggtggaaaacaagcatgcagctaccagtacatacaagaactgggcgctttcataaatttcaccggtaacacggttctgcaccagatatttgccttcgagctgtttaacagctgcgtaggaaaaatccatatcacgcagatggctaataaaactgtccatttgctcgaattcttctttggagtagtcttccagcaaatgtttgtcatacttacctaaatcgaccatacgtacaacgtggtcatataacgctggcggctcaaattgaccataggcctttttgcgcaggttaaaaatggctaaacgcgctgccagatactggtaatccggggcatcacctgaaatcaggtcagcagccgccttaatcatggtttcatggatatcggatgttttaataccgtcataaaattgaatctgggaacgcaactctacttgtgatactgagacatttttcagcccttcggcagcccaggcaacaacccggtgaattttatcaagatcaatttgttctttatgcccatcacgcttggttactagcagactctggttcatgaggaaatacaccttctttttcgtatctcgccttgaattgtttttcctgtccgttgacagcacgatgcccccaagaagactgaaagccagttgggaactagtagcagtgaaacgtccagaaacacaatatatagggggtaaataaaactgtaataacaagataatgttaatttcgcattttatcaagtgtacaagctttagagcacatggaacgagc

SEQ ID NO: 1702 - DNA, 9372 bp, Xenorhabdus sp.; identical to SEQ ID NO: 196
  CDS (9128)..(9370)

SEQ ID NO: 1703 - DNA, 9372 bp, Xenorhabdus sp.; identical to SEQ ID NO: 196
  CDS (4301)..(5068)

SEQ ID NO: 1704 - DNA, 9372 bp, Xenorhabdus sp.; identical to SEQ ID NO: 196
  CDS (2522)..(3652)

SEQ ID NO: 1705 - DNA, 9372 bp, Xenorhabdus sp.; identical to SEQ ID NO: 196
  CDS (2)..(2509)

SEQ ID NO: 1706 - DNA, 10872 bp, Xenorhabdus sp.; identical to SEQ ID NO: 68
  CDS (283)..(732)

SEQ ID NO: 1707 - DNA, 10872 bp, Xenorhabdus sp.; identical to SEQ ID NO: 68
  CDS (743)..(1882)

SEQ ID NO: 1708 - DNA, 10872 bp, Xenorhabdus sp.; identical to SEQ ID NO: 68
  CDS (2470)..(2886)

SEQ ID NO: 1709 - DNA, 10872 bp, Xenorhabdus sp.; identical to SEQ ID NO: 68
  CDS (2987)..(4033)

SEQ ID NO: 1710 - DNA, 10872 bp, Xenorhabdus sp.; identical to SEQ ID NO: 68
  CDS (4221)..(4517)

SEQ ID NO: 1711 - DNA, 10872 bp, Xenorhabdus sp.; identical to SEQ ID NO: 68
  CDS (6381)..(7178)

SEQ ID NO: 1712 - DNA, 10872 bp, Xenorhabdus sp.; identical to SEQ ID NO: 68
  CDS (8857)..(9528)

SEQ ID NO: 1713 - DNA, 10872 bp, Xenorhabdus sp.; identical to SEQ ID NO: 68
  CDS (10204)..(10872)

SEQ ID NO: 1714 - DNA, 10872 bp, Xenorhabdus sp.; identical to SEQ ID NO: 389
  CDS (2221)..(3606)

SEQ ID NO: 1715 - DNA, 10872 bp, Xenorhabdus sp.; identical to SEQ ID NO: 389
  CDS (924)..(1289)

SEQ ID NO: 1716 - DNA, 4623 bp, Xenorhabdus sp.
  CDS (2777)..(3841)
tttaagccgatgcctgccaaaaacctgcgccagaccgaaacaccgtgcccacgttcagctaaacccccttttcttcctctttagctgccttgcgttacctgggcaaacaccccctgaaggcaggtcggcctgcggcctccgcgtttacctcccccgccccaaccccgctgccctggctgcgcccggctcgcagtcgctgcgctccttgctcgttgccgtgctcgccatcgccgccccgtgcagcccccgcagggggcttcccttgaacaaagcgccatcaacaaaccgagccaaattctgagcctcaatgccccagagcgtcgcagggcgccgcttgcgggctctatgccgcccgctcccgcagaacgtgcgcccgccgcccggcaagccgggcagcgttcgcccgttgccagaagtgaaaaacaatcccaaactgtacgtcggggtcaaaaaagtgatcggggtaaaatgggtgaaacgtgtcctgctgaaagccttgccctgcgcgggctgacgctgctctacgggtatgactgcctcagagctgatggccctttgccggccagtggcgggatgaagagagcgggctggtctacaatcggttccggtattactcgcctgttgcaagcatgtacctcacgcccgatccattgggactagtaggtgggaagaatccttatgcttatgtatcaaatccaacaagttggatcgatccattagggttaacttcttgtcctggttctggggtaaaagattgggccgttgatgaatatggaaaattgagggatttagtcaaaggtaaaaatttaggccttgatgctcaccatgctggtcaaaaagcaataatgaaagatcttgtaaaaggctatgatccaagtactggaccagctattttggtgccaaaatccggacatacaatatctaaaggggatttaggcgttgtatcaagaagcactaaaaactcaaaaacaggagagaaatttactaatgctagggagttgattgctcgtgatatcagagaattaaggcgggtttatcctgaaataccgaataaggtacttaaagatcttattgatatgaataagaggatgtacccagaagttagatttaaatgtgttgataagggaattaaatgaaaaatgatgaaaaggtagtagaatctatttttagtgagttgtttgacgatatttttttgaattacaaggataatttaacaaaatcatcagatagtaatagcgaaggagtatattcaagagctaagcgagcattatcaaaattagataatgacgatcaagcagctatttttaatttctttaaggtaataatgtctgataccgcatcaactatatttgggactattgatggttctcattttcctccaaatattgatggtgatttcacattagtatatgaagatgaagaaatacaaggaagtttacaagatctatttatagaaaaggtcgaagatagagatatttataattaaagtgatgaagatggatacgggatcaatttttaaatgatacgcatagccccgaacaataatattcggggctatgcaattttattcttttacaatattgacttttccagcaagtagcgtttcttctctaattaactctacatacttatcagaaatttcacacataacaaatcttcgattgagagatattgcagctttggctgtagttccagaacctgcaaaaggatcaagtacgacatcattcttaaatgaataatatttaactactttttctgcaagttcaaaagggaatgttgctggatgttttttatatcgggatggatttattttccataaattagtacgttcgtaatcatcgtcaatttttgaatcgatgacatcctgtttatttggatgactcctaatattccaatcgattaacttatcactttttttccgataaaccagcaaatattctgttaatggtactggtttatattgcaaaggattacgatctgccgcaaagcggcggcctcgaccaaaagcccatccagctccttctggttttacccaatgaatatcatctataaactcgaaaccttcacttgtaaatatagcatgcagatcaaagggaacagctattcttttcgatgcttcatttcttgaggctcttctaattagaacaggagatacattaataacaaaaaaacgtccttcacttaaaatacgatgggattcctttattacttttctcattagttctaaatattcttcataagtatgatattcagaatattcaggtttagcattataatatggcggtgaggtaaatactaaatttatggactcatctggtaagtgtttcattgtatttacactattacctgccaaaatagtattttctaacggagataattcaattttcttcgttctatttctctttttgggttctcttttgataacttcggttgatttacgaaataaaaagtcaatattagaacttttttccaaatcaatagttgctgttttagcattgattacaatttcaccaactcttatattatcaagtgtcagaggaacgcgccaaacatgatagcggtcatccacctcaggaagcccaaatgaaaatttttgacttaactcgtttgaatttaaataatttcttgctatggactttgcattttcaacggaaataactagatatttccgtttcgcatagatggtatcaaaatcggtcatgttcataactgtacctattaacgtctttttagtagcataccaagacttttgttatgtgtccatgggtttttaaaaatgaattttaatgaagataatgctttccctaataagttgatccaattggctaaaatttctaagaatgatgtttttgacaagtttggttctgaagtatttcaaaaggtagtttatgatgtcttaactggtaagaatgtgagggaatttactgaggggttaacgaggactagacttttggaaagtaatctttcattgttatctttctatataaaggaaatggaaaaaggaaattatcctaaaagcttatacatgtcggcaaagaatgcattgatcgagaaagaatataaaaataaatacaagccggctttagaatggcttgtaatgatgacaaacaagcagactcaaaatgttcttagagatgcacatgatgatggtttcggccgtttaacagaacgcacacaagaacagataatggaaacaataaaagaatatagtgaaactattaataatattaaaataaatgatatagatgttcctttagaagatttctgttacatgcttctttcgttgggttcacaaacacttactatcagaggatctgaaaagtctctacatggtaaatatttcgaaaagctaatacttggttctctttttacaatattaggctttgagtatacaaaaaatttagaagaaaatctcgacaataaatgttttactttatcgttaagaagtgatgacagagagtctgatgcgaccgttctgtttaatcgaaaaataatcagggtggatattggatttattggcagaggaaatactgaaatcagtttagataaagtgtccagatttagaaggatagatgatattggtggtataagacataatgttagcactatggttattgttgatgttatcggagagggtagccgtattagtgatatggcagaagaaatcgatggaaaaatagaggctatgttcagcccatattgggtaaaaaaagtagcaaatcatgtaagtgaaaagttaggagttgaaaatgtatttaatggatgtgaaactttaagagatgtccaaaataaaatttcacagaggttaaagttagtagattttgaaaagttcatacagatgtagtgtacaaactcagcatttacaaaatttatgaccttgtttaagattttgtgtaatcgccatttccaattaaacatgaccgtctaaacggtcaccaaattcaatcataaaacgactcatcgcaagacgccaatcttggataggcatagtccattttttagacgctgcttgaatcgctaaccagatcacctttttcaccgaatcatccgacgggaatattttgcgtttcttgatcgcatgccgaatgacgctgttgagcgattctatcgcatttgtcgtgtaaatcactttccgaatttcagcgggataggcaaagaacgtggacagattgccccagttttcttgccagctccggctgatttgaggataacgctcatcccattgttcagcaaaagcgtccaaagcctgcaaagccatttcttctgtcggggcttgataaatctgcttgagatctttaacaaccgctttggcctctttccaggatacatagcgcaggttattacgtatcatgtggacaatacacatctgcacccgtgtctgcgggtaaacggtgttaatcgcctctggaaacccttttaatccgtccacacacgcgataaaaatatctttcagtccccgattatggaggtctgtcagtacgccaagccagaacttcgccccttcattctcggccagccataagcccagcaattccttgtgaccttcggtattaatgcctaacgcgatgaagaccgatttattgataactcggttatcctgacgcactttaaccaccaggcagt

SEQ ID NO: 1717 - DNA, 4623 bp, Xenorhabdus sp.; identical to SEQ ID NO: 69
  CDS (1944)..(3059)

SEQ ID NO: 1718 - DNA, 8528 bp, Xenorhabdus sp.
  CDS (8259)..(8444)
gatgggctcctgatagggcttttcctgccgggaaaaccagtatttgccatttattccaatattgcaataaagggctttctcaaatttattaaaccttttgctgatgttgtgcctttggatccaaacaatccgatggcaatcaggacgctggttaaggaaatcgacaaaggtcgcccgatagtgatttttcctgaaggtcggatcacggtaacgggctctctgatgaaaatctacgatggcgcagcatttattgcggcgaagtcagacgcaaaaattgtgcctatccgtattgatggagcggaacaaagcgttttcggccggttaagaggcgtcatgaagcagcattggttccctaaagtcaccatccagatcttacctgcaatggatttcccaatgccagatgcaccggattctaacagccgccgccgtctggcaggagagaaactgcatgctgttatgatggatgtgaggatgcagactcgtccgaaagaaacgttattcagtgcgtatctcgctgcccaaaagcgtttcgggcgttttaaaccctgtattgaagatattgcactgaaagaagatagctaccatacatttctgaaaaagatattgggctttagccggattttagagcgttttactcaggaaggtgaaagggtcgggcttttattacctaatgccacagctatggcaaccacaatatacggtacgtcactgagagggcgagtacctgctttgctgaactacacggcaggaagcagtggcattaaaaatgcgatacaagcagcgactatcagaacaatcatcacttcccgccagtttcttgagaaaagccagctgacgcatctaccagatcaggtaacagaagcaaattgggtatatcttgaagatttgaaagagactattacgtgggaagataaattgtgggtgctttggcatttgatttttcccgcaaaagcagctttaccttcacagaaaccagaggatgatgcactcatcctgttcacttcagggtctgaaggggcaccgaaaggcgttgttcacagccatgccagcttactggcaaatgtcgagcaaattaaaacgatagctgattttactccacaggatcgttttatgtcgtctttgcctttgtttcatgcatttgggctgacagtcgggttattcactcccttaatgtcaggaagccgtgtatttctgtaccctaacccgctgcattatcgtgttgttcctgaagttgtttatgatcagaactgtactgttctgttcggaacctcaacttttctgggtaattatgcccgctatgctcatccttatgacttctcccgcttgcgctatgtcgttgctggtgcagaaaaactgtcggaagagactaagcgtgtctggcaggataaatttggtatccggattctggaaggctatggcgtaactgaatgtgcgcctgttgtcgctatcaatgtcccaatggcagccaaagtaggcacagtcggcagaattttgccgggcatggaaacacgtttattacctgtgccgggtattgatgtgggcggacgtctgcaagtacgtggcccaaatctgatgaaaggctatttgcgggttgaagctccggatcgtctggaaccgccgacggcagaagatgcggaaggcaatatccagaccggctggtatgacacaggtgatattgtatccattgatgaagaaggtttctgtacgatcaaaggacgagtaaagcgttttgccaaactggcaggtgaaatggtttctcttgaagccgtagagcaaattgctttacgtgtttcgcctgaagctctgcatgcagtaacagcgaaaggtgaccgcagcaagggagaggcattggtgttgtttacaacagataccgttttgaacagaagtgtgatgttactcaccgcccgtcaaatagggttacctgaactggcagttccacgtgatattcgttatgtgaagcaattaccgttgctgggcagtggcaaacctgattttgtcacattaagaaaaatggcagaacaggagtaaaaaatgaatggtactgtggaaacacaaccattgctaaaccggggaatgaaggctgttttactatcccagtttctctctgcttttgccgacaatgccttattctttgcgatattggctcaattgaaagctgaatcttatccgggatggagcttgccggctctgcaaatggtttttgtgctgacctatatcgtatgtgccccttttgtggggcaaattgctgatcggttcccgaagggcagggttatgctcttttccaatggcatcaaattgttgggagccatcagcatctgcattgatatgaaccctttcctgggatataccctcgtggggatcggggcggcagcttattctccggccaagtatggtattttaggggaattgacagacggtagccatctggtcaaagccaatggtttgatggaagcttcgacgattgcagccattctgactggttctgtggtgggtggttttctttcagatataaacctgtttcttgcattaggaatatgtgccctgatgtatagcgcggcagtaatagccaatttttatataccccgtttagcggcagcccggcagggaaaaggctgggatcttaaagcaatgctgcaggattttatctcggtaatctcttccctttggaataactcagaaacccgcttttctttggttggtaccagcctgttttggggggcgggggttactctgcgttttttactggttgcgtgggttcccgttgttctgggagttgaggggaatacaacgccaaccttgatgaacgccgtagttgctatcggcattattgcgggagcgggattagccgcacggtttattacactgagtacggtgcgccgctgtatgccagccggaatatttattggtgttatcgttattatgtttgtcgtgcaacactcaatatggcattcatacctattcctgattatgatcggtttgtgtggtggtctttttgttgtgccattaaatgcattgttacaggaacatgggaagcatgaaatgggcgctggtaaggctgttgcagtacagaattttggtgaaaacagcgcaatgttgatcatgctggggttatacttaatttccaccatgctacaaatatccgttattactataggtattggctttgggatactattctctttagcaatcggtggattgtggatttgggatctgcttcggaaaaattaatttcttatagagttaaaggcgtactatggatgaaaaaatcctgaatcagcttagtattgaactagggaaaaggttacgccagaaaaatctgtctattacctgtgcagaatcctgcacaggaggatgggttgccaaggtgatcacagatgttgcgagaagctctgcctattttgatcgtggcttcgtgacttacagcaatgattcaaaatgtgaaatgctgggtgtttcaccaatatcattagctgagttaggagccgtcagtgagcaggttgtgaaagaaatggctttgggagctttagacgctgctaaggctgattttgcggtttcagtcagtggtatcgccgggccggatggtggcagcaaagagaaacctgttggcaccgtttgctttggatttgctgtccgtgatggcacaaagagatatacaaaatcatatcgccgacttttcactggtgaccgtaactctgttcgtctccagtctgtgattttttctttaaaaacattgctggaagaaatcataaaaaattaacttgatgctgtatgattatacagtataattgattccagtattttggtcgtataaaccatattgatcttataaagcacatcggctttataaattgatttacgaaacgtggatttataaacattgttttttaaataaatttttattaaacaacgagtcttattagacatagcatcagaaacggtttatcagcagtggggcagcccccttcacttcattgcttacgagggagtaaacatggctaacgatgaaaacaaacaaaaggcactagcagcggcactgggccagattgaaaaacaatttggtaaaggttcaatcatgcgtttgggcgaaaaccgctcaatggatgttgaaaccatttctactggctcactgtctctcgatattgctttgggggcaggtggtttgccaatggggcgtattgttgaaatatacgggcctgagtcttccggtaagacaacgctgactcttcaggttattgctgctgctcagcgcgaaggcagaacatgtgcttttatcgatgctgaacatgccctcgatccggtttatgctaaaaaactgggtgtagatattgataacttactgtgttctcagcctgatacaggtgaacaggcgctggaaatctgtgatgccttgtcacgctctggtgcggttgatgttattgttgttgactccgttgctgcattgacaccaaaagcagaaattgaaggtgaaatcggtgattcacatatggggctggcagctcgcatgatgagtcaggcaatgcgtaaactggcaggaaacctgaaaaactcgaatactctgctgatctttatcaaccagatccgtatgaaaattggggtcatgtttggtaacccagaaacgacaactggtggtaatgcactgaaattctacgcatctgttcgtctggatatccgtcgtaccggttccgtgaaaaacagtgatgaagttgttggcaccgaaacccgcgtgaaggtagtcaaaaacaaagttgcagcaccatttaaacaagctgaattccagattttgtacggagaaggtatcaacacttatggtgagcttatcgacctgggtgtgaaacacaaaatggtggaaaaagcaggtgcatggtacagctataacggcgataaaattggtcagggtaaagccaatgcgacaaattacctgaaagagcatccggaaatcgcatctgagctggataaaaaactgcgcgagttattgctgaataatgctggtgggttcagtagcgcggctgaagattatgtcactgattatgaagataatgcagaagaagtaaataacgaagagttttgattgttatttcttctgtgccgcagtcttgtggtcacaaaaagttctgaaaaaaccacatcctttgagggtgtggttttttcttttatagagagaataaatccctgtgtaataggcgcatcggaactgctctgacaaacagactttcagaaaatgctcagacgaattacaatgctgaaaagcgaatagatttatatggaattttacttcttatggaagagactctatcttaatcctgttcgtgagttgaaatagtgataaaacttgtcacttcaaccatccatgattctgtttttcagcttgatttcgggacaattatgagcaaaagcaccgctgagatccgtcaagcgtttcttgacttttttcaaactaaagggcaccagatagtaccaagcagttcattggtgccgactaatgatccaacattgttgttcaccaacgcaggaatgaaccagttcaaagatgttttccttggattggataaaaggccttatacccgagcaacaacggctcagcgctgtgttcgtgctggtggtaagcataacgatttagaaaatgttggttacacagcccgccatcatactttttttgaaatgttgggtaatttcagttttggcgattactttaaacaggatgcaattaattatgcatgggaattgctgactggggctgagtggttcaacctgccaaaagaaaaactgtgggtaactgtctatgagacagatgatgaagcctacgagctctggagcaaagaggtcggcgttcctacagaaagaattattcgtattggtgataataaaggtgccccttacgcgtcagataatttctggcaaatgggagacaccggcccttgcggtccttgtaccgaaatcttctatgaccacggtgaacatatttggggtggtcctccgggtagcccggaagaagacggtgacaggtatattgaaatctggaatatcgttttcatgcagtttaaccgccatgctgatggcacaatggagccactgccaaaaccttccgttgatacaggaatgggattggaacgtctcgctgcggtactgcaacatgtaaattccaactatgaaattgatgcattccgtgatctgattgcctcagtagcagaagtcacaggtgctactgacctcactaacaaatctcttcgtgttattgccgaccatattcgctcatgctcattcttgatttgtgatggtgttattccgtcgaatgagaaccggggttatgtgctccgtcgtatcattcgtcgcgctatccgtcatgggaatatgttgggcgctaaagaaacattcttctataagctggttgctccgttgatcaaaattatgggagccgcaggcgaggaacttcagcgccaacaagcattggttgagcaggtactgaaaacagaggaagagcagtttgctcgtactttggagcggggtctgcaattactggatgaagagctggccaaactgtccggtaatactttagatggcgaaaccgctttccgtctttatgatacctatggattccctcttgatctgactgctgacgtctgtcgtgagcgtgatatcaaagttgatgaaaaaggttttgagtctgcgatggagaatcaacgccgtcgtgctcgcgaatccagtggatttggtactgactataatgacgtcattaaagttgatgggcaaagcgaattttctggttatgaccatgattctcagcaagcctctgtaactgccatttcccgcaatggagaggaagtcgatcatctgaatgcaggtgatgaagcgatcattattcttgataaaactgctttttacgctgaatccggtggacaagtcggtgatacaggcaaattgtcaggtactgaaggtgtatttgaagttactgatacacaaaaatacggtcaggcaattggtcatattggtaaattgataagtggcagcctgactgtaaatacagcagttaacgctgaagttgatgtggcacgcagaaataacattcgtctgaatcactcagcaactcacctgctacattcagcactgcgccaaattcttggagaacatgtctctcagaaaggctctctggtcaatgacaaatatttgcgctttgacttctcccattttgaagcaatgaagccagagcaaattcgtctggtagaaaatttggtgaatgaagaagtccgtaaaaactcatcaattattacagatgtaatggatttggaagaggcgaagaccaagggtgctatggcactatttggcgaaaagtacgatgagaaagtgcgtgtattgagcatgggagagttctccactgagctatgtggtggtactcatgcaggccataccggcgatatcggattattccgtataaccagtgaatcaggtacagctgcaggtatccgccgtattgaagctgtaacagggcaaaccgcacttaattctatttatcagcagactgatttattgcaagatatagcttatttggtgaagggcgatatcaatagcctgaacgagaaagttaaagccacgctggatagaacgaaacagctggaaaaagaactgcaacagctgaaatctcagcaggcagctcaggaaagcacttctttggctaataaggcaaaagatattcagggtgtacgcctgctggtaactcagttgggtgatgtggaaccaaaaatgctcagaacaatggttgatgatctgaaaaatcaactaggatcagcaattattgtgctttctactgtgactggtgataaagtcaccctaattgttggtataacgaaggatttgactgctagaataaaagcgggcgatttaatctctttcgttgcccaacaagttggaggtaaaggaggaggtcgtcctgatcttgctcaggctggcgggacagatgtagcagctcttccttccgcattggacagtgtagaagagtgggtcacattgcggttgtagttggtattgcagtgatagtagtggcaccatggaagcaatctttttatggtgccaaatgtttttcgttgtgaaattgttgaaatgttgtgcacatacttatattttagctatcctatagatataggaaatgtgttcaaaactgcttatactttaagtagatatcatagctttacgttttcacggtgtttgatggataatagcggggaaacctagagacccgactcttttaaattttcaaggagcaaagaatgcttattctgactcgtcgagttggtgaaacgctcatgataggcgatgaggtaacagttacagtactgggagttaaaggcaaccaagttcgtattggtgtaaatgcgcccaaggaagtttctgttcaccgtgaagaaatttatcaacggattcaggcagagaagtctcagcctacaactttttaattcaagaatggcgtccatgcttttttaaaacttgggcgctactctacttcccttctttataaaccacgtcgatttgtttagagc

SEQ ID NO: 1719 - DNA, 8528 bp, Xenorhabdus sp.; identical to SEQ ID NO: 1718
  CDS (5383)..(8010)

SEQ ID NO: 1720 - DNA, 8528 bp, Xenorhabdus sp.; identical to SEQ ID NO: 1718
  CDS (3992)..(5068)

SEQ ID NO: 1721 - DNA, 8528 bp, Xenorhabdus sp.; identical to SEQ ID NO: 1718
  CDS (3254)..(3757)

SEQ ID NO: 1722 - DNA, 8528 bp, Xenorhabdus sp.; identical to SEQ ID NO: 1718
  CDS (2032)..(3228)

SEQ ID NO: 1723 - DNA, 8528 bp, Xenorhabdus sp.; identical to SEQ ID NO: 1718
  CDS (1)..(2028)

SEQ ID NO: 1724 - DNA, 6303 bp, Xenorhabdus sp.
  CDS (2)..(1399)
gtgccctaaagacattctggtcggtaacgtgacaccgaaaggtgaaactcagttaacgccagaagaaaaactgttgcgtgcgatctttggtgaaaaagcgtctgacgttaaagattcatcactgcgtgtaccaaacggtgtttccggtactgttatcgacgtacaggtctttacccgtgatggcgtagaaaaagacaagcgtgctctggaaatcgaagaaatgcagctgcgtcaggcgaagaaagacctgactgaagaactgcgtattttcgaagctggtctgtttgcccgtattcgtaccgcactggttgccggtggaattgaagcggaaaaattagacaagctgccacgtgagcgctggttagaactgggtctggctgatgaagataaacagaatcagttggaacagttggcagaacagtatgacgaactgaaagctgagttcgagaaaaaactggatgctaaacgccgtaagatcactcagggtgatgatttggcacctggcgtactgaaaatcgttaaggtttatctggcagtgaaacgtcagatccagcctggtgataagatggcaggtcgtcacggtaacaagggtgtaatctctaagatcaacccaatcgaagacatgccttacgatgaaaatggtactcctgttgacatcgtactgaacccgctgggcgtaccatcacgtatgaacatcggtcagattctggaaactcacctgggtatggcggcgaagggcattggtgacaagatcaatgcaatgctgaaacaacagcaagaagttgccaaactgcgtgaatttatccagaaagcttatgatctgggtgatgacacccgtcagaaagttgatttgaatactttcactgacgacgaagtcatgcgtctggctgaaaacctgaaaaaaggtatgccaatcgcaacgccagtcttcgacggtgcgaaagagactgaaatcaaagagctgttgaaactgggtggcctgccgacttccggtcagatcacactgtttgacggccgtactggtgagcaattcgagcgtcaggtaaccgttggttacatgtacatgctgaaattgaaccacttggttgatgacaagatgcacgcccgttctaccggttcttacagcttggttactcagcagccgctgggtggtaaagcacagttcggtggtcagcgtttcggggagatggaagtgtgggcactggaagcatacggtgctgcctatactctgcaagaaatgcttaccgttaagtctgatgatgttaacggtcgtaccaagatgtataaaaacatcgtggacggtaaccaccagatggaaccaggtatgccggagtctttcaacgtattgctgaaagagatccgttccttgggtatcaacatcgagctggaagacgaataataaatcatcgttttccgctggcactgcccgccctatgttgaaataacataggatcgggcagtctgccagccagtggttacactggttacaaggggggagtggcatgggccactcacctaacaggtctaactccgacaggagccatttcgtgaaagacttattgaagtttctgaaagcgcaaaccaagaccgaagagtttgatgcgatcaaaattgctctggcctctccagatatgatccgttcgtggtcattcggggaagtaaaaaagccggaaaccattaactaccgtacgttcaaacctgagcgtgacggtcttttctgtgctcgtattttcgggccggtaaaagattacgaatgcttgtgtggtaaatacaagcgcttaaaacaccgtggtgtgatttgtgagaagtgtggtgttgaagtcactcagactaaagttcgccgtgaacgtatgggtcacattgaactggcatctccgactgctcacatctggttcctgaaatcactgccatcccgcatcggcttgctgctggatatgcctctgcgcgacatcgaacgcgtactgtacttcgaatcctatgtggttgtagaaggcggcatgaccagtcttgagcgcagtcagatcctgactgaagagcagtatctggatgcactggaagagttcggtgatgagttcgacgcaaaaatgggcgcagaagcgatccagtctttgttgaaaaacctcgatctggaaaacgaatgtgaaactctgcgtgaagagctgaacgaaaccaactctgaaaccaagcgtaagaaactgaccaagcgcatcaagctgctggaagctttcattcagtctggtaacaaaccagagtggatggttctgactgttctgccagttctgccaccggatctgcgtccattggttcctctggatggcggccgtttcgcaacgtctgacctgaacgatctgtatcgtcgcgttatcaaccgtaacaaccgtctgaaacgcctgctggatctggctgcgccagacatcatcgtacgtaacgaaaaacgtatgttgcaggaagcggttgatgcattgctggacaacggtcgtcgtggtcgcgcaatcaccggttccaacaagcgtcctctgaaatccctggctgatatgatcaagggtaaacagggtcgtttccgtcagaacctgttgggtaaacgtgttgactactcaggccgttctgtaattaccgtaggtccatatctgcgcctgcatcagtgtggtcttcctaagaagatggcactggagctgttcaaaccatttatctacggcaagctggaactgcgtggtctggcgactaccatcaaagcagctaagaaaatggttgagcgcgaagaagcggttgtatgggatatccttgatgaggttatccgtgagcatccggttctgctgaaccgtgcaccaacccttcaccgtctgggtattcaggcgtttgaaccggttctgatcgaaggtaaagcgattcagctgcacccattggtgtgtgcggcttataacgccgacttcgatggtgaccagatggctgttcacgtaccgttgacactggaagcccagctggaagcgcgtgcgctgatgatgtctaccaacaacatcctgtctccggcgagcggtgaaccaatcatcgttccatctcaggacgttgtattgggtctgtactacatgactcgtgactgtgttaacgcgaaaggcgaaggcatggttctgaccggtcctaaagaagcagaacgcgtataccgcgcaggtctggcttctctgcatgcccgtgtcaaagttcgtatcactgaagaagtgagagatggcgaaggtaacgttacggttaatacaggtctggttgataccactatcggtcgtgccatcctgtggatgattgtaccgcgtggtctgccatactcactgattaaccagccactgggtaaaaaagcgatctctaagatgctgaatacctgttaccgggtgctgggcctgaaaccaaccgttatcttagctgaccagaccatgtacaccggttttgcttacgctgcccgttcaggggtatccgtaggtattgacgacatggttattcctgagaagaaagaaggcatcatcgcggaagcagaagctgaagttgctgaaattcaggaacagttccagtcaggtctggtaactgcgggcgaacgctataacaaagttatcgatatctgggcggcggcgaacgaacgtgttgctaaagcgatgatggaaaacctctcttctgagactgtgattaacagcaagggcgaagaagaacaacaggtttccttcaacaacatctttatgatggccgactccggtgctcgtggttctgctgctcagattcgtcagttggcgggtatgcgtggtctgatggcaacgccagatggctccatcatcgaaaccccaatcaccgcgaacttccgtgaaggtctgaacgtacttcagtacttcatctcaacccacggtgctcgtaaaggtcttgcggataccgcactgaagacagcgaactccggttatctgacccgtcgtctggttgacgttgctcaggatctggttgttactgaagatgactgtggtacgcataatggcatcatgatgactccggttatcgaaggtggtgacgttaaagaacctctgcgtgagcgtgtactgggtcgtgtgactgcggaagacgttctgaaaccaggttctgcggacattctggttccacgtaacactctgctgaacgaaaaatggtgtgatctgttagaagaaaactccgttgacagcgtgaaagtacgttctgtagttagttgtgaaactgacttcggtgtctgtgcgaactgttacggacgtgaccttgctcgtggtcatatcatcaacaaaggtgaagcagttggtgttatcgcggcacagtcaatcggtgagccgggtacacagttgacgatgcgtacgttccacatcggtggtgcggcatctcgtgcggcagcagaatccagcattcaggtacgtaacaaaggtcaattgaaactgaccaacgcgaaattcgttaccaactcagcgggcaaactggttattacttcccgtaataccgaattgcgcctgattgacgatttcggtcgtactaaagaaagctataaagtgccttacggttccgtattgtcaaaaggtgatggcgagaaagttgccggcggtgaaaccgttgctaactgggatccacacaccatgccagtcgtgagtgaagtgtccggtatcatccagttctctgacatggtagatggccagaccattacccgtcagacggacgaactgaccggcctttcatcactggtggttctggacagtgcagagcgtaccggtagcggtaaagacctgcgtccggcactgaaaatcgttgatgctcagggtaacgacgttctgatcccaggtacagatatgcctgctcagtacttcctgccgggtaaagcgattgttcagctggaagatggcattactatctctgcgggtgacacgctggcgcgtattcctcaggaatctggcggtactaaagatatcaccggtggtctgccacgcgttgcagacctgttcgaagcacgtcgtccgaaagagcctgctatcctggcagaaatcagcggtatcgtttccttcggtaaagaaaccaaaggtaaacgtcgtctggtaatcagcccactggatggtagtgatgcttacgaagagatgatccctaaatggcgtcagctcaacgtattcgaaggtgaggttgttgaacgtggtgacgtgatctccgatggtccagaatctccacacgacattctgcgtctgcgtggcgttcatgccgttgctcgttacatcactaacgaagttcaggaagtttaccgtctgcaaggcgttaagattaacgataagcacattgaagttatcgttcgtcagatgctgcgtaaagtgaccattgcaagcgcgggaagctctgaattccttgaaggcgagcaggttgaatacgcacgcgttaaagttgctaaccgtaaactggatcaagatggcaaagtccctgcgaccttccaccgtgatctgttgggtattaccaaagcatcactggcaacagaatccttcatctctgcggcgtcgttccaggaaacaacccgcgtactgactgaagcagctgttgcaggtaaacgtgatgaattgcgtggcctgaaagagaacgtcattgtgggtcgtctgatccctgcgggtacaggttatgcttaccatcaggatcgtatgcgccgtcgtcacgaaaacgaagtggttgaagcaccacaagtgactgtcgacgaagccactgcaaaccttgctgagttgttgaatgcaggtttcggtagcagctctaacgagtaataccatgatgagtaggatacataattcgtatcactaatcataaaatgccctctctggtagctgtctcttgatcatatttcataggtcaagagacttggacagtaaataaccgtcaaggatggtttgtaacatgaaccatccttcccacagcctttcccatcctactcggccatttcgtttagagtcataccagcccgccagtttgcccaaattaatataggcccaataaacgcttggggctgtcttagggagttttttcttctcttgctttgtccacaataacttccacgctaacgggcttaataacgtttcacaactttgtttctccgcctctgatttattgagtcccacatagcgtaactgatgaacacgaaccgcaataaacgccaggatcaccaccattttttccagattctctttacaatgcatccgtagcgcttcgacccgtgtcccgccacttttccacgctatgtaaaactcttcaatgagccaacgtttttcatagtaatccagaatacggtgggcatattct

SEQ ID NO: 1725 - DNA, 6303 bp, Xenorhabdus sp.; identical to SEQ ID NO: 1724
  CDS (1548)..(5771)

SEQ ID NO: 1726 - DNA, 6303 bp, Xenorhabdus sp.
  CDS (2)..(454)
agaatatgcccaccgtattctggattactatgaaaaacgttggctcattgaagagttttacatagcgtggaaaagtggcgggacacgggtcgaagcgctacggatgcattgtaaagagaatctggaaaaaatggtggtgatcctggcgtttattgcggttcgtgttcatcagttacgctatgtgggactcaataaatcagaggcggagaaacaaagttgtgaaacgttattaagcccgttagcgtggaagttattgtggacaaagcaagagaagaaaaaactccctaagacagccccaagcgtttattgggcctatattaatttgggcaaactggcgggctggtatgactctaaacgaaatggccgagtaggatgggaaaggctgtgggaaggatggttcatgttacaaaccatccttgacggttatttactgtccaagtctcttgacctatgaaatatgatcaagagacagctaccagagagggcattttatgattagtgatacgaattatgtatcctactcatcatggtattactcgttagagctgctaccgaaacctgcattcaacaactcagcaaggtttgcagtggcttcgtcgacagtcacttgtggtgcttcaaccacttcgttttcgtgacgacggcgcatacgatcctgatggtaagcataacctgtacccgcagggatcagacgacccacaatgacgttctctttcaggccacgcaattcatcacgtttacctgcaacagctgcttcagtcagtacgcgggttgtttcctggaacgacgccgcagagatgaaggattctgttgccagtgatgctttggtaatacccaacagatcacggtggaaggtcgcagggactttgccatcttgatccagtttacggttagcaactttaacgcgtgcgtattcaacctgctcgccttcaaggaattcagagcttcccgcgcttgcaatggtcactttacgcagcatctgacgaacgataacttcaatgtgcttatcgttaatcttaacgccttgcagacggtaaacttcctgaacttcgttagtgatgtaacgagcaacggcatgaacgccacgcagacgcagaatgtcgtgtggagattctggaccatcggagatcacgtcaccacgttcaacaacctcaccttcgaatacgttgagctgacgccatttagggatcatctcttcgtaagcatcactaccatccagtgggctgattaccagacgacgtttacctttggtttctttaccgaaggaaacgataccgctgatttctgccaggatagcaggctctttcggacgacgtgcttcgaacaggtctgcaacgcgtggcagaccaccggtgatatctttagtaccgccagattcctgaggaatacgcgccagcgtgtcacccgcagagatagtaatgccatcttccagctgaacaatcgctttacccggcaggaagtactgagcaggcatatctgtacctgggatcagaacgtcgttaccctgagcatcaacgattttcagtgccggacgcaggtctttaccgctaccggtacgctctgcactgtccagaaccaccagtgatgaaaggccggtcagttcgtccgtctgacgggtaatggtctggccatctaccatgtcagagaactggatgataccggacacttcactcacgactggcatggtgtgtggatcccagttagcaacggtttcaccgccggcaactttctcgccatcaccttttgacaatacggaaccgtaaggcactttatagctttctttagtacgaccgaaatcgtcaatcaggcgcaattcggtattacgggaagtaataaccagtttgcccgctgagttggtaacgaatttcgcgttggtcagtttcaattgacctttgttacgtacctgaatgctggattctgctgccgcacgagatgccgcaccaccgatgtggaacgtacgcatcgtcaactgtgtacccggctcaccgattgactgtgccgcgataacaccaactgcttcacctttgttgatgatatgaccacgagcaaggtcacgtccgtaacagttcgcacagacaccgaagtcagtttcacaactaactacagaacgtactttcacgctgtcaacggagttttcttctaacagatcacaccatttttcgttcagcagagtgttacgtggaaccagaatgtccgcagaacctggtttcagaacgtcttccgcagtcacacgacccagtacacgctcacgcagaggttctttaacgtcaccaccttcgataaccggagtcatcatgatgccattatgcgtaccacagtcatcttcagtaacaaccagatcctgagcaacgtcaaccagacgacgggtcagataaccggagttcgctgtcttcagtgcggtatccgcaagacctttacgagcaccgtgggttgagatgaagtactgaagtacgttcagaccttcacggaagttcgcggtgattggggtttcgatgatggagccatctggcgttgccatcagaccacgcatacccgccaactgacgaatctgagcagcagaaccacgagcaccggagtcggccatcataaagatgttgttgaaggaaacctgttgttcttcttcgcccttgctgttaatcacagtctcagaagagaggttttccatcatcgctttagcaacacgttcgttcgccgccgcccagatatcgataactttgttatagcgttcgcccgcagttaccagacctgactggaactgttcctgaatttcagcaacttcagcttctgcttccgcgatgatgccttctttcttctcaggaataaccatgtcgtcaatacctacggatacccctgaacgggcagcgtaagcaaaaccggtgtacatggtctggtcagctaagataacggttggtttcaggcccagcacccggtaacaggtattcagcatcttagagatcgcttttttacccagtggctggttaatcagtgagtatggcagaccacgcggtacaatcatccacaggatggcacgaccgatagtggtatcaaccagacctgtattaaccgtaacgttaccttcgccatctctcacttcttcagtgatacgaactttgacacgggcatgcagagaagccagacctgcgcggtatacgcgttctgcttctttaggaccggtcagaaccatgccttcgcctttcgcgttaacacagtcacgagtcatgtagtacagacccaatacaacgtcctgagatggaacgatgattggttcaccgctcgccggagacaggatgttgttggtagacatcatcagcgcacgcgcttccagctgggcttccagtgtcaacggtacgtgaacagccatctggtcaccatcgaagtcggcgttataagccgcacacaccaatgggtgcagctgaatcgctttaccttcgatcagaaccggttcaaacgcctgaatacccagacggtgaagggttggtgcacggttcagcagaaccggatgctcacggataacctcatcaaggatatcccatacaaccgcttcttcgcgctcaaccattttcttagctgctttgatggtagtcgccagaccacgcagttccagcttgccgtagataaatggtttgaacagctccagtgccatcttcttaggaagaccacactgatgcaggcgcagatatggacctacggtaattacagaacggcctgagtagtcaacacgtttacccaacaggttctgacggaaacgaccctgtttacccttgatcatatcagccagggatttcagaggacgcttgttggaaccggtgattgcgcgaccacgacgaccgttgtccagcaatgcatcaaccgcttcctgcaacatacgtttttcgttacgtacgatgatgtctggcgcagccagatccagcaggcgtttcagacggttgttacggttgataacgcgacgatacagatcgttcaggtcagacgttgcgaaacggccgccatccagaggaaccaatggacgcagatccggtggcagaactggcagaacagtcagaaccatccactctggtttgttaccagactgaatgaaagcttccagcagcttgatgcgcttggtcagtttcttacgcttggtttcagagttggtttcgttcagctcttcacgcagagtttcacattcgttttccagatcgaggtttttcaacaaagactggatcgcttctgcgcccatttttgcgtcgaactcatcaccgaactcttccagtgcatccagatactgctcttcagtcaggatctgactgcgctcaagactggtcatgccgccttctacaaccacataggattcgaagtacagtacgcgttcgatgtcgcgcagaggcatatccagcagcaagccgatgcgggatggcagtgatttcaggaaccagatgtgagcagtcggagatgccagttcaatgtgacccatacgttcacggcgaactttagtctgagtgacttcaacaccacacttctcacaaatcacaccacggtgttttaagcgcttgtatttaccacacaagcattcgtaatcttttaccggcccgaaaatacgagcacagaaaagaccgtcacgctcaggtttgaacgtacggtagttaatggtttccggcttttttacttccccgaatgaccacgaacggatcatatctggagaggccagagcaattttgatcgcatcaaactcttcggtcttggtttgcgctttcagaaacttcaataagtctttcacgaaatggctcctgtcggagttagacctgttaggtgagtggcccatgccactccccccttgtaaccagtgtaaccactggctggcagactgcccgatcctatgttatttcaacatagggcgggcagtgccagcggaaaacgatgatttattattcgtcttccagctcgatgttgatacccaaggaacggatctctttcagcaatacgttgaaagactccggcatacctggttccatctggtggttaccgtccacgatgtttttatacatcttggtacgaccgttaacatcatcagacttaacggtaagcatttcttgcagagtataggcagcaccgtatgcttccagtgcccacacttccatctccccgaaacgctgaccaccgaactgtgctttaccacccagcggctgctgagtaaccaagctgtaagaaccggtagaacgggcgtgcatcttgtcatcaaccaagtggttcaatttcagcatgtacatgtaaccaacggttacctgacgctcgaattgctcaccagtacggccgtcaaacagtgtgatctgaccggaagtcggcaggccacccagtttcaacagctctttgatttcagtctctttcgcaccgtcgaagactggcgttgcgattggcataccttttttcaggttttcagccagacgcatgacttcgtcgtcagtgaaagtattcaaatcaactttctgacgggtgtcatcacccagatcataagctttctggataaattcacgcagtttggcaacttcttgctgttgtttcagcattgcattgatcttgtcaccaatgcccttcgccgccatacccaggtgagtttccagaatctgaccgatgttcatacgtgatggtacgcccagcgggttcagtacgatgtcaacaggagtaccattttcatcgtaaggcatgtcttcgattgggttgatcttagagattacacccttgttaccgtgacgacctgccatcttatcaccaggctggatctgacgtttcactgccagataaaccttaacgattttcagtacgccaggtgccaaatcatcaccctgagtgatcttacggcgtttagcatccagttttttctcgaactcagctttcagttcgtcatactgttctgccaactgttccaactgattctgtttatcttcatcagccagacccagttctaaccagcgctcacgtggcagcttgtctaatttttccgcttcaattccaccggcaaccagtgcggtacgaatacgggcaaacagaccagcttcgaaaatacgcagttcttcagtcaggtctttcttcgcctgacgcagctgcatttcttcgatttccagagcacgcttgtctttttctacgccatcacgggtaaagacctgtacgtcgataacagtaccggaaacaccgtttggtacacgcagtgatgaatctttaacgtcagacgctttttcaccaaagatcgcacgcaacagtttttcttctggcgttaactgagtttcacctttcggtgtcacgttaccgaccagaatgtctttagggcac

SEQ ID NO: 1727 - DNA, 10077 bp, Xenorhabdus sp.
  CDS (2904)..(3548)
atgctcgtaccatgtgctctaaagaaccctggccgggaaataccattgcaaaatcagacatgtttatcttcctgttaagttaaaaacgtactagcgctgagccccaggtaaagccaccgccaaatgcttcaagtaaaacaagttggccacgctgaattcttccatcacggatcgcttcgtcaaatgcagtcgggacagatgcagctgaggtattaccatgacgatccagtgtcacaacaactttatccatcgtcatattcagttttctagctgtcgctgaaataatacgtaagttcgcctgatggggtaccagccaatcaagctgggaatgagccaaaccattagcttccagtgtctcatcaacaatattcgctaattctcgcacagcaaccttaaatacttcattgccaaccatcgtaaggtatgctggtgtatccattttttggcgatcatgatgaggtactgataataattcgccatattgaccgtcagcatgcagatgggtcgacagaataccgggttcttccgaagcacctaccaccattgctcctgccgcatcaccaaaaaggataacggtaccacgatcttctggattaacagttttggaaagcgtatcagaaccaataatcagtgcacatttggctgcacccgtttttataaactgatcaactacactcaatgcatatgtaaacccggcacaagccgccgcaacatcaaaagccggaataccgttaatgcctagcagtttttggatctggcaggcactgctgggaaaagcatgcgttcccgttgttgttgcaacaactattaaatcaatttgcgttttatcgatgcctgccatttctatggcttgttcagcagccctgaatcccatggttgccaccgtttcaccttcatcggcgatacgacgttcacggataccagtgcgagtgacaatccactcatcagtcgtatccaccattttttctaaatctgcgttagtacgcacctgagacggcaagtaactgcctgtgcctaagatctttgtatacatttatgcttattcactcttgggtaatactgcattcagtcgggctgcaatcttttcaggaacctgcttttctactgcctgaacagcttgctcaattgcagctttgaaagcattttcattcgcggcaccatgactttttatgacaataccacgcaatcctaatagtgttgcgccgttatgctgatcagggtttagatgaccgaagcgttttgctattagtttaagcaaaaacttcctaaatattttcatcaaccatgacgattttttcttttgcccttccggtgacttaagcagagacagaatcactctgatcgcgccttccattgttttcagcgtaacattacctgcgaagccgtcacacacgaggacatctgttttccccgttaacagctcatttccttccacatagcctatatagttgattaactcactattccgcaaggttatggcggcttcgcggatattatccagccctttggattcctcttccccgatattaagtaatgctacacgtggattttttacacccgcaacatcttctgccattacagcgcccataatggcaaattgcactaacatacgactattacaattaatattagcgcccaaatctaatactactgttttttgttgtttcagatttggtatgaccgtcaccaaggctggccgttcaattccttctatcgatttcaacatcagtttagccagccccatcaatactcctgtatttcctgcactgacacacgcctgcgcttcacctgatttcaccagatttagtgcaatacgcatcgaagtaccgtgactggaacgaattgcctgagacggtttaacatcattggcaacaacatattccgcaggaataatttgcaaacggctgagcagctcggcatttttgtttgcaagcaaaggagaaatggcttcggggtcaccgaccaacagtagttttaatcgcggattagatgccagtgcctgcaatgcagcaggcaccgtgacgcgaggaccaaaatccccgcccatagcatctaacgctaaggttagattagccaagatatcaacttgctaataactagctgaattacttgttgattaccttgcggccacggtagtagccatcagcagtcacatggtgacgcaggtgagtttcaccagaagttttgtctacagagacttttgttgcagtcagtgcgtcatgagagcgacgcataccacgtttagaacgagttggtttattctgttgtacggccatcgaccttactccttaagtacttttctttaaactggctaatacggcaaatgggtttggtttttctgcttcaggaggcagtacaccaaacaccatatccgcgtcggacacttcacagtgttcagaatcatgtaccggaactaccggcagagaaagaattatttcatcttctatcattgccagtaaatctatttcgccaaattcattaacctcaattggctcatactcttccggtaatgcttcggcccgctcatcattgacgaccgggctaaaacaatacgttgtgtgaacatgatgactgaatttaccaccacaacgctgacaggcaagcgtaacatccacatctgaatgcccttttacaactgccagacgctgattatcaatctgaaatgataatgagttatctacatcactatccacactgaccaccgattctagaagacgagatacctgttcagcagaataactgccagtgtagtctagtcttttctgggctgcacgaagtgcatcaatggtcaggggtaattttaccttctgcataaggcgcgcatattatctttgtaacgggatatagtcaaaaaaaaaggccacacatatgcacctttccaccaaatattcgcttaataagcggtgcatagtttaaaatgcctgcaaatatttctctacgtattttatggaaaaatgatgcttccgattgttttatcatcaacttcgatatatcgccgcttattactggaaaaaattggcctgccttttacctgtgcagcaccaaatattgatgaaagcccacaggagaatgaaaatcctgaacaattagtgatgcggctttcacaagaaaaggctacagcattacaacaagattattccagccatcttattataggttcagatcaggtttgtattttaaatggagaattaacaggaaagccgcacaattttgagaacgctttcgcacagttaaaaaaagccagtggtcagtgtgtcactttttataccggtattacattattcaatagcaaaaccagaagtactgatactcgctgtgaactatttcatgtccattttagggaacttactgatactgaaatcatcagctacttggaaaaagaacaaccgtttaattgtgccggcagttttaaaagtgaaggcttagggatcacattatttgaaaaactagatggcaaagaccccaatacgttagttggcctgccattaatcaccctgactgaaatgcttacccgtcagggagtaaaccccctgacggcacgttattaaacaaatgattattgcattacatttgtcgcaatttttttaaacattgtcgtaatgccgcatccattggtgcttcgaaacgcatcgtttcaccggttgatggatgcgtaaacttcagtgaactggcatgcagaaacagccggttgatccctgtttctgcaagctgcccgtcaaacgctttgtcaccatagcgatcatcaaatgctatcggatgccccgcatacagagtatgtacacggatttggtgggtacgcccggttactgggctggcccgcactaatgtggcaaattcataacgttcttccaccttaaaacgcgtttcagaaggtttaccttcgctgctgaccttaacgactctttcaccgctttgcaggagattctttaataaaggtgcctgtacgactttgcagtgagactgccactgcccacgcaccaaagccagataatctttctgcatttgcttcaggcgtaattgttcatgcagtgaacgtaaagcagaacgttttttcgcaaccagcaaaaccccggaagtatctcggtcaagacggtgtaccagctcaagaaagcgagcttcgggacgtaatgcccgtaatccttcaataacaccgaaacttaacccgctcccaccatgcacggcagttcctgaaggcttatttatgaccaatatataatcatcttcataaagaatacattctgccaacgcggcaactttatccaacttggcagaaacaggagcctcctgtttttccgccactctgacaggcggaattctgacaacatcgtttgctgtcaatttatattcaggcttgattcttcctttattgactctaacttcacctttacgcaagatccggtagatcatgcttttaggtacaccttttaatcgagccagcaaaaaattatcaattctctggccggcctcatcgtcatcaatagtgacaaactgtacaacttgattatttgttttcatgggcgcaattttaattatcccgcaaacagagtgctactcatttttaaatcatgtataaataatatccacatttttattctttattattaaattgccttagaataaaggctaaagattaacaacttatcactatttcatgataaaaaactcttaaagagataaagtcaccttgctatcaccccaatagcaatggaataatgctttccggccacgatttactaaactatgaatggcagattgaaattgtttgttatctgtttgtttgaacaaaaacgcagcaatggcgtaagacgtaatgtttaatcaaacaatttatgggctgtgagttgctacttactggattgggtaaaacctgtactaatttattacagtatctcccaacaaagagcgctgcgtttcttacaatgaaagaaatgaaattcaggctcgccgacatttaggcgcctctatacaaccgatagccgtgaggctgacggttttgtaaaagacacgaggccatcggtttccagtaaatgctcctctttttactcatggctctatactaatgtaaaaaataatgagtaagttagaatgaaaagaatgttaatcaacgcaacccagcaggaagagttgcgtgttgcccttgttgacgggcaacgtctttatgatctggatattgagagtcctggacacgagcaaaaaaaagccaatatctataaaggtaaaattacacggattgaacccagccttgaagccgcatttgttgattatggtgcagagcgacatggcttcctgcctataaaagaaattgcccgtgaatatttcccaaataattaccatgcccatggccgtcctaacattaaggatatccttaaagaaggtcaggaagtcatcgttcaggtagataaagaagaacgaggcaataaaggtgctgctttaacgacctttatcagtctggcaggtagttatctggttctgatgccgaataatccgcgagctggcggtatttcacgccgtatcgaaggtgatgatcgtatcgaattaaaagaagctctctcttcccttgatgtacccgaaggtatggggcttatcgttcgtaccgctggtgtcggcaaatccgcagaagcccttcagggtgatctgaattttcgtctgaaacactgggaagccatcaaaaaagcggccaacagccatccggctccttttttgattcatcaggaaagtaacgttattgtacgcgcttttcgtgattacctgcgtcccgacattggtgagattctcatcgataatccgaaaattcttgatttggcacgccagcacatcactgccctcggtcgccccgattttgccagcaaaattaaactgtataatggtgaagtcccgctgttcagccactaccagatcgaatcgcagattgaatctgctttccagcgcgaagtaagattgccttccggtggctctgttgtcattgatactactgaagccctgactgcaattgatatcaactcatcccgtgcaacccgtggcggcgatattgaagaaactgcctttaataccaatctggaagccgcagatgagattgcccgtcaattgcgcctgcgtgaccttggtggtctgattgttatcgactttatcgatatgacaccagtacgtcatcagcgcgaggttgaaaaccgcctgcgtgatgcagtacgtcaggatcgcgcccgtattcagattggccgcatttcccgttttggcttactggagatgtcacgccagcgtttaagcccatctctgggtgaatccagccaccatgtttgccctcgttgtagcggcacaggaaccattcgtgataatgagtcactttctctgtccattcttcgcctgatagaagaagaagccctgaaagaaaatactcatcaggttcatgcgattgttcctgtacagattgcttcctatctgttgaatgaaaaacgtaaagctgtcagtgcgattgaacaccgtcagggtggcgttagtattgttatcgtaccaaacgatcaaatgcagacaccgcatttctccgttttacgtgttcgtaaaggcgaagaaatctcggctctgagctatcagttgccacagattcatgaaacagaaatggcaaatattcaggaagatgtgcagcatgaacgcaaacgtcctgaacagcccgctatttccacttttgatttgccggctgaagctccagctcctgccgcagcaaaaacaaaagagaaaaaagtcgcaaccaaagcaaatagtcatcaaaaagcagaaaaacctggcctattcagccgcttcttaaatgccctgaaaaaagtattcagcggcgaagaagagaagcagtctcaggagaaagccaagagaccttctggtaatgatggtcgtcgttcatcagatcgccgtaatccacgccgccaaaaccaacgtcgtgagcgtaacgagaatgaaaatcgtaacaatcgcgagcgtgatgagcagcgtaaaggtcgtaatgctcaggcgaaaaataacgctcaggataatactgcggtagataacgaggcacgtgaggctcagcagcaacagcgccgcgagcagcgtgcagaacgccaacgtcgccgtcaggaagaaaaacgccagcaacaattggaaagtaaggttcagcaggcaattaaacccgaagttccggaagaagaaatcgaggaacgtcaacctgttatgcctcgacgccagcgtcgccagcttgagcaaaaaattcgtattacagatagtgtgaaagaagaaacaactattgcagcacttccggtagttacatctgattctgcacctgtaatcgcggaaaaagagaaaagagcttctgttccagctgttatcaatacagaaactgaagcaacaactcaacctgccgcggcaaatgaatctatcgttcaggatactgctgaacaaaacgctgctatgtctggttctcagcaaaataacgaacagcaagataacatcatgccacgtcgttcccgccgttcaccgcgtcatttgcgggtcagtgggcaacgccgtcgtcgttatcgcgatgagcgcaatctgactcagtctccggtacctctggcaatcgcggtagcctcacctgagttagcatccggtaaagtctgggttcgttacccggtcacaccagtggctacaacttctgagccagaactctctgtaattgaagaagcagcatcggaacaagctgttgaaatgatgccagtacctgttgctgcaaaaactgctgaaccagcacctatttttgcagaaactaaagctacagaacaaaccgctgttacttatgaagatgcgaaacctgaatcagtgaacccatctacagttgaatcaattgttgagtcggtttctgggcagactaatgagcctgttcaagaaactaccaagtctgttgtcagccatgaggtttcaaatcaggctgaaactgcacctaacacagtgcaatatgactctgaggaaaaagttgctcacgtagtagaacctatcattgtggactctatcgctgaacaggaacatcatgaagaacagccgactgtcgcaacggaagtatgctctcagacagaagaagttaaagcgaaagagacaaaagctactgagtctcaggttatcgtggcaaaaaatcatcactcttactccccaatgactaaggctccggcaccggatatggctgcacagccagtcattattagtgaatgggagcgccctgctcatccatttaaagggaaaggtggtgcgggtggtcattctgcaacaagtgtcgcaacatccggtatgtcaaaaccacaaatatttgagtaattacgtattgtaatttcttataaaaatcataaccacccgtataacgggtggtttgctcttgccctataagggcttgttaccgactgcgcctaaatgacgctgctttctcttcgttcaagctaagtgtctttgctgctttggcctaccccttgaaggggtctacatgctctttactactcaatttatccgagattaaatccgacttttcttgctctctgatatacttttgaattgtcgcttcatttagccctaccgtactgacatagaacccttccgcccaaaactttctgttgccaaatttatattttaaattggcgtgtctatcaaagatcatcaacgaacttttacccttcaaatatcccataaagcttgaaacgcttagctttggtggaatactcaccaacatatgaacatgagctggcatgagatgaccttcgattatttccacacctttatacttacaaaggtctctgaggatctctcccacacttgaacgaatattattaaaaatcactttccgtctatatttcgacgaaaagacgatatggtatttacacagccactttgtatgcgctgagctttgtgctttaatgcccataaacacctttccttatttgagttacgaatattagcttgtacatctatatcgtaacggaaaggtgtttttcttggtataacctttgaactccacccgcaaagcgggtggttttatgtttaagacgctaacgcgacttaaactggctaaagccataaatcaaatggctcctactctcaggagccatttttctctctcactccacaaacatttcacaaaagccagtctgtttcatttcctttgctccttgattccaataaactcagataattatcatttaaagcggtgaattattatgagtgaaaacacgtctatgaggccctggttaatttttggtgccggtaaaggtatcggacgccatctggttaatatcgcactagaacaaaatcgtcctgttactgcattgatccgtaatgaagagcaggcagcaataatgagctcagtaggcgtaaacgtaatacagggtgatgcttgtgacagcagaagcatagaaaaagtgattgagtatgccggagaaaacccgattgttttttcaactattgggggcggtaattcagaccactttggtaatatggccattatagatgcactggaaaaggctcagatctcacgaatgcttttggttacatccatcggatgtggagatagctggcatactttatcaccacgagccaaatcattattcggccagtctgcccggcttaaatcgctggctgaaagctatctgcaaaccagtagattagatttcactattattcgtccgggaggattaactgatcaggctggcacaggtcattgtcagcgttatcagggagaagttcacggtatggtaagccgcaaagatgtcgctcagcaattaaatcaaatgtctgaggataaagggacttactctcagatttatgctctggttgacccagaattaaagcctaactggaactgataaagtaaccacgcctgatggcgtggttaacataataccttattttactccgccatccattgctttgagctttttagataattcacggcgttccttagatagctcagcatttgtgatgatatattcatcaacccgctcttcatagtcactacgcatatgggcaattattccctgaatatcttcaactgacattcccggcttaatgtaatcactgagattatccagcaacaat

SEQ ID NO: 1728 - DNA, 10077 bp, Xenorhabdus sp.; identical to SEQ ID NO: 1727
  CDS (5086)..(8310)

SEQ ID NO: 1729 - DNA, 10077 bp, Xenorhabdus sp.; identical to SEQ ID NO: 1727
  CDS (9219)..(9845)

SEQ ID NO: 1730 - DNA, 10077 bp, Xenorhabdus sp.; identical to SEQ ID NO: 391
  CDS (9045)..(9998)

SEQ ID NO: 1731 - DNA, 10077 bp, Xenorhabdus sp.; identical to SEQ ID NO: 391
  CDS (8001)..(9038)

SEQ ID NO: 1732 - DNA, 10077 bp, Xenorhabdus sp.; identical to SEQ ID NO: 391
  CDS (7802)..(7972)

SEQ ID NO: 1733 - DNA, 10077 bp, Xenorhabdus sp.; identical to SEQ ID NO: 391
  CDS (7265)..(7789)

SEQ ID NO: 1734 - DNA, 10077 bp, Xenorhabdus sp.; identical to SEQ ID NO: 391
  CDS (5563)..(6513)

SEQ ID NO: 1735 - DNA, 10077 bp, Xenorhabdus sp.; identical to SEQ ID NO: 391
  CDS (2)..(193)

SEQ ID NO: 1736 - DNA, 7916 bp, Xenorhabdus sp.
  CDS (6735)..(7823)
atgtgctctaaagctaattatctgttgcacaaacatcctgatattccccatttctttgaaagccatgaaattttttctcagtcttttaaagaatcccgtgatttgaatacctatgttaataaacgcaaatactctaaactgagaaaaattgaacagcacgtttatcagcgtgccagagctgtttttgtgctgacttcactactgcgtgatgatatttatacagaatattgtgtaaaaacgccgattattgtcgcgcctgacggtgttgatctgttggcagttgaagaaacgaaaatgacttcttctggcaggcaatatcagcaaggagaaataacacaggtattgtatctgggcagtcttcaccgctggaaaggtgtaccgactgctatgaaatcgatgtattaccttaataatgcggtattgaatatagctggcggaaatagtgagcaggttgaacagctaaaatttgtagcacagcagattggtgtcagtgacagagttaattttatggggtttatccaccctaaagatcgttttcgagtcattgcagataatgatatttgcatcctgccgttgacaaaaaccagcattggtagccgttatacttcccctcttaaactttttgaatatatggcaatgggaaaacccgttgttatttctgatcttccttctattcgtgatgctgtcgatgagaagtcagtgagttttgcccacagtgaaaacgcagaaagttttgcgcaacagattcagttattaattgataacccggctgaaatagtgctcaaaacggaacactcccaaagattagttgaggagcattttaattgggatcaacgtgcaaaattaattatgcaggagatagagaaaaatctttcttgagtataatctgctgaaataggtgctgtagaacgtttatccgaggagtaaatatgccggagctacctgaggttgaaaccagtcgcaggggaattgagccacatttagccggaaatgtgattcattatgttgaagtacgaaactcacgtttgcgctggcctgtttctgagcagattatgaagttatcggatagccgtgtaatcagcgtgcagcgccgggcaaaatatctgctgatagaattatctgatggatggattattgttcatctgggtatgtccggcagtttgcgtattttgttgcatgactctcctccggcaaaacatgatcatatcgatttagtaatggccgatggcaaaattcttcgttataccgacccacggcgatttggtgcctggctatggagtcaaagtctggaagagtgttctgtgttagctcatttaggccctgaacctctgtctgatttgtttgatggtgaatatctttatagcctttcccgcaacaagagaacggcaattaagccatggataatggataataaagtggttgttggtgtcggtaatatttatgccaatgaagctctgtatgttgctcatattttgcctgaacgccccgcgcattcattgactcaggaagaagcacatctgctggctgatacaataaagcagatcttgcgtcgttctattgagcagggaggaacaacgctgaaagattttctgcaatcggatggaaaaccgggatattttgcccaggagttatttgtttacggtaagaaaggcgagtcttgcccaatatgtggtgaaaaaattgacagcataaaattggggcaaagaagcacatttttttgtcggcaatgccagcattgattgtgcttagatctgtacttgggggctcaggtgccccccggaaagattaattcgctaacttcttcaacatggcttgtgtaaccggttctggcaagaatgatgaaacatcgccatcatgacgggcaacatctttaatcaaggatgatgagacaaaggataaattttgagaaggtaataagaagacgctttccagctcggacataaaatgccgattcatattggcaagctgccattcatattcaaaatcagaaattgaacgaacaccacgaattaaaattgtcgcctgctgttttttcgcaaaattggccatcaattcactgaatccaacgacttcaacattatctaaatgagaagtcacttcttttgccagcgcgacgcgctcttcgagagtgaacataggattttttctgtcactgttggcgatcgccagcaaaacatggtcaaacatattagctgcacgggtcacaatatcgagatgaccgtaagtgataggatcaaaagtaccgggataaattgctttttttttcattgcctttgattctctgcttgggtgagttcccagagtgctgcatatttattgaatgtatattgagcattgacaacagctaatattaacccctgtttgccatcaaggaaacctgctcttagcagccatgttttaaaaaatgcgcccagagtatggctgataatagaagaataccgggtggttttaccttgttcatggcgttgtttggcccagtcttttgcgtaattaagttgtttctgctggaactccatcagattgcgacaagttaaatggcgtaagtcaccttttaatgtcacgacgcgggcaccctgagtatcaagtgattcatgaacctgattatcgttatattgataacgttcacggcaataaaggcgggtgactttatcaggataccagccactgtgcttcatgaatcggctcatgaataggttcaggcgagcgcaggcataaactttattatcgtcaggtgctgccaaaacctgttcaattgaagcccttaactccggagtaacccgctcatcggtatcaatcatgaagatgtaatcaccgctggcataagattgcgcaagttgccgttgggaaccgaagcctggccattgtgtattggtgtatactttcgcacccatctctgtggctatctggcaggtagtatcggtactgccagagtccagaacgataatttcatccgcccaatccacagataacaggcaatcaccaatcaaatcagcggcatttttggcaatcatcacaacggacaggcgttttctcacactcattaatggctccgtggtgggaggtagggttccagtaattttaacaaacgttgcaatgcgccctgattctcatgtagtacttcggcggcgtgacgaccgtaataaaggcggtagtcttcatctgtcagtagactattaacagcactacttaaagacgggctatctgtcaccgtgattaggccatcagctttattcagcttggcacagatatctttaaaattgaatgtatgtgggcccattatgacggggattgcatgagcggcagcttccagagggttatgaccaccgcgctcagttaaactacctccgacaaaagctaaatcagcgataccgtacaagagcatcagttcacccatcgtatcgccgataacaacctgaatattggcatcagggatagtgccggaactcctcagtactgactttagccccactttttgtgttaattcttctgccttagcgaagcgctcaggatggcgtggaactaaaattaacagtaaatcaggatgctgttttaataaatttcgatgcgcatccagtataatcggttcttcaccttcatgagtactgggggcgatccatacaggacggtgtgcagcccactggcgacgaagcgtaacggctttggctgccagttctggtgtaacagaaatatcgaatttaagactgcctgtgactgccagttgggttcgttttagtcctaattcaataaaacgctcaccatcttcctgattttgtgctgcgatgagtgttattttatttagaatagttttgataaaactgtttattttctgatacccggtagcggaacgtgctgaaagtctggcattagcaataaccagtggtatcccgcgctgatgtagttgggtaatgagattaggccatagttcagtttccataataatcaccagcttgggattgatattatcaaggaagcgccccatagagcccggcaaatcatacggtaaataaacatggttaacatcggcccccagtgcagaaagtaccctttccgaaccggttggcgtcatcgttgttacagtgataggcagaaaaggataatggtgccgtaatatcctgacaagaggaatagcagctaatgtttctccgactgaaaccgaatggagtaagattcctcccggtttcaccttttgggcacagaaaccatagcgctcactccagcgtttacggtaagccggagatttacggctgcgcagtaacaggcgcaaccagataataggttggataaggtagagaagtacctgatataagcgaagcaacattctatcaaattcactgaaatagactgcggctatagtatcacattggattgaagaaagtgtgcaaaatgcggatatgttgttcgtatttccctaaaaagataaggggaacagtttgttgtaagtttcagctttttagatgtacaggcataaggtcagagcctgttattctgagaatttaataaatatatctgttatttgatagctattggaaaagtaatgggaaaaacaaccactcaataccaaaagattctgctcattaaacttaggcatcatggtgatacattgctcatcacccctgttattaatactctgaaagagaattttcctgatgccgaaatagacgttttgctctataaagagacggaacctatgttgagaaattttagccgagtatccaatatttttaccatagacagattgtggaaaaaggaaggtataaaatttctgctctcccactactggcgtttgttaaaggaattgaaaaatcgaaggtatgacctcgttattaatttagctgatcaatggagtagtgcattggtttctttattgacaggttctgcacggcggataggctttgacttccctaaacgacaaaacctgttgtggaaagtatgttttacagatctagtgtctacggaaggggaagagtccttgcatgtcgttgagcaaaatttatcggcattaaagcctcttaatctttctgttactaattttgacgtcacgatgacctattgtgatgaagataaagagaaagtatttaaccttcttcatactggtagaattcatcagaaatacattgtgattcaccctgcatcacgctggtttttcaaatgctgggatgaagacaagattagccaaactataaatacattacaggctgatggccattcagttgttgttacgtcaggaagggatcctcaggaaaaagacatggttgggcgaattttatcaacctgttctcaggaaaatgttatttctttagctgggcagataactttgcctcaattgggagccttgattgatcatgcggaactatttattggtgtcgattctgtccctatgcatatggcggctgcattgaaaacaccttgtattgcgttatttggtccatctaagttagtcttttggcgaccatggcaagtccatggggatgtgatttgggcgggaaattacggtaaattaccggatcctgatgatattgatactaaaactgatacccgatatttaagcgctatcccaacagatgttgtgattgaaacggcccggagatatttatcatgaaatctgtgcgtctggctattgtccggcagaaatatcgccctgatggtggcgctgaacgttttatttccagagcattagatgcattgggtaatgagaacctggagttaaatgttatcacccgatcctggcaaggagatatgaatccgaactggcatgtgcatttagctaatccttttaaatggggacgtatcagtcgtgaaaagggttttgcggacgcagccagagctatttggcataaagaacactttgatattgtacagagtcatgagcgaatagctggttgtgatatttaccgggctggtgatggagtacatcagcgttggttgcaacaaagagcaaggattctgcctaactggaaaagtaaattgctttttgctagccgttatcatcgctatgtcatagatgctgaagaaagaatgtattcgtcacctgagttgaagacagttatttgtaactctgaaatggtcaaacaggaaattatggaggatttcggcctttcagcagagaaaatttctgtgatttataatgctatcgatcaagcacagttttttccagccaaagaagatgagagagttgtactgcggcaacaatattctattccggctgaggttaagtgcttcgtatatgttggctcgggttttgaaagaaaaggtctgagagcagcaattgaagcgatcagcatgactgatgcttatttaatcgtaattgggcaggataaggcatataataaatacaaacagttagcaaattcccttggttgttatgaacgagtgcggtttttgggcgttcaaaaaaagacattacctttttaccagatggcagatggtttattattaccaacattatatgatcctttcccgaatgttattttagaagcaatggcatgtggtttgcctgttataaccagtagaacctgtggtggagctgagttcgtggagtctggagtgaatggttttgtctgtgatgctctggatattaaagcgttgtcagaagcaatttttttagtaccttcagatcatttaaccagtaagatttctatgtcagcaaaagaaaagataatggcttatacacctgcttatctgtctcagcagcttactgcactgtacagtaaggtactctccctatgaacaggcatatcctgtttattattgatgggttaccaggtggtggtgctgaaaatgtcgttgtgcgtttgtgccgcggattacaacagaaaggctttactatcaccttattatcgttatcggataaatgtgaatatcccatccctgatcatgttgatttaattattaatgctgacggatatacaggtccttttagaagacagactgagatttttcgcagagctaaatctttggatagagttttgaaaaaaaactttcttcaaaaaggaattcctgagctggtgatatcaaatttgcataaaactgatcgcatagtagccagatccaaaatattgtgtgatttaaatgtatggttttgtattcatggagtattttctaaatcttaccttgaaaataaaacaggtttagcacgctggtttaagaagcgtaaaattcagcgtatctatcaggatcgtaacctgatttgtgtctccgatgcggttggctctgatttgaaagaaaatctctgtgttacggcacgaaggatggtcacgatttataatccattcaacattgctgaaattaagttggattcattagaaaataatccctattctgatcaagattatattctccatcttgggcgttttcaccaagtaaagcgtcatgatcgtttgctggaggcgtttgccaaagcagcccttccctgtaaattattaattgcaggcaatggtgatgagaagacgacaaatgaaatcaaacaaaaaattattgatctcagtttacagtcccgagtgaagttaattggatttttaacaaatcctttacctgtaatacgtgaagctaaagcagttgtactcagctcggacagtgaaggattaggaaatgttctgattgaggctttgatctgcaatactccgattgttagtacaaattgtccgggtggagttagtgaaataatggttggggagttagaaaaatataaatctgagcttacttcggactcactggcagataaaatgcgtttggtgtaccagaatccgcctataattacggaaatgatgtataaaaaatttgctcaggaagttgtggttaaacaatatttatcattgcttgagcagaagtaaatttcagagtgattatagcgttaagacctaagaagattaataactcccttaaacaaaatttctccctgttttagtggcttttatttt

SEQ ID NO: 1737 - DNA, 7916 bp, Xenorhabdus sp.
  CDS (3635)..(4876)
aaaataaaagccactaaaacagggagaaattttgtttaagggagttattaatcttcttaggtcttaacgctataatcactctgaaatttacttctgctcaagcaatgataaatattgtttaaccacaacttcctgagcaaattttttatacatcatttccgtaattataggcggattctggtacaccaaacgcattttatctgccagtgagtccgaagtaagctcagatttatatttttctaactccccaaccattatttcactaactccacccggacaatttgtactaacaatcggagtattgcagatcaaagcctcaatcagaacatttcctaatccttcactgtccgagctgagtacaactgctttagcttcacgtattacaggtaaaggatttgttaaaaatccaattaacttcactcgggactgtaaactgagatcaataattttttgtttgatttcatttgtcgtcttctcatcaccattgcctgcaattaataatttacagggaagggctgctttggcaaacgcctccagcaaacgatcatgacgctttacttggtgaaaacgcccaagatggagaatataatcttgatcagaatagggattattttctaatgaatccaacttaatttcagcaatgttgaatggattataaatcgtgaccatccttcgtgccgtaacacagagattttctttcaaatcagagccaaccgcatcggagacacaaatcaggttacgatcctgatagatacgctgaattttacgcttcttaaaccagcgtgctaaacctgttttattttcaaggtaagatttagaaaatactccatgaatacaaaaccatacatttaaatcacacaatattttggatctggctactatgcgatcagttttatgcaaatttgatatcaccagctcaggaattcctttttgaagaaagttttttttcaaaactctatccaaagatttagctctgcgaaaaatctcagtctgtcttctaaaaggacctgtatatccgtcagcattaataattaaatcaacatgatcagggatgggatattcacatttatccgataacgataataaggtgatagtaaagcctttctgttgtaatccgcggcacaaacgcacaacgacattttcagcaccaccacctggtaacccatcaataataaacaggatatgcctgttcatagggagagtaccttactgtacagtgcagtaagctgctgagacagataagcaggtgtataagccattatcttttcttttgctgacatagaaatcttactggttaaatgatctgaaggtactaaaaaaattgcttctgacaacgctttaatatccagagcatcacagacaaaaccattcactccagactccacgaactcagctccaccacaggttctactggttataacaggcaaaccacatgccattgcttctaaaataacattcgggaaaggatcatataatgttggtaataataaaccatctgccatctggtaaaaaggtaatgtctttttttgaacgcccaaaaaccgcactcgttcataacaaccaagggaatttgctaactgtttgtatttattatatgccttatcctgcccaattacgattaaataagcatcagtcatgctgatcgcttcaattgctgctctcagaccttttctttcaaaacccgagccaacatatacgaagcacttaacctcagccggaatagaatattgttgccgcagtacaactctctcatcttctttggctggaaaaaactgtgcttgatcgatagcattataaatcacagaaattttctctgctgaaaggccgaaatcctccataatttcctgtttgaccatttcagagttacaaataactgtcttcaactcaggtgacgaatacattctttcttcagcatctatgacatagcgatgataacggctagcaaaaagcaatttacttttccagttaggcagaatccttgctctttgttgcaaccaacgctgatgtactccatcaccagcccggtaaatatcacaaccagctattcgctcatgactctgtacaatatcaaagtgttctttatgccaaatagctctggctgcgtccgcaaaacccttttcacgactgatacgtccccatttaaaaggattagctaaatgcacatgccagttcggattcatatctccttgccaggatcgggtgataacatttaactccaggttctcattacccaatgcatctaatgctctggaaataaaacgttcagcgccaccatcagggcgatatttctgccggacaatagccagacgcacagatttcatgataaatatctccgggccgtttcaatcacaacatctgttgggatagcgcttaaatatcgggtatcagttttagtatcaatatcatcaggatccggtaatttaccgtaatttcccgcccaaatcacatccccatggacttgccatggtcgccaaaagactaacttagatggaccaaataacgcaatacaaggtgttttcaatgcagccgccatatgcatagggacagaatcgacaccaataaatagttccgcatgatcaatcaaggctcccaattgaggcaaagttatctgcccagctaaagaaataacattttcctgagaacaggttgataaaattcgcccaaccatgtctttttcctgaggatcccttcctgacgtaacaacaactgaatggccatcagcctgtaatgtatttatagtttggctaatcttgtcttcatcccagcatttgaaaaaccagcgtgatgcagggtgaatcacaatgtatttctgatgaattctaccagtatgaagaaggttaaatactttctctttatcttcatcacaataggtcatcgtgacgtcaaaattagtaacagaaagattaagaggctttaatgccgataaattttgctcaacgacatgcaaggactcttccccttccgtagacactagatctgtaaaacatactttccacaacaggttttgtcgtttagggaagtcaaagcctatccgccgtgcagaacctgtcaataaagaaaccaatgcactactccattgatcagctaaattaataacgaggtcataccttcgatttttcaattcctttaacaaacgccagtagtgggagagcagaaattttataccttcctttttccacaatctgtctatggtaaaaatattggatactcggctaaaatttctcaacataggttccgtctctttatagagcaaaacgtctatttcggcatcaggaaaattctctttcagagtattaataacaggggtgatgagcaatgtatcaccatgatgcctaagtttaatgagcagaatcttttggtattgagtggttgtttttcccattacttttccaatagctatcaaataacagatatatttattaaattctcagaataacaggctctgaccttatgcctgtacatctaaaaagctgaaacttacaacaaactgttccccttatctttttagggaaatacgaacaacatatccgcattttgcacactttcttcaatccaatgtgatactatagccgcagtctatttcagtgaatttgatagaatgttgcttcgcttatatcaggtacttctctaccttatccaacctattatctggttgcgcctgttactgcgcagccgtaaatctccggcttaccgtaaacgctggagtgagcgctatggtttctgtgcccaaaaggtgaaaccgggaggaatcttactccattcggtttcagtcggagaaacattagctgctattcctcttgtcaggatattacggcaccattatccttttctgcctatcactgtaacaacgatgacgccaaccggttcggaaagggtactttctgcactgggggccgatgttaaccatgtttatttaccgtatgatttgccgggctctatggggcgcttccttgataatatcaatcccaagctggtgattattatggaaactgaactatggcctaatctcattacccaactacatcagcgcgggataccactggttattgctaatgccagactttcagcacgttccgctaccgggtatcagaaaataaacagttttatcaaaactattctaaataaaataacactcatcgcagcacaaaatcaggaagatggtgagcgttttattgaattaggactaaaacgaacccaactggcagtcacaggcagtcttaaattcgatatttctgttacaccagaactggcagccaaagccgttacgcttcgtcgccagtgggctgcacaccgtcctgtatggatcgcccccagtactcatgaaggtgaagaaccgattatactggatgcgcatcgaaatttattaaaacagcatcctgatttactgttaattttagttccacgccatcctgagcgcttcgctaaggcagaagaattaacacaaaaagtggggctaaagtcagtactgaggagttccggcactatccctgatgccaatattcaggttgttatcggcgatacgatgggtgaactgatgctcttgtacggtatcgctgatttagcttttgtcggaggtagtttaactgagcgcggtggtcataaccctctggaagctgccgctcatgcaatccccgtcataatgggcccacatacattcaattttaaagatatctgtgccaagctgaataaagctgatggcctaatcacggtgacagatagcccgtctttaagtagtgctgttaatagtctactgacagatgaagactaccgcctttattacggtcgtcacgccgccgaagtactacatgagaatcagggcgcattgcaacgtttgttaaaattactggaaccctacctcccaccacggagccattaatgagtgtgagaaaacgcctgtccgttgtgatgattgccaaaaatgccgctgatttgattggtgattgcctgttatctgtggattgggcggatgaaattatcgttctggactctggcagtaccgatactacctgccagatagccacagagatgggtgcgaaagtatacaccaatacacaatggccaggcttcggttcccaacggcaacttgcgcaatcttatgccagcggtgattacatcttcatgattgataccgatgagcgggttactccggagttaagggcttcaattgaacaggttttggcagcacctgacgataataaagtttatgcctgcgctcgcctgaacctattcatgagccgattcatgaagcacagtggctggtatcctgataaagtcacccgcctttattgccgtgaacgttatcaatataacgataatcaggttcatgaatcacttgatactcagggtgcccgcgtcgtgacattaaaaggtgacttacgccatttaacttgtcgcaatctgatggagttccagcagaaacaacttaattacgcaaaagactgggccaaacaacgccatgaacaaggtaaaaccacccggtattcttctattatcagccatactctgggcgcattttttaaaacatggctgctaagagcaggtttccttgatggcaaacaggggttaatattagctgttgtcaatgctcaatatacattcaataaatatgcagcactctgggaactcacccaagcagagaatcaaaggcaatgaaaaaaaaagcaatttatcccggtacttttgatcctatcacttacggtcatctcgatattgtgacccgtgcagctaatatgtttgaccatgttttgctggcgatcgccaacagtgacagaaaaaatcctatgttcactctcgaagagcgcgtcgcgctggcaaaagaagtgacttctcatttagataatgttgaagtcgttggattcagtgaattgatggccaattttgcgaaaaaacagcaggcgacaattttaattcgtggtgttcgttcaatttctgattttgaatatgaatggcagcttgccaatatgaatcggcattttatgtccgagctggaaagcgtcttcttattaccttctcaaaatttatcctttgtctcatcatccttgattaaagatgttgcccgtcatgatggcgatgtttcatcattcttgccagaaccggttacacaagccatgttgaagaagttagcgaattaatctttccggggggcacctgagcccccaagtacagatctaagcacaatcaatgctggcattgccgacaaaaaaatgtgcttctttgccccaattttatgctgtcaattttttcaccacatattgggcaagactcgcctttcttaccgtaaacaaataactcctgggcaaaatatcccggttttccatccgattgcagaaaatctttcagcgttgttcctccctgctcaatagaacgacgcaagatctgctttattgtatcagccagcagatgtgcttcttcctgagtcaatgaatgcgcggggcgttcaggcaaaatatgagcaacatacagagcttcattggcataaatattaccgacaccaacaaccactttattatccattatccatggcttaattgccgttctcttgttgcgggaaaggctataaagatattcaccatcaaacaaatcagacagaggttcagggcctaaatgagctaacacagaacactcttccagactttgactccatagccaggcaccaaatcgccgtgggtcggtataacgaagaattttgccatcggccattactaaatcgatatgatcatgttttgccggaggagagtcatgcaacaaaatacgcaaactgccggacatacccagatgaacaataatccatccatcagataattctatcagcagatattttgcccggcgctgcacgctgattacacggctatccgataacttcataatctgctcagaaacaggccagcgcaaacgtgagtttcgtacttcaacataatgaatcacatttccggctaaatgtggctcaattcccctgcgactggtttcaacctcaggtagctccggcatatttactcctcggataaacgttctacagcacctatttcagcagattatactcaagaaagatttttctctatctcctgcataattaattttgcacgttgatcccaattaaaatgctcctcaactaatctttgggagtgttccgttttgagcactatttcagccgggttatcaattaataactgaatctgttgcgcaaaactttctgcgttttcactgtgggcaaaactcactgacttctcatcgacagcatcacgaatagaaggaagatcagaaataacaacgggttttcccattgccatatattcaaaaagtttaagaggggaagtataacggctaccaatgctggtttttgtcaacggcaggatgcaaatatcattatctgcaatgactcgaaaacgatctttagggtggataaaccccataaaattaactctgtcactgacaccaatctgctgtgctacaaattttagctgttcaacctgctcactatttccgccagctatattcaataccgcattattaaggtaatacatcgatttcatagcagtcggtacacctttccagcggtgaagactgcccagatacaatacctgtgttatttctccttgctgatattgcctgccagaagaagtcattttcgtttcttcaactgccaacagatcaacaccgtcaggcgcgacaataatcggcgtttttacacaatattctgtataaatatcatcacgcagtagtgaagtcagcacaaaaacagctctggcacgctgataaacgtgctgttcaatttttctcagtttagagtatttgcgtttattaacataggtattcaaatcacgggattctttaaaagactgagaaaaaatttcatggctttcaaagaaatggggaatatcaggatgtttgtgcaacagataattagctttagagcacat

SEQ ID NO: 1738 - DNA, 7916 bp, Xenorhabdus sp.; identical to SEQ ID NO: 1737
  CDS (4903)..(5652)

SEQ ID NO: 1739 - DNA, 7916 bp, Xenorhabdus sp.; identical to SEQ ID NO: 1737
  CDS (5649)..(6131)

SEQ ID NO: 1740 - DNA, 7916 bp, Xenorhabdus sp.; identical to SEQ ID NO: 1736
  CDS (5605)..(6726)

SEQ ID NO: 1741 - DNA, 7916 bp, Xenorhabdus sp.; identical to SEQ ID NO: 1736
  CDS (4562)..(5599)

SEQ ID NO: 1742 - DNA, 7916 bp, Xenorhabdus sp.; identical to SEQ ID NO: 1736
  CDS (930)..(1739)

SEQ ID NO: 1743 - DNA, 7916 bp, Xenorhabdus sp.; identical to SEQ ID NO: 1736
  CDS (1)..(879)

SEQ ID NO: 1744 - DNA, 11719 bp, Xenorhabdus sp.
  CDS (7861)..(8442)
aaaggagcatggtggtagggttactcgctattctcaaggcaggcggggcttatgtaccgctcgatccggcctatccgactgaacgtctcagctttatgctggaagattcagcaccggttgccctgctgacacaaaccacacaggcggataaattatcctgctcgatcaccacggtattgcttgatgcacaggcgacagagcttgccaccctgccggatacgaaccctgatacgcaggcattagggctgacatcacgccatctggcttatgtcacctatacctccggttctaccggacagcctaaaggcgtgatggtggagcatcgcaatgttttacgcctgattattaataatggctttgccgatatcgggccggatgactgcatcgcgcattgtgccaatatttcatttgatgctgcgacatgggaagtgtggtcagggttagtgaatggtgcccgtatcctgctggtgccggagaaaaccctgttacagccagttgaattcggtcagtgcctgtcagccgccggtgtcagtgccctgtttctgaccaccgcgctgtttaatcagtatgccgacctgattgcccctgcactgtcagggctgcgttatgtcctgttcggcggtgaaaagagtgataatcgagccgccatgcgccttcgggcggaatactctcctcaacatttactgcatgtctacgggccaacagaaaccaccacgtttgccacagcctacgatatgccacggatggaaagcggaaaactgcctatcgggcaacctatcaataatacccgcatctacattctggataatcagggccagcccgttcccacaggtgtgcccggtgaaatccatattggcggagacggcgttgcgcggggctatctgaaccggcctgaactgacagcagagcgtttcctgaccgatccgttctctccggaaccgaacgcccgcatgtataaaactggcgatctcgcccgctggttaccggacggtaatattgaataccttagccgcaacgattttcaggttaagttacgcgggttccgtattgaactgggggaaatcgaaagtgcccttacatcccatctacaggtgaaacaagcggtggtgattgaccgggagcatcatggtcataaagcactggccgcttatctggtaacagacgggcagatctccgatgaaaacctgcttgattacttatcggcacacctgccggattatatgttaccggccagttttacccagattgacgctattccgctgaccctgaatggcaaagtagaccgccgcgccttgcctgatccggtttggggagatcgcgataattatgtcgctccccgcaatgcactggaaacccgcctgtgcactctctggcaggaagttttaaggctggagcggataagtattgatgataactttttccgcattggcggggattcgattatcagtatccagctggtctcgaaactacggcaggcgggctttactcttcaggttacctcaattatcgaagcgccgacggtggctagtagcccaattactaatgcaggaaacctctgctgatataatcaccgcggaacagggaatattaaacggggaatttgacctgttacctgtccagcaaatgtttttcggctgggcgctgacaaaaccacatcactggaatcaggcctttatggtccggttacccggcgatataaaatccgcacaggttgaacaggcgctggcggcattagctgatcggcatgatatattacgcgctcattttgtcagaacagaacagggctatcgccagtgttacccggccagaatgccatcttcaccgctcccgttaccacactgtgatattcgttggttagatgaggaagcactccatcaacaactgacttcatggcaaaaccactttaattacgataatgggccattgtggcaggctgcccatctgaccggctacacagatggcagtgcgcgcttattcttcgctgcacatcacctgattattgatgtcgtctcgtggaggattattgccgaagatatccggcggatattgcagggtgaaaccctgcccgccaaaaccagcagctaccggcagtgggtgaaggccatccgtcagtatgccgaacagcatcaacaggagattacctactggcaacaagcgctggcagaaacttctgctcacacggcttctgataacttaagccaacacactctgagtatttccactgcactgacaggcattttactgcgggaagctaacgccggttatcagaccgagattaatgatttattgctgagcgcactggcactggctctacaggaggtgttctcacaatccgttaactccatcacgctggaaggccacgggcgcgaaaatatcgaccagacactggatgtttctgaaaccattggctggtttactaccttatatcctgttcgtctggcaatgcaggaggatattgctgacaccattattcacaccaaagagatgctgcgcgccgtccccaataagggaatcggttacggcgcattacgtcaggcgggtgctctgtccggggatttaccggccatcagtttcaactatctgggccaacttgggggtgaaagcgaacaacactgggctctgacccgtgacgatacgggcaacacctcggcaaacgaaaatcatagtcatctgctgctgaacatcaacggactggttcaggccggtcagctacaattccagattggttcccgtttaaccgcggatcagacacagacatttattgccacctttgaacaggcgctccgttctgtcatcaccaccgcccagaaacaggcgcaatccggtggaataaaaacccccgcggattatggtatcaaggggctttccatcaagctgctgcgccagcttcaacaggtgtatcagattgaagccctgtaccccgccaccagcctgcaacagggttttatttatcatcatctggcccagccgcaggacgatgcttattgcgttcagatattactggattaccacactcaactcgattttgctgcctaccagcaagcatggtcactggcttcactgcgttttcctatccttagaaccgcctttaactggacggaagaggtgctacaaattattactgagggagcgagtatcagtaccgcaaacttcagcatgaaagatatccgctcattgccggaggataaacgacacaaagccatcagtacaattcaacaacgggatcgcgccctgccatttgatttcagcctccccggattgattcgctttaccctgatccaacagcatgagcaactggttacagtgctcaccaccctgcaccacagcattattgatggctggagtaacccgattttattgcaggcagtacatgagtattacaacgccatcattcagggagacatgcctgaaatcagggtagatcaagcctatcctgctacccagcaatattatctggatcatcaggccgaatcagaccgctactgggcagaacgcaaagcgcaatttcagggcaccaatgatctttcagcgctgttaagccaccgtgttgatttgggtcagataaaaaccattgaacatcctgccgagcagggaattattttacagggcagcgcttatgagcagctaaaaaatacctgccggacgcagggcgtgaccctgaatgtggccctacaatttgcctggcataaactgctgaacagttataccggtgatgagcagactattgtcggtacaacggtatccggtcgtgatgtgcccgtggaaggtattgcggacagtgtcggcctgtatatcaatactctgccgctgatggtgcaatgggatcacaccgatagtatagcggcggttttacaggtgattcagcaggatatcgccgccctgaacagccacagcgcggtatcgctttctggtttgcaatctgacggagagcggttattccatagcttgctggtctttgaaaactatccggttccggtagcagacgaaaataactcgggcattgagcacaccgtggcattccgccagtcggtggaaaaagtggactatccgctgtcactcatggcctatgaacaggataaccgtttaattatcaaactcagttatggtgaagactggctgacggaagaacagactcaacgcctgttggctcagcttgaacgcattctgtctgcggtgatgtacgccccaaaccaacctcatactgaaatcaccttcttcagcgaggaggaacgccataccttgctgcacagctggaaccagaccaatgtcccgtatccacaggataaaaccctgcaacagctgtttgaaacacaggtggaaaaaacaccggacaatgtagcactggtgtttgaggacgaaaccctgacctaccgccagttaaacgagcgggccaatcagctggcttacgtgatccgcgaatgttatcagcaacagaataataaagagatgtcggcggataccccgatagctctttatcttgaccgcagttcagaaatggttatcagtattctggcagtactgaaagctggtggcgcttatgtgcctatttcaccggaatatcctgccgaacgggtgcagtttattctgcaagatactgacactccatgcgtagtgacccaacaatgccatctgacaacactcaggcaatgtacatccgctctacctctccggcctgtattaatagcggcggatgatcacaccatcatccaaaaccaaccaatagaaaacctagtaccaataaacaaaagcactgatctggcctaccttatctacacctccggcacgaccggacagccaaagggtgttgaattaacgcatcggaatgttatcaaccatctctattggatgcagtcagaatatccattaaatatttcggataaagtcctacaacaaatcccgtatacctttgacgcctcagtctgggaactgattgctgctaactgtttcggtgccagtattgtgatggcttcaccgggaagccatagacaaccagaagatttgtatcaactgatccaaaaaacaggggtgacagtggtgcaatttgtcccgtccatgttgagtgctttctgtcagatagtacgggatttagggcagttactacccagcacaattcgctatgttttgtgtggcggagaggcactaacgatgtctcatgtcaatgcattcagggccataaaccgtcatgaaagtatattaattaacctctatggcccgacagaaacgacaaatgatatcacgcactttgatgtccctgatgagtttagtggcaatgttcccattggtaaggctcaccataacactcatctttatgtacttaatcaatatggaaaattatctcctgtgggtgcacccggcgagttatatatcggtggagccgggctggctcgcggatataggaatcggccggatctgactgccaagtattttgtaaataacccatttgccacagatgaagataaagctcagggctatacccgcctgtataaaacgggcgatcgggtacgctggctaccggacggtaatcttgagtatctgggtcgcaatgattttcaggttaaaattcgcggcttccgcattgagttgggtgaaattgaaagtgccctgtcctcgcatccacaggtgaaacaggcggttgtggtggatcatgaacatattggaaatactgtactggtcgcttatctggtgacagacgacaaattgtcggatgacaccctgcgtggctacatttcttcccgtctgcctgaatatatgctgcctgccagctttacccgtattgaatccatcccgttgactgtgaatgggaagctgaaccgccgcgccctgccagaaccagtctgggaaaatagcgatcactatgtcgccccacgcaatgaactggaaacccagttatgtgccctctggcaggaaatactggggctgaaacaagtaggtattgaggataatttcttccgtatcggcggaaactcactggtggccattaaactcacctccgcgatccgcgataccctgcaaattgacattccgttaaatattttgtttagcggtaaatgcatttcttcgttatcgcaatggctggaaacagatgcagatcatgctcaacccagcttactgaatttcttcacaccggagtcaaccgccaccaataagctatttatgatccatccggccaatggcggcagtgaagtttatgaatcgctggcaagtgcactgtctgataactataactgcatcggcattaataactataacctcagcacggataatccaaccgattcactgtatcagttggctaagatttataggaaattaatgctgacagaaaccactatcgatcatcctatttatattctgggctggtcactcggcgggcaattagcgatggaaatagcctttcagttagagcaattgggtgcaacaaaaattcagctgtttttattggatactgtactcaataacgaggaaataaaagcactcagagataaattagatatatcagcaataaatgaagtagtgactgaaaacttgcagaaactgggagctacaaatacctatatcaacaagatattggagattatgccatttgaaaattctatcgccaatggtgaattaagcggtaaattaaaccagaccaacattattttgtttaaagccggtcaggtgaaatcattaaataaaggggaaattgagctaccaataggccagttgatcatagatataccggataataatatttctcaatggtcagctaagccaatagtagttaagcagattactgattattatcacgaaaatatgattgatgcggttgaccttatcagtactgaagccgttaatttattaggaagtaaggaagaagtactgttgtaaaataactgttattgacgaggctggtaataccagcctcgttagtattgtagtcaacaaaattggtcactggcttagcattttcttcaaaaaatgacacagattccaatgtagtgtatgcacaccaacatatacatattttgtgtgatacaaaatgaatgattatcactgactaccaaaaacaaatttaaatcaataataaaactctaaccttacttagctattaataactagagatgactcattaactcgattctgttaccaaacgggtcatatacatgaaagcgattaaatccttcaatgggtacatcatcctgacatgtgtacccagcatcagtacacaatctccgtaactgattcaggttatcaaccagaaaagcaggatgcgctttagttccgggataaaaatcttcctgtacgcctaaatgaacctgaacttcaccactgataaaccaacaaccgccgcgtttagccaagtttgccggcttttgtatctcagccaatccgagaatatcgatataaaatttacgggctgtctcttcttctcctttaggcatcgcaagttggacatgatctatctttaataaagtcatgataagttctccttaaaggtaacgggtatataccaataggtttcctcgtgacggcaagtgtgacaattggcaataacaaactcaacaaccatcgattttattcggtagtttttgagcgcttcatcatattatttttaatataaagattgttgtttattaatatgaaaccttttaaatcaccttcaataaatatcactttgcaatcataatgatgctaacaataaatgaaaaataataataaaataacactatggtttatatataaccatttttatattaacaacaaatcatagtgtattttatttataatttatattttttgctataataaaaggaacaaagctaaacccgtccacctgataagttaatgggaaataaaaaaacacaaaattaacacagatatatctataacaccctattaaataatggacaatttacaattcatcatggtctggtttaccagcagataaactttggtgatgtcttaaatcaatgtattgattttttatcatcatacccttcagaaactattttcatgcgggtaaaacaggaatactctacagtcagtgatgctgattttattgctatttttaatggacattatggcatatttcatcagtatatgtatctggattcaaatattccatccctgggacaggtcagaggaaaaatagttattatttcaaatgtctcaggattaccggggatcccttgggatgtattttacatacaagatgattatgatgcagttggtctgtttgagaagtgggaagctatctctgaacacttcaatttaactatcaagaatcactccagtggtggtaaagatttttttattaattttttaagtattcaaggaaatcctcctcattggacaataaaaaagatgtcttataatataaatggctcttttgctacgatgttacaggaaggaaataatgtatctggactgggtattgggatcataccgatggattttcccaatttaataggcgaagttattggtctgataatcgatagtaattttaaaaaaacatgaataatattaataagattgaaactcaatgacgccagtatattacttactggcgtttattatcagattttagctgttagatcagcgtgagttaaataaattataaacgtaaaatgtcaacaactctaatcttcagtttctattcttgaatatttaaaatgaaaccatatctgccggattaaatgtactcattactcccagagcccccttaatcaacggaataaccaccggagagaaataggaacccagtggaatgctcgtgtggtcaatgctggtcagcatgttaaaatcccgattacgtccggtgacatcgtcactgattgctttaccaatgcgtaccgtctgcgctacaccatgaccactccagccatgtaccatatatacaggggtgttatcatcacttttacgggcatcagctgcaccattcagggtcaggtcactaatcccgccccaggaatattccagctccggtttctccagctgcggaaacactgttctgatacgatcaagcaaataattgtttacatcacgggatgaccaggagttaccggtgccctgcccgccaaacagcaggcggttgttgcgtactgaacgataataatctatctgtaactgtgtatcgtaaaccggcagatctgatggaagtaattctttgataggcatcggcaacggtgaagtgaccgccacataggtgaaaaaaggcactgtagtggaagagcctgagataaattcccctgtagaggcatgtaccccaagtaccacggctttactcgccctgatagttccctgactggtttcaataaccgctccgcgtttttcctgcctgataccggtcactttagtattgtcatatattcgtcccccaagcccggcaaaaccatatgccaagcctcgtagtaacgctaggggctgaacctgtccgctgatactgtcgatattggcgccatgataaatatccgagcgcacatactcttcttgtagttcgaatgggccaataaccttcaccatcttatcgcccaatcggcgccgtgcatcggcattagccactaatggccccatatgacccggatggatcgccgccgtaatatggccatatttacggtcacattcaaaaccgtaacgtgagcgaagttcatccacgagatccattgcttcaaccgatgtaaattgccataaacgtctggcttcttcaggtgaaaatttttccagtatagtttcagctgaccagcgtgcaatgccgggagtcatctgccccccgttacgtccggaagctcctgaaccaatattatctttttcaaccagaatgacatccacaccagcttcagccagatgtaacgccgtggaagcacccagcaatccgccaccaataacaacaacctcacagctttgatcaccgggaaggctgccaaaagccggccagtcagccagagaagcctcatagtagttggctggcatgtcgatagcagctatgtctctatgccagttccagatgcggggatccagccccagacgactgggtctggcctgtgcatcctgtaatagttttggccggagttgttcaataccggcggccagagtatcaaccttggttaattctccggcaagtagggatgttgtgggaaatagggatgaaagtacgcccgcacctgcaagcgttgctgcattagaaataaaatctcttctgttcattgtcattttagcgctcctgtatgacctgaaatcacccgttaacctgatccggggtattttcttgtgagtgaatccagctctctgagccgtatttattgctacccgccgatccttttagagtggcgagaatcaataaaataacagtgccaacaaacgggataagatgtaaaagtagccaccaggcactacagttgatatcgtgcaatcgacgtgcacttactgccagcgctggtaaaaatgtgagtagtagataaatggcgctgaaccagcccatatagatttcgggattagcaacagcaaataatctttccagataagaaatgataagaactgccagaatctgaaacaaaatgaaataccaaaaatccttacgctgtgctcttcccctgaagcaggcataattctttaatacgtttaaataccaatgcattattctcctctcttataaatcttctggttccacctgacctccatgtatgtttatatttttgcaatttactatgtggttcccacgctgggcgattacgcgaaattagatttctgcccgaatgatatttcagtatccatatgttctttatattcagtcagatagtcggtaattcgggtaatcatcttctgtgccagccggtataggtaagactgtttcccttatacaacgcggtcaatattgtacactaaatggcaataatttcatttaaaacaatttctttacgttacaaaaccactattaaaggcactcatccggcctgaattgtgagtctccgcttatgtagcagaggttcggttcgggtaatccgctcgagtgggacatattacacttcgtctttcaggttgcctctttgttgtttgctctcgctcaccccggccaccgtttttataaacatacggtttctatgctcctgagaattattgagaggctccttcctctcaccgttcagcaagcaaggctgagagtaacgctaaaaaatgccgtaacgatgtaatgcttgctcatcctccggtaccggagtgatagcatcccaaagttcagcgactttaccattctcaacgcgccacaattcaaagtagctatgacgttctccggcgatacttccttccgaatgagtcagaacaaactgaccgtcagcaacggtgtggtggatttttgtataatgcagcccttttccttcatctttcagttgctgaagaaatgcaataaccgctgccgcaccatcagatatatccgggctatgctgacggaacgcctcaccattggtgtaggtgataaattcaccatagtctccttcaatcagagcacgtctgaagaaattcaccaccagcttacggtttttttccctgtcatggttgtcgcccgcttcagtcgggccgtctaactgagtccgaccgctggcattaggcgcagcctgtggcactaaaccgtcccagtgctctacgatcaaaccatcaacaacccgatacaaatcgaagccaaccaacggctgagtatctaatcccgtaaaacggccgtggatagcgaccagatcaccctttagagcac

SEQ ID NO: 1745 - DNA, 11719 bp, Xenorhabdus sp.; identical to SEQ ID NO: 1744
  CDS (3)..(1562)

SEQ ID NO: 1746 - DNA, 11719 bp, Xenorhabdus sp.; identical to SEQ ID NO: 1744
  CDS (1573)..(6867)

SEQ ID NO: 1747 - DNA, 11719 bp, Xenorhabdus sp.
  CDS (4299)..(4625)
gtgctctaaagggtgatctggtcgctatccacggccgttttacgggattagatactcagccgttggttggcttcgatttgtatcgggttgttgatggtttgatcgtagagcactgggacggtttagtgccacaggctgcgcctaatgccagcggtcggactcagttagacggcccgactgaagcgggcgacaaccatgacagggaaaaaaaccgtaagctggtggtgaatttcttcagacgtgctctgattgaaggagactatggtgaatttatcacctacaccaatggtgaggcgttccgtcagcatagcccggatatatctgatggtgcggcagcggttattgcatttcttcagcaactgaaagatgaaggaaaagggctgcattatacaaaaatccaccacaccgttgctgacggtcagtttgttctgactcattcggaaggaagtatcgccggagaacgtcatagctactttgaattgtggcgcgttgagaatggtaaagtcgctgaactttgggatgctatcactccggtaccggaggatgagcaagcattacatcgttacggcattttttagcgttactctcagccttgcttgctgaacggtgagaggaaggagcctctcaataattctcaggagcatagaaaccgtatgtttataaaaacggtggccggggtgagcgagagcaaacaacaaagaggcaacctgaaagacgaagtgtaatatgtcccactcgagcggattacccgaaccgaacctctgctacataagcggagactcacaattcaggccggatgagtgcctttaatagtggttttgtaacgtaaagaaattgttttaaatgaaattattgccatttagtgtacaatattgaccgcgttgtataagggaaacagtcttacctataccggctggcacagaagatgattacccgaattaccgactatctgactgaatataaagaacatatggatactgaaatatcattcgggcagaaatctaatttcgcgtaatcgcccagcgtgggaaccacatagtaaattgcaaaaatataaacatacatggaggtcaggtggaaccagaagatttataagagaggagaataatgcattggtatttaaacgtattaaagaattatgcctgcttcaggggaagagcacagcgtaaggatttttggtatttcattttgtttcagattctggcagttcttatcatttcttatctggaaagattatttgctgttgctaatcccgaaatctatatgggctggttcagcgccatttatctactactcacatttttaccagcgctggcagtaagtgcacgtcgattgcacgatatcaactgtagtgcctggtggctacttttacatcttatcccgtttgttggcactgttattttattgattctcgccactctaaaaggatcggcgggtagcaataaatacggctcagagagctggattcactcacaagaaaataccccggatcaggttaacgggtgatttcaggtcatacaggagcgctaaaatgacaatgaacagaagagattttatttctaatgcagcaacgcttgcaggtgcgggcgtactttcatccctatttcccacaacatccctacttgccggagaattaaccaaggttgatactctggccgccggtattgaacaactccggccaaaactattacaggatgcacaggccagacccagtcgtctggggctggatccccgcatctggaactggcatagagacatagctgctatcgacatgccagccaactactatgaggcttctctggctgactggccggcttttggcagccttcccggtgatcaaagctgtgaggttgttgttattggtggcggattgctgggtgcttccacggcgttacatctggctgaagctggtgtggatgtcattctggttgaaaaagataatattggttcaggagcttccggacgtaacggggggcagatgactcccggcattgcacgctggtcagctgaaactatactggaaaaattttcacctgaagaagccagacgtttatggcaatttacatcggttgaagcaatggatctcgtggatgaacttcgctcacgttacggttttgaatgtgaccgtaaatatggccatattacggcggcgatccatccgggtcatatggggccattagtggctaatgccgatgcacggcgccgattgggcgataagatggtgaaggttattggcccattcgaactacaagaagagtatgtgcgctcggatatttatcatggcgccaatatcgacagtatcagcggacaggttcagcccctagcgttactacgaggcttggcatatggttttgccgggcttgggggacgaatatatgacaatactaaagtgaccggtatcaggcaggaaaaacgcggagcggttattgaaaccagtcagggaactatcagggcgagtaaagccgtggtacttggggtacatgcctctacaggggaatttatctcaggctcttccactacagtgccttttttcacctatgtggcggtcacttcaccgttgccgatgcctatcaaagaattacttccatcagatctgccggtttacgatacacagttacagatagattattatcgttcagtacgcaacaaccgcctgctgtttggcgggcagggcaccggtaactcctggtcatcccgtgatgtaaacaattatttgcttgatcgtatcagaacagtgtttccgcagctggagaaaccggagctggaatattcctggggcgggattagtgacctgaccctgaatggtgcagctgatgcccgtaaaagtgatgataacacccctgtatatatggtacatggctggagtggtcatggtgtagcgcagacggtacgcattggtaaagcaatcagtgacgatgtcaccggacgtaatcgggattttaacatgctgaccagcattgaccacacgagcattccactgggttcctatttctctccggtggttattccgttgattaagggggctctgggagtaatgagtacatttaatccggcagatatggtttcattttaaatattcaagaatagaaactgaagattagagttgttgacattttacgtttataatttatttaactcacgctgatctaacagctaaaatctgataataaacgccagtaagtaatatactggcgtcattgagtttcaatcttattaatattattcatgtttttttaaaattactatcgattatcagaccaataacttcgcctattaaattgggaaaatccatcggtatgatcccaatacccagtccagatacattatttccttcctgtaacatcgtagcaaaagagccatttatattataagacatcttttttattgtccaatgaggaggatttccttgaatacttaaaaaattaataaaaaaatctttaccaccactggagtgattcttgatagttaaattgaagtgttcagagatagcttcccacttctcaaacagaccaactgcatcataatcatcttgtatgtaaaatacatcccaagggatccccggtaatcctgagacatttgaaataataactatttttcctctgacctgtcccagggatggaatatttgaatccagatacatatactgatgaaatatgccataatgtccattaaaaatagcaataaaatcagcatcactgactgtagagtattcctgttttacccgcatgaaaatagtttctgaagggtatgatgataaaaaatcaatacattgatttaagacatcaccaaagtttatctgctggtaaaccagaccatgatgaattgtaaattgtccattatttaatagggtgttatagatatatctgtgttaattttgtgtttttttatttcccattaacttatcaggtggacgggtttagctttgttccttttattatagcaaaaaatataaattataaataaaatacactatgatttgttgttaatataaaaatggttatatataaaccatagtgttattttattattatttttcatttattgttagcatcattatgattgcaaagtgatatttattgaaggtgatttaaaaggtttcatattaataaacaacaatctttatattaaaaataatatgatgaagcgctcaaaaactaccgaataaaatcgatggttgttgagtttgttattgccaattgtcacacttgccgtcacgaggaaacctattggtatatacccgttacctttaaggagaacttatcatgactttattaaagatagatcatgtccaacttgcgatgcctaaaggagaagaagagacagcccgtaaattttatatcgatattctcggattggctgagatacaaaagccggcaaacttggctaaacgcggcggttgttggtttatcagtggtgaagttcaggttcatttaggcgtacaggaagatttttatcccggaactaaagcgcatcctgcttttctggttgataacctgaatcagttacggagattgtgtactgatgctgggtacacatgtcaggatgatgtacccattgaaggatttaatcgctttcatgtatatgacccgtttggtaacagaatcgagttaatgagtcatctctagttattaatagctaagtaaggttagagttttattattgatttaaatttgtttttggtagtcagtgataatcattcattttgtatcacacaaaatatgtatatgttggtgtgcatacactacattggaatctgtgtcattttttgaagaaaatgctaagccagtgaccaattttgttgactacaatactaacgaggctggtattaccagcctcgtcaataacagttattttacaacagtacttcttccttacttcctaataaattaacggcttcagtactgataaggtcaaccgcatcaatcatattttcgtgataataatcagtaatctgcttaactactattggcttagctgaccattgagaaatattattatccggtatatctatgatcaactggcctattggtagctcaatttcccctttatttaatgatttcacctgaccggctttaaacaaaataatgttggtctggtttaatttaccgcttaattcaccattggcgatagaattttcaaatggcataatctccaatatcttgttgatataggtatttgtagctcccagtttctgcaagttttcagtcactacttcatttattgctgatatatctaatttatctctgagtgcttttatttcctcgttattgagtacagtatccaataaaaacagctgaatttttgttgcacccaattgctctaactgaaaggctatttccatcgctaattgcccgccgagtgaccagcccagaatataaataggatgatcgatagtggtttctgtcagcattaatttcctataaatcttagccaactgatacagtgaatcggttggattatccgtgctgaggttatagttattaatgccgatgcagttatagttatcagacagtgcacttgccagcgattcataaacttcactgccgccattggccggatggatcataaatagcttattggtggcggttgactccggtgtgaagaaattcagtaagctgggttgagcatgatctgcatctgtttccagccattgcgataacgaagaaatgcatttaccgctaaacaaaatatttaacggaatgtcaatttgcagggtatcgcggatcgcggaggtgagtttaatggccaccagtgagtttccgccgatacggaagaaattatcctcaatacctacttgtttcagccccagtatttcctgccagagggcacataactgggtttccagttcattgcgtggggcgacatagtgatcgctattttcccagactggttctggcagggcgcggcggttcagcttcccattcacagtcaacgggatggattcaatacgggtaaagctggcaggcagcatatattcaggcagacgggaagaaatgtagccacgcagggtgtcatccgacaatttgtcgtctgtcaccagataagcgaccagtacagtatttccaatatgttcatgatccaccacaaccgcctgtttcacctgtggatgcgaggacagggcactttcaatttcacccaactcaatgcggaagccgcgaattttaacctgaaaatcattgcgacccagatactcaagattaccgtccggtagccagcgtacccgatcgcccgttttatacaggcgggtatagccctgagctttatcttcatctgtggcaaatgggttatttacaaaatacttggcagtcagatccggccgattcctatatccgcgagccagcccggctccaccgatatataactcgccgggtgcacccacaggagataattttccatattgattaagtacataaagatgagtgttatggtgagccttaccaatgggaacattgccactaaactcatcagggacatcaaagtgcgtgatatcatttgtcgtttctgtcgggccatagaggttaattaatatactttcatgacggtttatggccctgaatgcattgacatgagacatcgttagtgcctctccgccacacaaaacatagcgaattgtgctgggtagtaactgccctaaatcccgtactatctgacagaaagcactcaacatggacgggacaaattgcaccactgtcacccctgttttttggatcagttgatacaaatcttctggttgtctatggcttcccggtgaagccatcacaatactggcaccgaaacagttagcagcaatcagttcccagactgaggcgtcaaaggtatacgggatttgttgtaggactttatccgaaatatttaatggatattctgactgcatccaatagagatggttgataacattccgatgcgttaattcaacaccctttggctgtccggtcgtgccggaggtgtagataaggtaggccagatcagtgcttttgtttattggtactaggttttctattggttggttttggatgatggtgtgatcatccgccgctattaatacaggccggagaggtagagcggatgtacattgcctgagtgttgtcagatggcattgttgggtcactacgcatggagtgtcagtatcttgcagaataaactgcacccgttcggcaggatattccggtgaaataggcacataagcgccaccagctttcagtactgccagaatactgataaccatttctgaactgcggtcaagataaagagctatcggggtatccgccgacatctctttattattctgttgctgataacattcgcggatcacgtaagccagctgattggcccgctcgtttaactggcggtaggtcagggtttcgtcctcaaacaccagtgctacattgtccggtgttttttccacctgtgtttcaaacagctgttgcagggttttatcctgtggatacgggacattggtctggttccagctgtgcagcaaggtatggcgttcctcctcgctgaagaaggtgatttcagtatgaggttggtttggggcgtacatcaccgcagacagaatgcgttcaagctgagccaacaggcgttgagtctgttcttccgtcagccagtcttcaccataactgagtttgataattaaacggttatcctgttcataggccatgagtgacagcggatagtccactttttccaccgactggcggaatgccacggtgtgctcaatgcccgagttattttcgtctgctaccggaaccggatagttttcaaagaccagcaagctatggaataaccgctctccgtcagattgcaaaccagaaagcgataccgcgctgtggctgttcagggcggcgatatcctgctgaatcacctgtaaaaccgccgctatactatcggtgtgatcccattgcaccatcagcggcagagtattgatatacaggccgacactgtccgcaataccttccacgggcacatcacgaccggataccgttgtaccgacaatagtctgctcatcaccggtataactgttcagcagtttatgccaggcaaattgtagggccacattcagggtcacgccctgcgtccggcaggtattttttagctgctcataagcgctgccctgtaaaataattccctgctcggcaggatgttcaatggtttttatctgacccaaatcaacacggtggcttaacagcgctgaaagatcattggtgccctgaaattgcgctttgcgttctgcccagtagcggtctgattcggcctgatgatccagataatattgctgggtagcaggataggcttgatctaccctgatttcaggcatgtctccctgaatgatggcgttgtaatactcatgtactgcctgcaataaaatcgggttactccagccatcaataatgctgtggtgcagggtggtgagcactgtaaccagttgctcatgctgttggatcagggtaaagcgaatcaatccggggaggctgaaatcaaatggcagggcgcgatcccgttgttgaattgtactgatggctttgtgtcgtttatcctccggcaatgagcggatatctttcatgctgaagtttgcggtactgatactcgctccctcagtaataatttgtagcacctcttccgtccagttaaaggcggttctaaggataggaaaacgcagtgaagccagtgaccatgcttgctggtaggcagcaaaatcgagttgagtgtggtaatccagtaatatctgaacgcaataagcatcgtcctgcggctgggccagatgatgataaataaaaccctgttgcaggctggtggcggggtacagggcttcaatctgatacacctgttgaagctggcgcagcagcttgatggaaagccccttgataccataatccgcgggggtttttattccaccggattgcgcctgtttctgggcggtggtgatgacagaacggagcgcctgttcaaaggtggcaataaatgtctgtgtctgatccgcggttaaacgggaaccaatctggaattgtagctgaccggcctgaaccagtccgttgatgttcagcagcagatgactatgattttcgtttgccgaggtgttgcccgtatcgtcacgggtcagagcccagtgttgttcgctttcacccccaagttggcccagatagttgaaactgatggccggtaaatccccggacagagcacccgcctgacgtaatgcgccgtaaccgattcccttattggggacggcgcgcagcatctctttggtgtgaataatggtgtcagcaatatcctcctgcattgccagacgaacaggatataaggtagtaaaccagccaatggtttcagaaacatccagtgtctggtcgatattttcgcgcccgtggccttccagcgtgatggagttaacggattgtgagaacacctcctgtagagccagtgccagtgcgctcagcaataaatcattaatctcggtctgataaccggcgttagcttcccgcagtaaaatgcctgtcagtgcagtggaaatactcagagtgtgttggcttaagttatcagaagccgtgtgagcagaagtttctgccagcgcttgttgccagtaggtaatctcctgttgatgctgttcggcatactgacggatggccttcacccactgccggtagctgctggttttggcgggcagggtttcaccctgcaatatccgccggatatcttcggcaataatcctccacgagacgacatcaataatcaggtgatgtgcagcgaagaataagcgcgcactgccatctgtgtagccggtcagatgggcagcctgccacaatggcccattatcgtaattaaagtggttttgccatgaagtcagttgttgatggagtgcttcctcatctaaccaacgaatatcacagtgtggtaacgggagcggtgaagatggcattctggccgggtaacactggcgatagccctgttctgttctgacaaaatgagcgcgtaatatatcatgccgatcagctaatgccgccagcgcctgttcaacctgtgcggattttatatcgccgggtaaccggaccataaaggcctgattccagtgatgtggttttgtcagcgcccagccgaaaaacatttgctggacaggtaacaggtcaaattccccgtttaatattccctgttccgcggtgattatatcagcagaggtttcctgcattagtaattgggctactagccaccgtcggcgcttcgataattgaggtaacctgaagagtaaagcccgcctgccgtagtttcgagaccagctggatactgataatcgaatccccgccaatgcggaaaaagttatcatcaatacttatccgctccagccttaaaacttcctgccagagagtgcacaggcgggtttccagtgcattgcggggagcgacataattatcgcgatctccccaaaccggatcaggcaaggcgcggcggtctactttgccattcagggtcagcggaatagcgtcaatctgggtaaaactggccggtaacatataatccggcaggtgtgccgataagtaatcaagcaggttttcatcggagatctgcccgtctgttaccagataagcggccagtgctttatgaccatgatgctcccggtcaatcaccaccgcttgtttcacctgtagatgggatgtaagggcactttcgatttcccccagttcaatacggaacccgcgtaacttaacctgaaaatcgttgcggctaaggtattcaatattaccgtccggtaaccagcgggcgagatcgccagttttatacatgcgggcgttcggttccggagagaacggatcggtcaggaaacgctctgctgtcagttcaggccggttcagatagccccgcgcaacgccgtctccgccaatatggatttcaccgggcacacctgtgggaacgggctggccctgattatccagaatgtagatgcgggtattattgataggttgcccgataggcagttttccgctttccatccgtggcatatcgtaggctgtggcaaacgtggtggtttctgttggcccgtagacatgcagtaaatgttgaggagagtattccgcccgaaggcgcatggcggctcgattatcactcttttcaccgccgaacaggacataacgcagccctgacagtgcaggggcaatcaggtcggcatactgattaaacagcgcggtggtcagaaacagggcactgacaccggcggctgacaggcactgaccgaattcaactggctgtaacagggttttctccggcaccagcaggatacgggcaccattcactaaccctgaccacacttcccatgtcgcagcatcaaatgaaatattggcacaatgcgcgatgcagtcatccggcccgatatcggcaaagccattattaataatcaggcgtaaaacattgcgatgctccaccatcacgcctttaggctgtccggtagaaccggaggtataggtgacataagccagatggcgtgatgtcagccctaatgcctgcgtatcagggttcgtatccggcagggtggcaagctctgtcgcctgtgcatcaagcaataccgtggtgatcgagcaggataatttatccgcctgtgtggtttgtgtcagcagggcaaccggtgctgaatcttccagcataaagctgagacgttcagtcggataggccggatcgagcggtacataagccccgcctgccttgagaatagcgagtaaccctaccaccatgctccttt

SEQ ID NO: 1748 - DNA, 11719 bp, Xenorhabdus sp.; identical to SEQ ID NO: 1747
  CDS (1772)..(3073)

SEQ ID NO: 1749 - DNA, 11719 bp, Xenorhabdus sp.; identical to SEQ ID NO: 1747
  CDS (3)..(578)

SEQ ID NO: 1750 - DNA, 605 bp, Xenorhabdus sp.
  CDS (1)..(483)
gcatatgggttgtcagggctgtcatggagtgagactgtgcgcactgatcagcagatggaatatatgatttatccgcgcttattaccgttggcagaacgggcatggcatcaggctgagtgggagcagaattaccagcagggaagggagtataaaggtggaattacacggtatgtagacaccgataagcttaataaggactggctgcattttgctaatctggtgggacagcgcgaaatggctaaactggataaagctcatattgcgtaccgtctgccgatacccggtgcaagaattatctccgggacactggaagcgaatatcgccttgccgggtctgactattcagtattcattagacgatggaaaaacatgggaaacttatgatgacagacagcggccgcatgttaatggtcatgtgaaaattcgttctgtcagcactgatggcaagcgtttcagccgggtggaagaggtatcctctgaataatcttaaagcagctccttaataggatattcaaaagcagactgccgattagtcttagctaatcggcagtagcttctctgacagggtcagacactagaagtagcagtaaatgctgattaattata

SEQ ID NO: 1751 - DNA, 8623 bp, Xenorhabdus sp.
  CDS (1)..(198)
gcgaaaactcggccacccgtaaaacttatctttggctcactctctcagatgggtgaaaaaattattcggacgataggccagctgcgagccaattttgcgatgacgatgaaagcaacctgctatgatttgcaacgttgggtttatttcacagaagagagagttcatgctttttattttcgagatgtgatgaaaaagtgatgcgtttgtttttttcccctgaacaagcaagaaaaagtcatacacaataaggtcagttattggtgagttcaaaattgatcttattttttgtattgagagtttttagaggttcccttaattaaattgagttctcttttatgtaaactcaaatcatacgtcgttttgtaaggaagaaaatgactggaacgtttttgaattttctttttcttatcatttttattgctatcactcatcacttttcctgaatctacttgagaatatattaagtttttttcaatttaatccttttcattattaattcaatagcgaagaaactaagatcaatagatagttcaaatccgaagttgtgtatttccatcatcataaacggcgaagcctcgatggtttcgaccattgaggcttctataaatcgtctactaccataaacaagagagtttatatcatagaacatgtcaagtataacgcaattagtctaaatcatgttgcttaaagtgacattaagttattccattttttgtgatatatctcatgaatattaagccaatcaaattctaacgtgaaatataaaaaggcggaaagtaaatataaccggctctgaattaataaaagtcataaataaattcaataatacattttcgttaaaaaattcactaacccgtactgtcaaacatctttctctaacctttaactactgaaagaataaaaacaggataaaaggtaaatttatcataaaattgggcttatccttttctattttcattatcataaatagcaaaacctcaagagctgcaacccttgaggattctatattaaatatcgtctactcccctaaagaggataccgatataaacaatgatattatagcgcgttaaatataagccacatgaaatcaaattgcgctcaatcattaacggttttgtgatgtggttcataagcattggcgtgtttatgttaacataagatcccaataaataagaatattaattaaaaaattaacgtaacaacatgacttatttaaattatcgaaataattatcaatagattaaaaaaaggaaaatataaaattcagactcaacttaaggcgcagtatcctgccccttaagttttaaagagtaaatctgattactttcctttagacatcatcttctgcatcaccagctgtccaaacatacccgcagattgcctgacctgccctacgccctgactcatcattccggccatatcacccatgcgtaccccggcccacgctaatgcccccagccaaaccatcggcaggacaataaacagtgtccccatcaccagccccatgattaaatcatccgaggtgttctgaatacccgccagattaaacaggctgtgggtgtctgagccgtacagggcttccagtaaatggctgtccagccaacgcgccagctcccaccagaaggtcaggaaattcagtgcgaaaatcacaaacgtcagcgtaaagatggtcttaaactcataggccgcaaacagcacaatcagcggtatgaggatatacaacgccatcaggatcaccgcctgcatcatcggcaacgcctgacgtaccgcatcgaacatcggcatactgagtaatccacccaataaagcccctgcggaagtgccgatgcggttagcgccatccaacaaggtgggatcggcattacctccatagcctgcgtagacatagccctcctgagaaatcgtcaggttcaccgggctgaccagacggcggatcaccgcttcctgataagccggcgtgtttttacccagtattttcagtgtcgctgacaggcgcaaccacaaccccggatcggcctgcgccagtacccgatctttcagacctgtctgggccgttgaccaccaggcctgacacgtcgggtatccgccctgcccggtatacggccgcccgttatcccggctctcctgccacggaaaatccgcccgggggaggcgggattgcagcgtccggtaatccccggctaaaaacgtccggctacccagccagccgatatcattcaggataatcgggtcagtcgtgtgctcctgatcgcgcaatttccactgatacagggctaaagcatagcaatcgtgggtaaaatcctgtaattccgccgccagagccgggttgctgatgcgggtgtgctgcacgtcaaagcgcagttgccgcagatctggccgacagggaatggacgccaccgccgcctgtgtcagtcccttggataaccggtgcaccaccgcccaccagagcggcacagccgcggtctgattgttcagactggacatcaccggcgcatagccactgttatccggcgctgtcggtgtccaggtgccacatcttttggcacgggaagtatcgtactgaagggtggtcaggctgacattgaccagcggcacacaacacaccaccatcacgaagaacgcgccatacagggtgttttcaatccgggccagcgactgtaacccggcctgaccgtcttcttcgccacactctctgactttcagccagaccgcaatcacttttactactaacggcagcgtaaacagtccggtcgcaatcaggatgtgccacaggccattgttgatgacccagccgaggagtgtcagaaaatattccagatagctgttggctgtcatcgtatctcctcaatagtgcctgacaaagcatactcacccagcaggataaacagcaggctggccaccatcattcgtatcaacattgcacggtatgccggcagatgtttcacccgttgccaggttttctgaccgccccaacccagtcccgcatacaggcctaaccgccagactaaccagactcccccggtttcggtcacccagtggtgaatgtgattaagtttttctgcctgatgcagcccgacccagcctgtcgccaaagtgatacccatcaccaacacgataaccagtgataacacagcaccttttctgaatattgaatgtatctctgtcatcatccgccttacctgcgctcacggctcggagtttccaactggtaaaaacgcgcatcggtgttgtccggcacctgtttttgcggatgcatgtgaatgcgctgggtgtcccgctcaataatggtcaggatggcattacgggacagggcctgtttcagctgcatttcattcttcagcgcattgatttccctgtccagcgcggcaatccggcgttccccttcagccagcgcttctgactgtgccgctgcattgggttcagacatgccggtgataagcatccgccgcatcagtaacgccgtttccacggtttccgccatcgccagctcccccgctaaacgtcccgtcagggcagctttgtccgggtctcgttgcaacgcctgaatgatacctttggttaccgtcagactgccggttttcagtttcgccagattgaccatcgtcggtttttccgtaccgctgaccagcttgaccagctgctctgtattggtttgggtatgcgcttccagcatcggggcaaagcccgtgcccgcaacggtagtgcccggctggtgtttctcgccgccactggtgcagtctgtcgcctgagcacaggtacggatgacccggtcgcccagcacactgaccaccgcttcggccgcttcacgggcattgctgaatttacgacaggcactgccttcacacttcagactactgaccgatgactggctcagcaccggcaactgattcatcatattaaagccggcactggctaaatcccgggtcgggcgaatggcattctgtcccttaccgccctgccgctggccgccaatccacggatgtccgccggcaccggtggctttgctgccggcgttattgacacgcaccgcatcaccatccccgccattaaccagacttttgtactcctgcaaagcagccgactgtgtccatttattattctgcgcaaaatccatcattttattggccatcgcctgacagttgaactgggctttgtcgaacgccacattggcctgcaagaccccgttggtcagcatgtcatacagtcccggattggcccgctggataatcatcgccggcaggctggccacggcaccggtggcaccctgaatgacatcactcatcaggttcttgaacccggccgtaatcccgttcaactgattactgaccgtggctttcaggtcgaaattgccgcacatcaaatccgagcgccagcccagctctaatccaccgagagtggtggaaccactgcgactggccggttcagatatcaccgaaccaccccccagggtatagaacagcgtatcagacactgcaccgctggcgtctgccccataacccagtgcactgcggttcacctgcggtaaggtcagagacagccccgtggcattggcttgtgccgaagcgatgaccagtccaccgaccatcagccataacgcatttatttttctcatgattcatcccttgttcagatatccgtactgctgagaaaacgctgtccgcgccgctggcaacaactgtagggctgccacagggcatacgcctgattgctatcgattgccgctgtgtgtgcaccatcaggaaacaccgcacaggactgacttaacgtcggtgataaccgctgccattgatgatttttgctaccggtgttttcggtgaccgattcaggtggccagtaaccgtcagtgcgggtgcctttcaaggtctgataaacatggggttgcccgacacgggtaatgatatctgcgacccgttgcgccaccacggctgacgccttgtcatcatcagtctgattaataaaccctgagcgcggataaatattgccccatacagtgccagccatctgactgcccacttcccgctgaccgggtatcagggcttccgggtagaacgattccggcaggcccgagcgccatgccacgctatccagtgtgctgagaaaataaggcaccaacggggtgaccgcactgcgacacgaatagccgggaatttgcccgcctatcaggttggttgcgggatgcccgatggcatcagcatatttgaaacgcagactggtacgccgttgcccggcaatctggacattatgattacccccgccggcactcagatgggataacgccccggtcacggtattttccagcccgcctgagagttgactgacctgtgccatttctgtccacggattgccaccggaggcgtgataggtggataccaccgcttcagggagataatgggtcaccttcaccgaggttttcaccgtacaaccgtgcaggccacagagcagccagtaacagaggccactgacccgccactgaatgcaggcgggcgagagactgccggcaacaatctgagccgtattgatggaagcctgtgtcaccggggaaaatgccgctatcagggtgatgagtgcaggaaacgtcacacgttgaagactcatggctgatattgctccctgagtacgcgggcttttaccacatccgcggtgccatacaccacctcccgatcatcaaagaccacggccggatacttttttacgcctgattgccatgcctgcaccacagcacggtaagccttgataagttgctgctcctgctgatgccagtgagacgattgcagtattgcctgtgcctgaacagcggcttgctgtggatcagtagaaagctgagagaagatttgcttttgctgttgttcagccgcatccagccagacgacctgtgtttcaggggtgaggtgagtgggcgtgtgttggctgtcagtataaatcaccgttttcgcatgcactgatagtgctagcgctatcccgagacagcacactatccctgacttccacataatcaattttccgtttcgcaagacattagcttagcttgcagaaacatgttaccgatgtcagtgattaattagttttcacaaaaatgaaaatgaatttctttaaaattttttatctttcatcactaattagcacgttgacaatcattttgccctttgctgaaaaatagcattaatagcgctaatcgaggattatctctccctatatattaagacgtgccctaaatcacaaaactcttccttcataaagtaaatttaacaaacaatcccgtaaaatatcgtattaaataccatcaattttcaagtgtgtataaatttttccgataaaataccgatgaataattcatcggaacccatctatgtgaaaagacaggattaaaccaatcatccatgatgaagatacagagttaattgaatatcgaaaagggaacggtgtgaaaacgtttgaacagtattttcagaacgaaattgactatttccgcgcattacaggaattggttcgtcaggaaaagcctcatctggcggatatactcaatgggcaagatccggatgtggcaagaatccaggaaggttttgcttttttagctgcccgacagcaacaaaagattgatgatgcttttcctgagtatacccaaccgttactacaacgtttacacgctcaggcgatcaaaggtattccggcaacgagtgttgtgcagctgggtagccgtcaggatgcagacttcgcctataccgtgcccaccggcaatcacatcacttctgcgcacaatacgtcatttattacctgtcgcccctgtcatatcgagcccctgtcccttatccgtcgcgaactgcatcatcaggcacaagaaactcaacttaccctgacattccggtataccggtaaagacaatcattggccgattacccccataaacctgttcctgagtaccgatgaaactgtagcgaataccctgatgctggcgatgacacaagacatcgatgatattcagttttatcgggaacgtacccgctatccgatggacggtatacggctggagccattacagggtacggcaaggcttcttctgtcatcgccacagccggcgggaaactgggcacctcaaatgcttctggaatccctttacctgccacatgttcatgcctttgttactctggttttgcctacttcgatgcgaaatcaattattaatgacagaaacccgtgaattttctgtcgtgataaagttcagttgtgaactggctttgtctgaagcacagatagccgaggctttccacctgcactgtgtgcctatgttcaaccggcaaacgacacaattaacagtgccgttttcgccagagacaacccgttaccgtttacccttatccccttcgcagggattgttgggggtatccgatatcggactggagcacgaaccggacgaagagcatgaacggggagatacttgccggttctatcctgatcgtttgctcacgggcatggatcgttttcctgaggataagcaaaactggttctattctctggaaatgagtgaggatgcgttaggccggttacaatacgatctgatcttccgggacagtctggggcaaccaatggtacagccaccggcacaaaaatttatctgccagataatgacatacgaacttcagccagtcacattacaggctgacgaaatatgcaatgcggatgaaacgctccctgataatgtgcaaatcaaaaacctgacactgccttcgtttccctacccgccggtcaccgacagccatcgttactggaccttattgtcgcattattctgccagcccgtttttgttgtatgccgttgacgccctgaaagaattattgcacggctatgacttttacgctgaggcagaccgaacccggagccgaacattacgacgtatgattgagggcattgtcgccatacattccgaatccaaagactgggttatccggggaaaaccccatcgctgtttgtttgtcgagttaacactggatgactccgtttaccatgatgaaggtgaagccttccggtttgctcatacggtgtttcagtttctgccgttctgcctgacacaagatatgcgtcttttaatgacctgtcgcaccactgccggcaagtcctatgcgttatcacgttatcccgtacaggggtatcgcccgttaatgtaataataaggaaagattgttatggatggtttagtctttacctgtcaaatcggtcggcttccgccgacaacatttcaggtagtgagtttcacgctacaggagcatttatctcaactttttcacctgaatatgacggtagtcagcgtcaccaacgcgattcccttgcgtgaacagcttaaccgtgaagcctcattgacagtgaagcgtaatggtgtggttgagcgcacaatcaatggtatcgtagccggtgcgacgcctgtctcttgatcatatttcataggtcaagagacttggacagtaaataaccgtcaaggatggtttgtaacatgaaccatccttcccacagcctttcccatcctactcggccatttcgtttagagtcataccaacccgccagtttgcccaaattaatataggccccataaacgcttggggctgtcttaaggaagtttttcttctcttggtttg

SEQ ID NO: 1752 - DNA, 8623 bp, Xenorhabdus sp.; identical to SEQ ID NO: 1751
  CDS (6422)..(8158)

SEQ ID NO: 1753 - DNA, 8623 bp, Xenorhabdus sp.; identical to SEQ ID NO: 1751
  CDS (8285)..(8422)

SEQ ID NO: 1754 - DNA, 8623 bp, Xenorhabdus sp.
  CDS (5789)..(7303)
caaaccaagagaagaaaaacttccttaagacagccccaagcgtttatggggcctatattaatttgggcaaactggcgggttggtatgactctaaacgaaatggccgagtaggatgggaaaggctgtgggaaggatggttcatgttacaaaccatccttgacggttatttactgtccaagtctcttgacctatgaaatatgatcaagagacaggcgtcgcaccggctacgataccattgattgtgcgctcaaccacaccattacgcttcactgtcaatgaggcttcacggttaagctgttcacgcaagggaatcgcgttggtgacgctgactaccgtcatattcaggtgaaaaagttgagataaatgctcctgtagcgtgaaactcactacctgaaatgttgtcggcggaagccgaccgatttgacaggtaaagactaaaccatccataacaatctttccttattattacattaacgggcgatacccctgtacgggataacgtgataacgcataggacttgccggcagtggtgcgacaggtcattaaaagacgcatatcttgtgtcaggcagaacggcagaaactgaaacaccgtatgagcaaaccggaaggcttcaccttcatcatggtaaacggagtcatccagtgttaactcgacaaacaaacagcgatggggttttccccggataacccagtctttggattcggaatgtatggcgacaatgccctcaatcatacgtcgtaatgttcggctccgggttcggtctgcctcagcgtaaaagtcatagccgtgcaataattctttcagggcgtcaacggcatacaacaaaaacgggctggcagaataatgcgacaataaggtccagtaacgatggctgtcggtgaccggcgggtagggaaacgaaggcagtgtcaggtttttgatttgcacattatcagggagcgtttcatccgcattgcatatttcgtcagcctgtaatgtgactggctgaagttcgtatgtcattatctggcagataaatttttgtgccggtggctgtaccattggttgccccagactgtcccggaagatcagatcgtattgtaaccggcctaacgcatcctcactcatttccagagaatagaaccagttttgcttatcctcaggaaaacgatccatgcccgtgagcaaacgatcaggatagaaccggcaagtatctccccgttcatgctcttcgtccggttcgtgctccagtccgatatcggatacccccaacaatccctgcgaaggggataagggtaaacggtaacgggttgtctctggcgaaaacggcactgttaattgtgtcgtttgccggttgaacataggcacacagtgcaggtggaaagcctcggctatctgtgcttcagacaaagccagttcacaactgaactttatcacgacagaaaattcacgggtttctgtcattaataattgatttcgcatcgaagtaggcaaaaccagagtaacaaaggcatgaacatgtggcaggtaaagggattccagaagcatttgaggtgcccagtttcccgccggctgtggcgatgacagaagaagccttgccgtaccctgtaatggctccagccgtataccgtccatcggatagcgggtacgttcccgataaaactgaatatcatcgatgtcttgtgtcatcgccagcatcagggtattcgctacagtttcatcggtactcaggaacaggtttatgggggtaatcggccaatgattgtctttaccggtataccggaatgtcagggtaagttgagtttcttgtgcctgatgatgcagttcgcgacggataagggacaggggctcgatatgacaggggcgacaggtaataaatgacgtattgtgcgcagaagtgatgtgattgccggtgggcacggtataggcgaagtctgcatcctgacggctacccagctgcacaacactcgttgccggaatacctttgatcgcctgagcgtgtaaacgttgtagtaacggttgggtatactcaggaaaagcatcatcaatcttttgttgctgtcgggcagctaaaaaagcaaaaccttcctggattcttgccacatccggatcttgcccattgagtatatccgccagatgaggcttttcctgacgaaccaattcctgtaatgcgcggaaatagtcaatttcgttctgaaaatactgttcaaacgttttcacaccgttcccttttcgatattcaattaactctgtatcttcatcatggatgattggtttaatcctgtcttttcacatagatgggttccgatgaattattcatcggtattttatcggaaaaatttatacacacttgaaaattgatggtatttaatacgatattttacgggattgtttgttaaatttactttatgaaggaagagttttgtgatttagggcacgtcttaatatatagggagagataatcctcgattagcgctattaatgctatttttcagcaaagggcaaaatgattgtcaacgtgctaattagtgatgaaagataaaaaattttaaagaaattcattttcatttttgtgaaaactaattaatcactgacatcggtaacatgtttctgcaagctaagctaatgtcttgcgaaacggaaaattgattatgtggaagtcagggatagtgtgctgtctcgggatagcgctagcactatcagtgcatgcgaaaacggtgatttatactgacagccaacacacgcccactcacctcacccctgaaacacaggtcgtctggctggatgcggctgaacaacagcaaaagcaaatcttctctcagctttctactgatccacagcaagccgctgttcaggcacaggcaatactgcaatcgtctcactggcatcagcaggagcagcaacttatcaaggcttaccgtgctgtggtgcaggcatggcaatcaggcgtaaaaaagtatccggccgtggtctttgatgatcgggaggtggtgtatggcaccgcggatgtggtaaaagcccgcgtactcagggagcaatatcagccatgagtcttcaacgtgtgacgtttcctgcactcatcaccctgatagcggcattttccccggtgacacaggcttccatcaatacggctcagattgttgccggcagtctctcgcccgcctgcattcagtggcgggtcagtggcctctgttactggctgctctgtggcctgcacggttgtacggtgaaaacctcggtgaaggtgacccattatctccctgaagcggtggtatccacctatcacgcctccggtggcaatccgtggacagaaatggcacaggtcagtcaactctcaggcgggctggaaaataccgtgaccggggcgttatcccatctgagtgccggcgggggtaatcataatgtccagattgccgggcaacggcgtaccagtctgcgtttcaaatatgctgatgccatcgggcatcccgcaaccaacctgataggcgggcaaattcccggctattcgtgtcgcagtgcggtcaccccgttggtgccttattttctcagcacactggatagcgtggcatggcgctcgggcctgccggaatcgttctacccggaagccctgatacccggtcagcgggaagtgggcagtcagatggctggcactgtatggggcaatatttatccgcgctcagggtttattaatcagactgatgatgacaaggcgtcagccgtggtggcgcaacgggtcgcagatatcattacccgtgtcgggcaaccccatgtttatcagaccttgaaaggcacccgcactgacggttactggccacctgaatcggtcaccgaaaacaccggtagcaaaaatcatcaatggcagcggttatcaccgacgttaagtcagtcctgtgcggtgtttcctgatggtgcacacacagcggcaatcgatagcaatcaggcgtatgccctgtggcagccctacagttgttgccagcggcgcggacagcgttttctcagcagtacggatatctgaacaagggatgaatcatgagaaaaataaatgcgttatggctgatggtcggtggactggtcatcgcttcggcacaagccaatgccacggggctgtctctgaccttaccgcaggtgaaccgcagtgcactgggttatggggcagacgccagcggtgcagtgtctgatacgctgttctataccctggggggtggttcggtgatatctgaaccggccagtcgcagtggttccaccactctcggtggattagagctgggctggcgctcggatttgatgtgcggcaatttcgacctgaaagccacggtcagtaatcagttgaacgggattacggccgggttcaagaacctgatgagtgatgtcattcagggtgccaccggtgccgtggccagcctgccggcgatgattatccagcgggccaatccgggactgtatgacatgctgaccaacggggtcttgcaggccaatgtggcgttcgacaaagcccagttcaactgtcaggcgatggccaataaaatgatggattttgcgcagaataataaatggacacagtcggctgctttgcaggagtacaaaagtctggttaatggcggggatggtgatgcggtgcgtgtcaataacgccggcagcaaagccaccggtgccggcggacatccgtggattggcggccagcggcagggcggtaagggacagaatgccattcgcccgacccgggatttagccagtgccggctttaatatgatgaatcagttgccggtgctgagccagtcatcggtcagtagtctgaagtgtgaaggcagtgcctgtcgtaaattcagcaatgcccgtgaagcggccgaagcggtggtcagtgtgctgggcgaccgggtcatccgtacctgtgctcaggcgacagactgcaccagtggcggcgagaaacaccagccgggcactaccgttgcgggcacgggctttgccccgatgctggaagcgcatacccaaaccaatacagagcagctggtcaagctggtcagcggtacggaaaaaccgacgatggtcaatctggcgaaactgaaaaccggcagtctgacggtaaccaaaggtatcattcaggcgttgcaacgagacccggacaaagctgccctgacgggacgtttagcgggggagctggcgatggcggaaaccgtggaaacggcgttactgatgcggcggatgcttatcaccggcatgtctgaacccaatgcagcggcacagtcagaagcgctggctgaaggggaacgccggattgccgcgctggacagggaaatcaatgcgctgaagaatgaaatgcagctgaaacaggccctgtcccgtaatgccatcctgaccattattgagcgggacacccagcgcattcacatgcatccgcaaaaacaggtgccggacaacaccgatgcgcgtttttaccagttggaaactccgagccgtgagcgcaggtaaggcggatgatgacagagatacattcaatattcagaaaaggtgctgtgttatcactggttatcgtgttggtgatgggtatcactttggcgacaggctgggtcgggctgcatcaggcagaaaaacttaatcacattcaccactgggtgaccgaaaccgggggagtctggttagtctggcggttaggcctgtatgcgggactgggttggggcggtcagaaaacctggcaacgggtgaaacatctgccggcataccgtgcaatgttgatacgaatgatggtggccagcctgctgtttatcctgctgggtgagtatgctttgtcaggcactattgaggagatacgatgacagccaacagctatctggaatattttctgacactcctcggctgggtcatcaacaatggcctgtggcacatcctgattgcgaccggactgtttacgctgccgttagtagtaaaagtgattgcggtctggctgaaagtcagagagtgtggcgaagaagacggtcaggccgggttacagtcgctggcccggattgaaaacaccctgtatggcgcgttcttcgtgatggtggtgtgttgtgtgccgctggtcaatgtcagcctgaccacccttcagtacgatacttcccgtgccaaaagatgtggcacctggacaccgacagcgccggataacagtggctatgcgccggtgatgtccagtctgaacaatcagaccgcggctgtgccgctctggtgggcggtggtgcaccggttatccaagggactgacacaggcggcggtggcgtccattccctgtcggccagatctgcggcaactgcgctttgacgtgcagcacacccgcatcagcaacccggctctggcggcggaattacaggattttacccacgattgctatgctttagccctgtatcagtggaaattgcgcgatcaggagcacacgactgacccgattatcctgaatgatatcggctggctgggtagccggacgtttttagccggggattaccggacgctgcaatcccgcctcccccgggcggattttccgtggcaggagagccgggataacgggcggccgtataccgggcagggcggatacccgacgtgtcaggcctggtggtcaacggcccagacaggtctgaaagatcgggtactggcgcaggccgatccggggttgtggttgcgcctgtcagcgacactgaaaatactgggtaaaaacacgccggcttatcaggaagcggtgatccgccgtctggtcagcccggtgaacctgacgatttctcaggagggctatgtctacgcaggctatggaggtaatgccgatcccaccttgttggatggcgctaaccgcatcggcacttccgcaggggctttattgggtggattactcagtatgccgatgttcgatgcggtacgtcaggcgttgccgatgatgcaggcggtgatcctgatggcgttgtatatcctcataccgctgattgtgctgtttgcggcctatgagtttaagaccatctttacgctgacgtttgtgattttcgcactgaatttcctgaccttctggtgggagctggcgcgttggctggacagccatttactggaagccctgtacggctcagacacccacagcctgtttaatctggcgggtattcagaacacctcggatgatttaatcatggggctggtgatggggacactgtttattgtcctgccgatggtttggctgggggcattagcgtgggccggggtacgcatgggtgatatggccggaatgatgagtcagggcgtagggcaggtcaggcaatctgcgggtatgtttggacagctggtgatgcagaagatgatgtctaaaggaaagtaatcagatttactctttaaaacttaaggggcaggatactgcgccttaagttgagtctgaattttatattttcctttttttaatctattgataattatttcgataatttaaataagtcatgttgttacgttaattttttaattaatattcttatttattgggatcttatgttaacataaacacgccaatgcttatgaaccacatcacaaaaccgttaatgattgagcgcaatttgatttcatgtggcttatatttaacgcgctataatatcattgtttatatcggtatcctctttaggggagtagacgatatttaatatagaatcctcaagggttgcagctcttgaggttttgctatttatgataatgaaaatagaaaaggataagcccaattttatgataaatttaccttttatcctgtttttattctttcagtagttaaaggttagagaaagatgtttgacagtacgggttagtgaattttttaacgaaaatgtattattgaatttatttatgacttttattaattcagagccggttatatttactttccgcctttttatatttcacgttagaatttgattggcttaatattcatgagatatatcacaaaaaatggaataacttaatgtcactttaagcaacatgatttagactaattgcgttatacttgacatgttctatgatataaactctcttgtttatggtagtagacgatttatagaagcctcaatggtcgaaaccatcgaggcttcgccgtttatgatgatggaaatacacaacttcggatttgaactatctattgatcttagtttcttcgctattgaattaataatgaaaaggattaaattgaaaaaaacttaatatattctcaagtagattcaggaaaagtgatgagtgatagcaataaaaatgataagaaaaagaaaattcaaaaacgttccagtcattttcttccttacaaaacgacgtatgatttgagtttacataaaagagaactcaatttaattaagggaacctctaaaaactctcaatacaaaaaataagatcaattttgaactcaccaataactgaccttattgtgtatgactttttcttgcttgttcaggggaaaaaaacaaacgcatcactttttcatcacatctcgaaaataaaaagcatgaactctctcttctgtgaaataaacccaacgttgcaaatcatagcaggttgctttcatcgtcatcgcaaaattggctcgcagctggcctatcgtccgaataattttttcacccatctgagagagtgagccaaagataagttttacgggtggccgagttttcgc

SEQ ID NO: 1755 - DNA, 8623 bp, Xenorhabdus sp.; identical to SEQ ID NO: 1754
  CDS (5517)..(5792)

SEQ ID NO: 1756 - DNA, 8623 bp, Xenorhabdus sp.; identical to SEQ ID NO: 1754
  CDS (4039)..(5448)

SEQ ID NO: 1757 - DNA, 8623 bp, Xenorhabdus sp.; identical to SEQ ID NO: 1754
  CDS (3089)..(3997)

SEQ ID NO: 1758 - DNA, 8623 bp, Xenorhabdus sp.; identical to SEQ ID NO: 1754
  CDS (2685)..(3032)

SEQ ID NO: 1759 - DNA, 7655 bp, Xenorhabdus sp.; identical to SEQ ID NO: 197
  CDS (1906)..(2244)

SEQ ID NO: 1760 - DNA, 7655 bp, Xenorhabdus sp.; identical to SEQ ID NO: 197
  CDS (6937)..(7593)

SEQ ID NO: 1761 - DNA, 7655 bp, Xenorhabdus sp.; identical to SEQ ID NO: 197
  CDS (2510)..(2971)

SEQ ID NO: 1762 - DNA, 7655 bp, Xenorhabdus sp.; identical to SEQ ID NO: 197
  CDS (1539)..(1901)

SEQ ID NO: 1763 - DNA, 7860 bp, Xenorhabdus sp.
  CDS (7647)..(7859)
atgctcgttccatgtgctctaaagaagggagcagactgtaaatctgccgtcacagacttcgaaggttcgaatccttcccccaccaccatgaaccagttttcatcttgagtgttctgctcgagttaatactccagacaaaatacttgagatacaatacagctgattaaagtcaggtagccgagttcacgcgggcatcgtataatggctattacctcagccttccaagctgatgatgcgggttcgattcccgctgcccgctccaagatgtgctgatatagctcagttggtagagcacacccttggtaagggtgaggtcggcagttcgaatctgcctatcagcaccacttccccagttcttgtctcctgattttcttcctgttgatatctaaaaacaagcaaaattgcttggttgatgtggtgaaaccaccgattccgtgtcttagagggacaacctaatgtctaaagaaaagtttgagcgttcaaaaccgcacgttaacgttggtactatcggccacgttgaccacggtaaaactaccctgactgctgcaatcaccaccgttctggcaaaaacctacggcggtaacgcacgtgcattcgatcagatcgataacgcaccagaagaaaaagcacgtggtatcaccatctctacttctcacgtagagtacgataccccaactcgccactacgcgcacgttgactgcccaggccacgccgactatgtgaaaaatatgatcaccggtgctgctcagatggacggtgcgattctggttgttgctgcaactgatggcccaatgccacagactcgtgagcacatcctgctgggtcgtcaggtaggcgttccttacatcatcgtgttcctgaacaaatgtgacatggttgatgacgaagagctgctggaactggttgaaatggaagtgcgtgagctgctgtctcagtacgatttcccaggcgacgacacgccaatcatccgtggttctgctctgaaagcgctggaaggcgatgcagagtgggaagcgaaagttgttgaactggctgaagcactggatacttacatcccagaaccagagcgtgacattgacaagccattcctgctgccaatcgaagacgtattctccatctccggccgtggtactgttgtaacgggtcgtgttgagcgtggtatcgttaaagttggtgatgaagttgaaatcgttggtatcaaagaaactacgaaaacaacttgtactggcgttgaaatgttccgcaaactgctggatgaaggccgtgcaggtgagaacgttggtgttctgctgcgtggtactaagcgtgatgacgttgagcgtggtcaggttctggcgaaaccaggttctatccacccacacactcagttcgaatctgaagtgtacatcctgagcaaagatgaaggtggccgtcatactccattcttcaaaggttaccgtccacagttctacttccgtacaactgacgtaaccggtactatcgaactgccagaaggcgttgagatggtaatgccaggtgacaacatcaacatggtagttaatctgattgctccaatcgcaatggacgaaggtctgcgtttcgcaatccgtgagggcggccgtactgtaggtgctggtgttgttgctaaagttattgcttaatctttgattagcaaaaaaattctaaaaaaagaggagctttcgctcctctttttttgtgccatcgaaaaaatagtagctttattttgcactgaaacaaagcataaacagcaattgaaatgagagtgattaacatttacaatttggcaatatactttattttatagctataactgctgttgaacctaattaagttcgttaaccagtacacaactagttataacattacaatagttagaagagtgttccatgtatatctgtctctgcaacgcaataagtgataaagccatacgtaatgctgtcagacagcagaatgttcgttctatcagagagctgaaaaactttgtgcctgtggggagtgattgtggaaaatgtgtacgtcaggcccgcgaaataatcaatgaagaaatctccttgcttcctcctataattaatgttgcttaaaataagcacaattgtcttgcaattactctgtttaattagtactacactgtaagtactggaagcggaggaattgattatgaaaggtgataaaaaaataattgcccatcttaataaacttcttggtaacgaacttgtcgccataaaccagtattttttacatgcccgtatgtttaaaaactggggattagtgcgcctgaatgatgttgaataccgtgaatctattgaagaaatgaaacatgcagatagatatattgagcgtattttatttctggaaggtatccctaatttacaggatttaggcaaactcaatatcggtgaggatgtcgaagagatgttgcaatccgatctaacgttggaattacgtggtgctcaggatatgagagaagcaattgcatatgctgattcaatccacgactatgtgagccgggacttaatgattgaaattcttgcagatgaagaaaatcatatagactggctggaaacacaactcgatctgattaaacgaatgggtatgcaaaactatatccaggcccatattatcgaagaagaatagaattacgctaacgccctgtaaatacatatagggcgttcatttctgactatttttaccttcctttattatttatctgaataaatttcatccttgtcttgcattgtgaagtgattcacgtataatgcgcgggctaacctacttcgtaggctgatttttatcagtgtgagcggtaattaccgccatattaaaatactcccgatatgggggttatatattgaacgattacactcccccatcaatcgaaatgggtgcgaggagtaattatttacgtttataaaatagttggagctctggtctcatgcagaaccaaagaatccgtatccgcctgaaagcatttgatcatcgtttgatcgatcaatcaactgcggaaatcgtagagaccgctaagcgcactggtgcgcaggttcgtggtccgatcccgctgccgactcgtaaagagcgttttaccgttctgatttctccgcacgttaataaagatgcgcgtgatcagtacgaaattcgcactcacaaacgtctggttgacatcgttgagccaaccgagaaaaccgttgatgctctgatgcgtctggatctggctgccggtgtagacgtgcagatcagcctgggttaatcaggtcattgagcgattgagaggttgaaacaatgattggtttagtcggtaaaaaagtgggcatgactcgcatcttcactgaagaaggcgtttcaatccctgtaactgttatcgaaatcgaaaataaccgtgtaactcaagttaaaaacgaagagactgacggttatcgtgcaattcaggtaacgactggtagcaaaaaagcaagccgcgttaacaaacctgaagcaggtcatttcgctaaagctggcgttgaagctggccgtatcctgcgtgaattccgtctgtctgaagacgatgcagaattcactgtaggtcaaagcattagtgttgaaattttcgctgacgttaaaaaagtcgacgttactggtacatctaaaggtaaaggtttcgcgggtactgttaaacgctggaacttccgtactcaggatgctacgcacggtaactccctgtctcaccgtgttccgggttctatcggtcagaaccagactccgggcaaggtgttcaaaggtaagaaaatggcaggccaactgggtaatgagcgtgtaaccgttcagagcctagatgtagtacgtgttgacgcagagcgcaacctgctgctggtcaaaggtgctgtacctggtgcaaccaacagcaacctgatcgtaaaaccggctgtcaaggcgtaacgtcgaggagataggaatggaattggtattgaaagacgcgcaaagcgcgctgactgtttccgaaactaccttcgggcgtgatttcaatgaagcgcttgtgcatcaagtagttgttgcgtatgcagctggtgctcgtcaaggtactcgtgctcagaaaactcgtgctgaagtttctggttcaggtaaaaaaccatggcgtcaaaaaggcactggccgtgcgcgttctggttcaattaagagcccaatttggcgctctggtggtgtaactttcgcagcgaagccacaggaccacagtcaaaaagttaataaaaagatgtaccgcggtgccctgaaaagcatcctgtctgaactggtacgtcaagatcgtctgatcgttgtcgagaagttctctgttgaagcacctaaaactaagttgctggcacagaaactgaaagagatggctctggaagacgtgctgatcatcactggtgaagttgatgagaacctgttcttagcagctcgcaacctgtacaaagttgacgtccgtgatgctgcgggtatcgacccagtaagcctgatcgccttcgacaaagtggttatgactgctgaagctgtgaagcaagttgaggagatgctggcatgatccgtgaagaacgtctgctgaaagtactgcgcgcgccgcacgtatctgaaaaagcttctacagcgatggaaaaaactaacaccatcgttctcaaagttgcgaaagacgcgactaaagcagaaatcaaagctgctgtgcagaaactgtttgaagtcgaagttgaggttgtgaacactttgctggttaaaggtaaagttaaacgccacggtcagcgtgttggtcgtcgtagcgactggaaaaaagcttacgtcaccctgaaagaaggccagaacctggacttcgttggcggcgctgagtaagtcggaggagtaaagaacaatggcaattgttaaatgtaaacctacgtctccgggccgtcgccacgttgttaaagtggttaaccctgagctgcataagggcaagccttatgctccgctgttagaaaaaaacagcaaaactggtggtcgtaacaacaatggtcgtattaccactcgtcacattggtggtggccataaacagcactatcgtctgattgacttcaaacgtaacaaagacggtatccctgctgttgttgagcgtctggaatatgatccaaaccgttcagcaaacatcgcgctggttctgtataaagacggcgaacgtcgttacattctggctcctaaaggcctgaaagctggcgatcaaatccagtctggtgcagattctgcaatcaaagctggtaatgctctgccaatgcgcaacatcccggttggttctactgttcacaacatagaaatgaaaccaggtaaaggtggccagctggctcgttcagcaggtgcttatgctcagatcgttgcacgtgatggttcttatgtaaccctgcgtctgcgctctggtgaaatgcgtaaggtactggctgactgccgtgctactttaggtgaagttggtaacgcagaacacatgctacgcgttctgggtaaagctggtgcaagccgctggcgtggtatccgtcctaccgttcgtggtacggcgatgaacccagttgaccatccacacggtggtggtgaaggtcgtaactttggtaaacaccctgtaactccatggggcatccagaccaaaggtaagaagacccgtagtaacaaacgtactgatcaatacatcgtacgtcgccgttctaaaaaataattagaggataaaccatgccacgttctctcaagaaaggtccatttattgacctgcacttgctgaagaaggtagagaaagcggtggaaagcggagacaaaaagcctattaagacttggtcccgtcgttcaacgatctttcctaacatgatcggtttgaccatcgctgtccataatggtcgtcagcatgttccagtttttgtttccgacgaaatggttggtcacaaactgggtgaattcgcgccgacccgtacttatcgcggccatgcggccgataaaaaggctaagaagcgctaaggtaggaggaagagatggaaactatcgctaaacatcgccacgctcgttcttctgctcagaaggttcgccttgtggcagacctgatccgcggtaagaaagtgtcgcaagctctggaaactctgacctataccaacaagaaagctgctggtttagtgaagaaagtacttgagtctgctattgctaacgcagaacacaacgatggcgctgacatcgatgatctgaaagttgcgaaaattttcgtagacgaaggtccaaccatgaagcgcattatgcctcgtgccaaaggccgtgcagatcgtatcctgaagcgcaccagccacattactgtggttgtgtccgatcgctgagactctggagactagcaatgggtcagaaagtacatcctaatggtattcgtctgggtattgtcaaaccttggaactctacctggtatgcgaataccaaagaattcgctgacaacctagacagcgactttaaagttcgccagtacttgaataaagaactggttaaagcatctatttcacgtatcgttatcgaacgtcctgcgaaaagcatccgtgtgactattcacactgctcgtccaggcatcgtaatcggtaagaaaggtgaagacgtagaaaaactgcgcaaagctgtagcggacatcgctggcgttcctgcgcagattaatattgccgaagtgcgtaaacctgaactggacgcaaaactggttgctgacagcatcagctcacagttggaacgtcgtgttatgttccgccgtgctatgaaacgtgctgtacagaacgcaatgcgtctgggcgctaaaggcatcaaagtggaagtaagcggccgtctgggcggtgctgaaatcgcgcgtactgaatggtatcgtgaaggtcgtgtacctctgcacactctgcgtgcagatatcgactataacacttcagaagcgcacaccacttatggtgtaatcggcgttaaggtatggatcttcaaaggtgagatcctgggtggtatggctgctgttgaacaggtggaaaaaccggctgctcaacctaaaaagcagcagcgtaaaggccgcaagtaaggagagtcgctgatgttacaaccaaagcgtacgaaattccgtaaagtgcataaaggccgtaaccgcggtctggctgccggtgcggatgttagcttcggcactttcggtctgaaagctgtgggccgtggtcgtttgactgctcgtcaaatcgaagcggcacgtcgtgctatgacccgtgcaattaagcgtcaaggtaaaatctggatccgtgtgttcccagacaaaccaatcaccgagaagccactcgaagtgcgtatgggtaaaggtaaaggtaacgtagagtattgggttgccttgatccagcctggtaaagtcctgtatgagatggacggtgtgtctgaagagctggcccgtgaagcgttcaagctggcggcagcgaaactgcctatcaaaaccacctttgtaactaagacggtgatgtaatgaaagcacaagagctgcgcgaaaaaagcgttgaagagctgaacactgagctgctgaacctgttacgtgaacagtttaatctgcgtatgcaggcggcaagcggccagctgcaacagtctcatctgttgaaacaagtgcgtcgtaatattgcacgcgttaagactttactgactgagaaggcgggtgcgtaatgaccgataaaatccgtactctgcaaggtcgtgttgttagcgacaaaatggaaaaatccattgttgttgctattgaacgtaaggtgaaacacccactgtatggtaaattcatcaagcgtacgactaagttgcacgtacatgacgagaacaatgaatgtggaattggtgatgtagtggaaacccgcgaaacccgtccactgtctaagactaaat

SEQ ID NO: 1764 - DNA, 7860 bp, Xenorhabdus sp.; identical to SEQ ID NO: 1763
  CDS (7456)..(7647)

SEQ ID NO: 1765 - DNA, 7860 bp, Xenorhabdus sp.; identical to SEQ ID NO: 1763
  CDS (7046)..(7456)

SEQ ID NO: 1766 - DNA, 7860 bp, Xenorhabdus sp.; identical to SEQ ID NO: 1763
  CDS (6332)..(7033)

SEQ ID NO: 1767 - DNA, 7860 bp, Xenorhabdus sp.; identical to SEQ ID NO: 1763
  CDS (5982)..(6314)

SEQ ID NO: 1768 - DNA, 7860 bp, Xenorhabdus sp.; identical to SEQ ID NO: 1763
  CDS (5689)..(5967)

SEQ ID NO: 1769 - DNA, 7860 bp, Xenorhabdus sp.; identical to SEQ ID NO: 1763
  CDS (4850)..(5674)

SEQ ID NO: 1770 - DNA, 7860 bp, Xenorhabdus sp.; identical to SEQ ID NO: 1763
  CDS (4528)..(4830)

SEQ ID NO: 1771 - DNA, 7860 bp, Xenorhabdus sp.; identical to SEQ ID NO: 1763
  CDS (3926)..(4531)

SEQ ID NO: 1772 - DNA, 7860 bp, Xenorhabdus sp.; identical to SEQ ID NO: 1763
  CDS (3277)..(3909)

SEQ ID NO: 1773 - DNA, 7860 bp, Xenorhabdus sp.; identical to SEQ ID NO: 1763
  CDS (2918)..(3244)

SEQ ID NO: 1774 - DNA, 7860 bp, Xenorhabdus sp.; identical to SEQ ID NO: 1763
  CDS (2158)..(2634)

SEQ ID NO: 1775 - DNA, 7860 bp, Xenorhabdus sp.; identical to SEQ ID NO: 1763
  CDS (456)..(1640)

SEQ ID NO: 1776 - DNA, 10128 bp, Xenorhabdus sp.
  CDS (6641)..(9829)
atgtcgccatgtcatgcaaagtcaagcggcattgcctgaagagcttcagcaacagtggccttcaatacagagtgtgattgaagtggtcagtgaacgcagcacgaaaggtcagcctgcccaccgcgactcacgctggtatgtcagctctctcccgttagatgcagaaaccgcagctaaggcaataagaagacattgggcggtggaaaatgagctgcattgggtattagatgtggcctttcgggaagataacatctcactcaaagaccctgatggggctgcgcaaatggcgctttttaaccgaattgcgttaaatgtgattaaacagaataccagtataaaggatagtcaagcggctaaacgccgaagagccacatggtctggggaattccgcagtcagcttatctttgattaaattaaagacaaagtggaatcccgccctgctaggaggagttagattgatggatacagaaatatcatttttaatataattatgtactgagaaatggtttgcttctttaatatggcaaatgatccccatacatgtattgctttcgctcattaatgggtatttttcacaaaagtatggtattaatttttttgtattattctgaaaataagacccgacggatgatatccgttgcatagattgcaaaactttcttgtcatgatcttcaaataattgaacaaggccactaaagggggtaattaacgctttctctgtatagccggtgatgtcaaaactttcagatagtttgtttaattccaaaaatgctttgtttgcatatataaaacggagttccttatcttttacgaaccatggctcatgacttttatcccacatatttgttaactgaggggtgatttgactcatatataaccttcaataatagttgggagaatatactaaaatatattagtaattagtaagtcagagtttatggttataggagagtaaccaatttattttatagagaatgtgagggcagattgctgttcatgtaattggtttcatggagtgctaaaatgtgatctgtgtaacattttttctcggtgtttgtcaggtaaatgaattcagagtgccaaatgattatcttttttggaaaaatcaacggatttctttcaaattaattgttttaagattaaatatattttttattgaataagtgattttttataaataacttgtttgtcgaggtgaggttattctctaaaatttagttttacatgggtgattaattttattgaattattttattgaaggaatatagggaggaaataggtaatgctctttgagtaagtaataagataaaagataattttatgtgacttacatctcatttttcaaatgcctttaattatcaataaaaaaacagactattttttcttctgatatattcctactacagtttattattcgaggcatgtttctcttttaataaataatgatagggcgctttattttatcttgaaaagattatttcaataaactgaaacattaaattgtccttatctaaaattaacaagctaatcatcttgcaggatgaatggctatgttttttactgcactttttattttacctaagccaaaaatggtaatgctcataatgtgcagctttaaggcaaaaggagttagtggtgaatccgtttgaatattattatcagtgggaacttgattacctaaggcaacttgcaaaaaccgcacgtgaagaaaaatcgcatcttggtgatgtgctcagtggcagagaccctgatgcagaaagagttaatgaaggttttgctgctttaatggctcgtttgagtcagaaagtcaatgatgcctttcctgaactgacgcagccgctactacaaaaattacaggcacaaccgataaaaggtattcctgcaaccagtattgtgcaatttgagagtggatcacagggtgatttttctttttccataccagcaggaactgaagtttatactcatcaccaacagccatttgtaatgtgccgtgaatgttctatcgagcctttggaattattgtcccgtgaaatgactcatcaggtacagacaactaaaatcaccttaaaatttcgttataacggccgggaagaagaatggttgacccaaccgattaacctgttcctgagtagtgatgagcaggtggctgatgctttgatgctggggctgacacaatattatgatggagctgaattacatcacaatgggcaggtttatcaagctcacggcgatcggtttgaaccacgctcaggagcttctcgattggctctgtcatctgcggtaggggataactgggcaccacagctactggttgaatcactttatctgccacatattaaccaattcctgagtttgcctctgccaacaatggtaaaacgactaaaactggctgaacagcgtgaattcagtgttgttttatcgttgaatacagcactgccactatcagccgctcaggttgaatctgcatttttactgaattgcgttcctgtcattaatatggcacgtaacagtcaggtcactctcccttttagacctgaaaccgctcgttatcgtttacctctaataccgaatcagggagttttgcatattacaggtattgaactgaaaaacgagccgaatacagaagaagaaaagcgcggtgatgaatatctgttttatccggtcagcctgcttactggcatggagcgttatcatcctgaatataatagagcctggttctattcacttgaagtcattaaagatgcattaggcagaatacagtacgaactgattttttatgacagcaaagcggagctgatgcgtagacctcctgagcgtgaatttatctgccatttttatggtattgaacaatatcaggaacctcttgcgataggtgaaatctgtcagtctggtgaaaatatccccgaagtttttcaattaaaaaatatcacaccgacttcacaaacttatcctccggttgttgatagccatcgtcactgggatttgttgtcacattattctgttggcagccatttattggagacggttgcatcggtcaaacaattattactggattttgatttatacacagataccaatcgctcatccagccggaatatccagcgcatgatcggagggattgccaatatagaagcaaaatggggagataggataatccgagacaggtccgttcgttgcctgctggtcactctgatgctggatgaaactgcttatattgatatcggtgaaatgtatcgatttgccaattcactctaccaatttttcccattctgtcttgctcagggaacgtggctgcggatgcgagtgctcagccagctttcagggacagagtggtatctgtcaccttcaatgattcagggttatcgctcaattatgtaaggagttttcacaatggatggattagtttttacatgtcagataggttcactgccactcactacatttcaggttgtagatttcagcttacaagaagggttgtcacaactctttcacttatcgatgacagtagtcagttcttttgacaatgttggactcagtgaacaattaggtgccagcgccgctttgacagttattcgggatggtgcgattgagcgaacgatcaatggcgttgtggcaggagcagaacagggaaataccgacggacggcgtacctattatactttcattatccgaccggaaatgtggctaatgaccctcaatcaggatagccggattttccatcatcaatccgtgccggatattctcagccagttgctgaaagagcaccgcattaaagcagacagaaaattctacaaagatcaccaacagcattcgatacgtgaatataccacccagaaacgagagtctgcctatgaattctggtgccggctggcggcggaagaaggcatcatgttttggtttgaggaagataaactattttacagtaactcccaccttggcatgctggcagcgctgactctgacctacaacgtgcaggcaaacacggataacagtgattcgactgcatggcagtggaattatggcgaatatctgtgcccggatgaaacgatccataaagataataacttcctccggccttcctatcctctacaacatatggcagcgttggacaatggtggcaaccactctgtctttgaaagttatggtcgttttcaaatagatgcagaaggtcgcccttttactcaattgcgtctggagcagttacagaaccagagcacagtcggtaaagcgagtactaactgtataaaactaagacccggtcggatctttgttttgcaatcccatccgattatggcgatgaatgatcgctggcaagttattactgtcacacatcatggtcatcaaccacaggcttctggtgatgcaggagaaggaacaaccttaaccaataatgtcacatttattcccggaagacaggactggcgtccaccattccgccataaaccgctggcagacggggatgaagtggcaacagtcgtgggtccggaaggtgaagaaatctatgttgataaacatggtgcgattaaagtccatttccattggaaccgttatgatgaagcagatgatcgagcttcatgctgggtacgtgtagcacagggctggaacggtaatggctacggttttatggcaattccgcgcatcggccaggaagttattatttcctaccttaatggtgatattgatcgcccgatagtcactggatgtacctacaacggacgtaatcggccgccattggatctgccggcagaaaagacacgtacgacatttaaaacgcatactcacaaaggggagggatttaatgaactgcgctttgaagatgccaaaggtagtgaagagatctatatccacgcccagaaagatcagcttatccagataaatcacgataaaacccaacgtgtgggtcatgatgaaagtcacaatgtactgaataaccgtaagcatgaagtcggcaacgatgaatttattcggatcatgcatgaacagcatgttcagattgacctgaatcagtttgaaaccatcactaaggatcgcaaaacccgtattaataatagctgggaggagaagatatttgctgatcacctgcaagaaatcggtagggataaaacggctaaggtcaataacaattatacgctgaatgtggttaataacattcagactctgaccaagatgcactcgttgcaggccagtgaatccgtactcattaagggcaaagcgggttcgattctgctgaatgggcaaggagtcacaattaccggaaaaatcaccttacaggggaatgtttccgtaatggcaggcagtccgggttcggttccatctttagatggatcagccaacgaaggtttggcaatggcagaggattgtcgggaaaaagccaaaaagctcaaggagtcatctgaataatgtcttggttacccgattgttctgagcattggatagtggattactcattcaccaacaaagagaggaatttgttctctgcacaggcgattattcacgctaaaagtgaacgccaggcgctttctgagctggtggagtatttgctgaatgcaaggcattcccccggtcaataccacaccattcagccattgctggattatctcaccaccagttcccggcaagagttgccattgttgcgacgtttccggcaagggcaagggcagggtgaacgtgtgatgtcgttgaatgaacgtaataatagcttacctctgcctgctgagcgtggtgtattgcaatttgttgttacagacagcatgccggaaaaacctgagacgaaatatcgttatgctgtgttggatgctgctgtttatcgtcaggtcatgggcagttttttaagcgctgacctgatggtttctaacctgcgctgggaaagcttgtttcagggggaaacccaggtcactttggaagatagtgctccttatttggtggaattaacggagagtggtgatgcgtattcccgcttccggcaaataattactcaaccaatggcatcagcgttgggtatttttatcgaaagtgaccagccttttagtgcgttacgtaatcacttgcgtaaattcacctatctgaaaaacgaacaacagcaaatatggatgttctatcgcttttatgttcctttgggattgattccactgctgaaaagcttaccggatgagcagttgatgcattttatgcacccgattcagcaagttgggtatttcgattctcagactaagcaatattactccttgtctttggctgaaaatgcactggataaggataaaaccgcgcccgtcaccatcaacgctgctttaatcagtagccttgcggaacaaacacaacaacgtgcgctcgcacaaattgtcaaattcattgaagagacacaacccgaacttacatcacagcaaaaagcacaactccccacgtttgtgctgcaacaaagcaatctggtttgtctggctggatttgctcatcaacgctcggtgctttacttggtggcagccagaagtttggttcgtgatgatgaagaactgtggttacgggcatgggagcatgcgtgtgcagaatctcaggcgcaagaagtaagggcgctgagttgttatgagtactgttttaacaatagttttaagaatcggattgcaaaataacataggaaaaaagagaaatggaaagtgttgattctatctttacgaaaactggcgaagctgttgagacagcttctgaaaaagcaaaacaggtctttgaaaaaatagttgatgaggcgcaggcgcgtatgccacatcagctggacatggatactgttgtcagaccgtgtgatgctaatatcaggccggtttaccctgtcagatatgcttatatgaatttttttggtgacaaattgttaagtgctcaattaccgccgccaataagtgcttttattgatccttatgatgattcattaagtgcaagcgttttgaggggatatagcatccgaatgccaagagctggctggatttatgtcaaagaggaagggccgattaaaaccagaggatctcaacgggatggaaaattattaattttcaaattcagccctgaaattgtcaccctagaaggcaaaagagggatggtcaccaaatataccaagtatgagcaaaaagctgggagttctgcgtgggaagaaattcatccagccagtggtacagcaggtttaggctatccttttctggcaatggataaagatgtgtccaaaatcagtatcgtttacagagaagtcaagttggctaaatctattctgaagaagatggataatgacaaagcgtttcgaaggaatgggatgcaatttgtagatttagatagtgaacaatcagattatgccattgatgccaaacaagagcctttcgacggattagtggaggatttcaaagatcccgaaaggcaatttcagacatacaaaaaacaattatctgatccagctttgcaatctgctgatttaggagatatctcgattgatggtagttttttcatgaattcagatatggaaatgcgttatatagacagccttatctgccctcattacaaggacaaagcgaagattgtggtattgaatgatcctgtggggtatcagcgtgatattttgatggcgtatatgctactttcagcgtggcaaataaattatgcagcgacctatatacatcctatctctatagggcaatttgttgaacaaatggagaagtccaaggatgaaaaaattaaaaaatattttaaggattacattagtcaagagaactggagaacttggtggcctaaattaaatgccccaatttctgaaacaacagcaaaacttaaaaaaatagtcagcctctataaagttttttttgagaaaaattatctttcagatcaaaaagggggattagcacattattttaattattttttctctgtaactaaaaaaaaggatgttattactgaaagcgatgccagagaattcagcgtgttttgctctttattttctgaattaatcggtccgttatcttattctgaaatagggataagacagatagaacaactattaggaggagcacaggcatctgaatcaggcagtacatgggctgttatcggtaatggtattgttaatacattgggtcatgctggtgctgataaaacactagtcgctaaaaatctcatattgggagtagatatattattcgaggctattggtccagtttttgggaagttttatgtattccttgcagaaaaaacacataaaaaagcactagacttgcatgttaaaagtatagaaaaaataacacagattttgatacctaagtgtctggcaattttgggaatacgtatagagaaaggtcaatatgccgcattgacagaaaaagatttttataagtttctgaaacagatagaacccaaagaacaatcaggattttttaaaaagtctgcgagtaaatttaaacattattttcagaaagaaggactagagaaagtgtttgattgggataagcgtattaataattatacaggtcgtcagaaaataaaaattcctgttattcattatgaacagcctaagttcaatgcaggaataaaattctttcagcataataaccaatatattagtcatttattggatagtggtttagtgggattggatttgtttatgaaggcttatacgctaaatacgttattagctcagtcgcgtttcgataaaaattcgccttttggtacaaacaggctccctatgtattttgctggtacattcatgaacaccatattaggtgggtttcttgctgtaaggggagcttctaatcttattagtaggggaataattagtactggaacattaatgccaaaattgggtagtccggctataagggcattaattggcaaagcatcaagtaagatgctactgaacagcgcaaacatggtcgcttttacacggttaggtatcggtatttctggggtaggtagtgcgattctgtcttatactgatgctgtcaattcttttgaattaggtaataggggggaaggatattcccatatctcgattggttcaggtaccttgttgatgacgctcgcatatgggtatgcggcggcaactactacatctaccacaacaggagctgtagctggagtagttgcggtggacgcagctgcagttacattgactggggctgctttagtatttttttgggcaggagtctttattgctattctaggaactctatatcttcttatatttagtaaggatgagtttgaaaacttattacagaactgtttttggggaaatggggaaaaatatgctttttggagtagagataatccacgcccccctaaaattgaagtacaattcgagagaataatagaaatgagtgatgcaatcagaaatgcgtctaaagtggaatatcaggagtttgctaatctttttatgacaccaacgttaaaaaaagagtttaaagataaaaaagcgatatatagtttcacattacccaattttcaatggggaaaatcggagattttttatcaggtgataccttcttccctttctgcgctttcggctggctcaccatttgtgcctattgcacctaatgttattacgtcagacattagtacacggcaatcagctaaaaataattttgaagagttaatgaaagcagaatataaaacattaactgatggaggtgctttaacaactttgacaatagaaatggactcacttgaagcctcacacagtaaaatattttggtattatatgccaaccaaagatgttatcgctcctcttcgttatgaatggggtaaggaaccgataatagaaaatgccatttatggctatgatgatgaagtactacgtagcaaaattggtatataaaaaggattatcttatgaatagaaaatattctatcagaaataatattattgaaactgaaaaattttcagagttatgtcctgactctgtaaaagaaaaattagagaaaataaataataaaaaggcaagaaaaatagcatgcctagagagtattaacgataaagaatgttgtctaataaatagtttgaatttaatgcggcgtttttttatttatttgttttttattggttcattaattggcatggggacattttttcatcattatttaaaagtatggagcgcgagtaagaagctttagagca

SEQ ID NO: 1777 - DNA, 10128 bp, Xenorhabdus sp.; identical to SEQ ID NO: 1776
  CDS (5436)..(6623)

SEQ ID NO: 1778 - DNA, 10128 bp, Xenorhabdus sp.; identical to SEQ ID NO: 1776
  CDS (3397)..(5400)

SEQ ID NO: 1779 - DNA, 10128 bp, Xenorhabdus sp.; identical to SEQ ID NO: 1776
  CDS (1633)..(3378)

SEQ ID NO: 1780 - DNA, 10128 bp, Xenorhabdus sp.; identical to SEQ ID NO: 1776
  CDS (2)..(412)

SEQ ID NO: 1781 - DNA, 13890 bp, Xenorhabdus sp.; identical to SEQ ID NO: 392
  CDS (13791)..(13889)

SEQ ID NO: 1782 - DNA, 13890 bp, Xenorhabdus sp.
  CDS (10384)..(13374)
gtgctctaaagtctatttgtaactcaccaaattcttgaatcgatttccagccagaagcgccacataacacagcagaaaaggccaaaaaaatgacatccatcaattcatgttttttattgatgtcagaacgtgggtcatctatttttctgataaaattaaaaatattcattattaagcacactgtttatggaatagcgtgatcttaacgttttaaggagagaaatgcttataaaagtccgtatattgacttttatttgacctaaataaccttatgaaaaatgtgagatctcgccctgctcctcctagtgaggttctgacagaaaaagaatggttaataatttttttattctgccgaggagtcaataacaaaaatatggctaacgaactaaaaatatcaggaagaacattagagcgatattttaaaattatctatgaaaaactatcgattaactcaatgatggagttgaaaacactttgtgaaagagatcactatgatttatatattcctccccaatatatcaaatccataagtcatactcttctatattaaaacctgttattcagttggatataaatccctcaaaggcatttatgatcatatgaataaattggtatatgattcggcttcatatttacattacagaactactggggaaaaacatggcaactatgaaagatgtagcacatcaggcaggagtatctgtagcaactgtcagccgggttattaacaatacaacttatgttgagccgggtactcgtgaacgtgtagaaaaagcaatgcgtgcattagattatcgtcgaaatttagctgctctggcgttaacaaaaaggtgtggaaatatgttgggcttactaactggtaattgggctgacccatttttttcccttttagctcgtggtgtcgaaaaggttgcccgccaaaatgaaactaagctgatggtctgtaatggcagacatcaagcggaactcgaaaaagcagccctagattttttaattaaccagggatgtgaagccatagtcgcgtatgtcagcagaatgagtgaggcagatatattacgctatgtcgcccatactccaggattagtcattataaatcgctatgttccggctatcgctaaccgctgtgtttggttagataatataagtgcttctcagattgccaccaattacctgattgaaaatggtcatcgaaaaattgcttatataacagctgatctgcctattgatgatcgaaaactccgactggaaggatattataacgcaatggctcaagctggcattacaatagataatgattggattattagtgctccatttaacgaaaaaggaggagagcaagcagcggaaaagcttttaaattgtcgtaccaattttactgccgttctaacatttaatgacgtaatggcagcaggaatgatgagatttttacatcggagaaaaattaatttacctgaacagctatcaattgttggatttgataatattgtcacagcccaatatctctatcctcctttaactacaatacataacccaattgaaaaaatggctcaacgggccgccaatatggcattacatctcagtgctaaaaaagaactaccaccacaaatgaatatgttttcaggagaactgatcatcagagaatcagtctctttgatagagtaatttttgttgtaataccctgccgcaaattgggatatttataatggataacaagaaaaaactgagtttgggactggttatattgcccattgtagccatgctcctgctgctaattattggttatggtcaattaagcctccgaatagagtctttattactagtatcagcagtcattgctgcattactggctttttggcaaggctatcgttgggatgacattattaatgctatcgtggaaaaattagtcaaagcaatgccagtaattatgatactgatttgcgttggtggattaattggtacctggatgctgagcggaacgatcccttatatggtttattggggattaaagctaatcagtccagaatatatccttattgctacattttttattacaagtgttatttctgtttgtaccggaacatcatggggctccgccggaacagtaggcgttgctttaatgggaatagcagccagtctcgatgtttcattagcggctaccgcaggtgcggtggtttcaggagcatatttcggtgataaaatttcaccgctatctgattcaacaaattttgcagctattgttgccgatactgatctttacagccatattcaacatttactgtacaccactattccgggtttccttttagctaccatcgtttactttatcgctggtcatacaaacttgacagacagctcagcaactcctgaaaaaataacagcaattactcaatctcttgaaagtctctatcacttcaacctattgctaattttgcccccagcactagttgcatggggagccataacaaagcgtccggtgataccaatcatgcttgccgcttctgttctagctatcgtgctcggtgtagggcttcagggatttacaatcaagcagggcctcaattcattaattgatggtttcaatctctccatgttccctgaacaagaaagtcatcttatcggaaatgtgaatgatatccctctcctgcttaatcgcggtggcatgtcttccatgatggggactatattacttattttttgtgcattcgcatttgccggatcactaacacttactggtgctctgaccatcatcattaactggcttctacaaaccgttcatactacagggcagctcatcgctgcaaccttagctacgactattgtggtaacagctacaacttgtgacggcaaactggctctgcttattccggcagagctgttcaaaggggcttatcaacagatagggctggataataaaaatctgtcccgaacaatagaagatggttgtactgtcatcgaaccactgtttccctggacttctgccggtatttatatggcgacaacattaggcgtcagtactcttgatttactaccgtgggcaattcagtgctataccgctgtatttttagtactcatctatggttttactggtttcagtattgcaaaagtcgcaccgaaaaattcattgaagaataatgaagcccaacgtgacagcatctgacactacaaacatacctgaaactttccgtgaaaagtttcaggtaatagattcatcttaattacttttatattattactcaacaaccaccgactaaagtcggtgggttagtgattaacggactgaaagtccggatacgcatcggctaaacgatgcgtcaattatccagcctgaagtgatcattcgggttcggttcaaaatgatgcgccagataggcctttatcatctcttccgttaactgacctaccgtcgcacaaaaatagcctctgccccaaaaatgctgaccccagtaacgctttttcaagtgagcaaactcttcaaacaacttacttgctgtccttccctttattcgcctcatgatttctgagggcgctaagctcggaggacaactcaccagtatatgtacatggtctttgctcacgaccccttctactatcctgatttcgaacgcttcacaggtctgacgaactaactctctcacccgtaaaccaacttcacctgttagcactttgcgcctgtattttgttacccacacaaaatgatactcaatctgaaataccgtgtggctgccatatctgtaatccatattgcacctctcgtgcaacacagtatcgcagctaaagctgaccgactaaagtcggtggttttaaccttttatatggaaaaataaaaaggaatgttaattatgaatacggaaattggttgtggtttttgtcagcgtaataaagggttgccagtatttttagccaggcctgctattatggataaaacagatacattccctatattgactagtaatgtcaaaatgcctgttgaacctcaaggtgaaaccgcttatacagcccgtattttacgagaaggttttttatatgtttattatgaaaaatttaatctatgggaggtctacacggttacttctaaaggtcattattatttacatccaggagctggtggggctccgcaatgtttaagttccgagaaaaaaacagtatgcatggatgatgaaagtaaagtggctagagcatcttttattacgttatatattatgcctgaagggcaagagaacggtgtagtttggtttgcatggtcagatgctccttggtcagagaaaatgaaaaaaaaacatgaagatcaagctcagcgaatcaaaaatatgcagccgtttgatgttgatttatggttaagtagtagtaaacatgaaaatgttgaatctttaaataatttacagaatacagttgctgaatatagtacaagttcgaaaaaaattgtaaaaggattggtatcaacgataacagatgtgtctcacataacattaatgccttttactgtacctattcaaaaattaatatgggaaaaatttcaaagtaaaggttaaaaaagaagctgataatgtaattaatgaggctaatcagctttatcctgaaaaaggagcagttttatttttatctgaccccgtggctatattagtaagcatcacaaatctttataattatagagctaaacatacatttcatagtaaccctaaatattctagaggactagcattatcctcaatgctatcatcattaaaacaatccgtatgttctcagtatagagtagtatgtgaagaacaagatattcaagatgaagatgcaattatttgggctgcgggatctagagcaggtggagttaaaatagaaggatatgactcttgggaatctaaaaagaaaaaaagaaaggagaacataaaatctttggatgaaagagtagagggttattggaatgaaaaatattaaaaatatatagacagagaaaaggaagatgcatttttaatggaatataaaaagaagctttcttcatattttgaatcggttctttctcctatgcttactatgtatttaaattggttggatagtgacgtattaagaaaaaggtttttatataattacgattcaaataatgctgtttgttctttgctatacgtgcaagcagtaaatgattgtatagagggtatgaccgagaagaatgaagttatggactatcttgttgataaattaaagcaggaaaatgtctcaaaagataatttcttttttcgtgcaatatttaaaaatgatgactcgttaattgaaagtataaatgtgtcattaagttatgggctaaattatggtggcttaccgtggaataaaatatttgattctattactgatagtataagccaatacttagagttggtggataaagtggatgtttatataagaaatatatttggagttatatttaaagcggcaaaaataggagtgaataaatatccaatgccattaatgattggtgtttcaattaatagaggaaaggcagttgtggaggtttcttgcacagggcaatataagaactttattaaagcagtagcaaaagagtgtgcaatactttttgatatggataacaggattgggcgtgaccgtttatatgaaagattatatagacaaatgggagggttagagttaaataatgcacagataaaccaaaatgggaaggtttattactatttaatgatagatagagaggaagcggataaactgagattaatgccagaatcagaaagaatgaaaaaattaaacagggtatttagatcatatgaagagtttaggaaggatatattggatggacattataaaccaaaaatagataccactgaagcgaagtacagtgacaaggctaagagatttcagaattacacaaaaagtgaaccggttttaggtagattaaaagataaacaatattttgggagtgcatcatcacttatttttcaaagttatgctatattggcatcgtgggaagcagcaacaaaaaatgtcgaaaatttaactaaatttggtggtaatgttttgggagctataggaacattagcagattggacagatcgctatttagctaagaattcaaatgataggtttgcggccaagttaggattggataataaggtaaaattagaaaaatggtcaattcgtttgcaacgtggcgcaagattttttgcttgggctggtttcgtaagtgctacttgggatatttatcatgctgctgatgagtattggggtgagagagagaaaaaggattataaattagtaatagcatatggtgcttcaggagtctctagtggtttacttgtgttatatgctgttggatggttaacattaggtggtcctatcgctatagttgttttgacggcaatacttgttgcttctgcaatttatattgcattgaagggacaagatgatatagaaaaatggttattatcatgcatgtggagaaggattcctaaaggaacgagaagtattcctcatatgtggtcaacagaggcacaagaaaaagaagcctttttagatttaagctaaataatggaaagttaggagctacattatgtcaatttacaaggggttatttaccccttatttacttaatcgcaagctgactgaacaagaaaaaagagatcaactttaccaaggccagccacatcctgacaacccattgattagtaatgatgatacagtgattaaaatgaattcaacgtatctggaaactgtggacagatattatacatttaaaggattccctagccttatgtcgtttgtgatggctgtgattttttttgtgttcctaattgctttttgtattacttatgttttaagacatgttttaggtgatgaattatcagaatcagacgacatttattttataattccatttattgccttatcaatttttgctgtatatgcattttcaactgttgttttaaaggagtggtttagaaaaacccattatcctattcgatttaatcgaaaaacacaaatggtatatgtttatcaagtgaatggaactgttttagtagcaccttggaataatattttctttacgctttatgaaggaaagggaatagggctgggatggggtattgatggacatattcttgcggatgataacgaaactgtattgcagacattcagtttgggaatttacgatagtaaagttaatattccgggttattgggaatttattcgctgctatatggaagaagatgtactggatgaactgcctaaaactatttttttatgccatccaatttcggaaaaaaaagaaagctatatttatggccttcagtacattcttcgtgttgatactaaatgggattggttctataaattgctacttgttccatactatctgttggaatcattctctcggtatattgcaatgcaaaccagtaaaatacctcagtggccagaagaggttgaggaaaagtgtgaggttgcagttgatgatccagttaatgtgagctataaaaataatattccatatgtatggcgatattttttagctaatttgaaaatgaaggatcatttaaaatatcataaacagcaaataatagcggtaaagcgtataaaaagacgagtaactaagcgacataaaatacaaaatacataattgtatataggtatgcatttgataatattttaattgtttaatgcatatcctgtttttcatatgagattctttttactagaaaaatatataaatattaacagaattacatatgtattaaagaaataataaaggaaagtatgatggtaaattataaaagtatgttattttaatgttaatgatttttattttttatctatgaaaataaaaatggtgaagaccttttctaaagggagttatataatgtcgaacactatcgtttcaatattatttatgtcatacattctcttcctgatgatttcaatgataagacatagattggtacttatattttatcttttcagtgctgtcatagaaatggtcattgttgtggtttcaattattagagaattatattttttggctgatttatcagtagaagaaactgaaggtgaacgttttctttattgtgtatataggtgtagagaatattttataggtaaaaaattagattgcattattaatgaaattggtaaaccaagcaatcgaaaaaaacatgtcgttatgtggggatctggtagatatgcggtttctgcttggattaataaaagaggaaaatgcatagatatgaaaatcagctatgttcataagccctctggtacataaaagataatcaatatcgttcagtgacgtgaggttgttatttttcctcttgataagatatcctttactttttctataaccttataggtgtgaattctagctttgtattaatgcattatttctacaaataaagcataaaatcgtggttttttgctactaatgaaaaaaataaataagaatataatcgatgtagaaatggaataattttcatatggggctaacatgaaaggcataatcaggattggggataagaccactcacggtggaacggtgcaggaaggatctggtgtaatgaaattttcaggaattggtgttgcccgccttggtgataaagtatcctgtcctattatagggcatggtataactcaaattatagaaggtcacccgactttcaaagataatggtatatctgttgcctttcatggtcataaatgtggatgtggctgcacattaatttcctcattgggtaatgcaacatcgagttgattatggctattgatctcctaaatatccctgataaagcagacaggaaaagaccaccacagctaaaaaaatggttgtatatactttctgtttttattggtggagccagtcttatcactgcattcttttggccagaagggaaatcggttaaatcttttgcttttattttattttcatttatttatcctttttctatctggtcacttatttttcttatcaggagattatatttcgatctcaatcagctttggtcagataactgggatagaaaacgagaaaaacttattgaacacgaaataaaacgtggtcagaagcatctttatcatcttaactctgttattcatattccagatgcatttatgcagggtacattgtctgaacaattggcacgctccattatagaaatgccaaaaatcgtagatgcatccaccgggaaaattattcgtagaaaatcattttggtcaaaagtagaacaaacagaagatttgttatatgaaaagatatgcatattactggctgataatgaactttcttttgccctaggagatcttctcaagaaaactaatattcaggtttgtctggaactggatgcaaatttatcatcttctcaatatcaaaaagtatgggaaaaagtttgtaaaaatagtcagattacacttccagtcagttatcttcatgggcaaggtgtcgaaactctggatcaatggattgattcttattcttctcacgagcctttattgatcatttctgttcatttatctaagagtgatgatgatgggcatggtgatgctgcggttgctctgctagtaacttcatcctcttctaaagtaataagtgaaattgatagcactcgattatgccgtcctgaaaatttaggtcaaaatgaaattaattatgcattgtctcaggcgttattatggggaaaaagttgtggtgaagatattcaatatctttggatatcaggaatgggatgtgacaacaaagcgcggatagctgctgcgccattgggtgaagaatatccccatttaacacagcctgaaaatcaaattgatattgatgggaaaattggctatgcaggtgctgcttcactttggttagcaatagccatcgccttggagtcagtgcaaaaaaatcaaaaaccacaattaataatgagtgcaatatctcaggatttaaataagccctggtttatggtggttaaataattattactctgcatcttggaatctatcaagtcagatgaatgtttttaattttaacaataatgcatatcggagtgaatgattattatgcctgagtctgaatctaaatcaggaaaatcagttatttttctcgcggcggcttacaccttagcaatattactggttatatttattggagtggttatatattatttcagtattaatccagagctgccaataaagaaattattgatttatgctggttccgttttcggtgctttattcctgctttttcccttttttttattggggtggagtaaacatgctgaggtgagttttaccctattatccggtaagtcaaaagtaaaaaaagagaaaaaaacaaaaggatcaccagaactatatctggatttaaaacaaacattaaaactccgctatggctcttcatggaaaaagaaaacccaaatcctgatgattattggttctcctgagcatgttgaacaacttattcccggtttggtggcagaacaatggctggaatctgacggtactttgttaatttggggcggtaatattaccgccaatgttgatgatactatcgatcagtctctgcgtcagttgcgccgtacccgaccactggatgcgttcatttgggttacagatcaataccaacatcaggcctcgcttgaagcatcagttcattcgcgtctcgtttctggccatgcatctgagacattgagccgtcatttaacccagcgctatcagtcattaggttggcgtgtgccagtttatgtctggtctctgcatcaaactagctgggataacgctcatgaacaagtttcagctccgggttgtttcctgtcttcctcctgtacacaggaaagtctgcataccagtctgaatcagcttgtcccgatgataacggagcaggggactcaacagcttatccataattcccgtcatgattttttactaactttggcgaattttttgcgtcaggaaggcagtgaaaaaattagtgcttcattggcagtgtttttcaattcacaccaacaattaccgctggcaggaatagtgtttagcttgtcatttattgcaggtaaacgtgtggatatacaccactggggtagagatagccgttgggactctttattaagctcgtttcagcagttaccgccgaagctgagagcaacaaaactgggctggcaatggcggaaagcgggaaaccgattactgtctgtcctgatggtgatggctggagctggcatgttggtttcctatgccagtaaccgccatttagtgcagcaaggagcggagcagcttgaattggcgaaaaatgatcaggctccgttagctgagcgtattcaggcgtggctggaattacaggatatgttatcgatgctgcaatatcgcgaaatgcacggtactccgtcttatgcccgtttgggattgagccagaatgatacggtgttacaggcactctggccggtttatacgcaatatgttatgccttggctgcgaaattcagtcgctgagcagatggagaaaaatctgaatatgctggtgagtctgccaccaaacagcgccgcccgctcagttgctgcaaaggaagcttatggccctctcaaggcttatctgatgatggggcaaccggaaaatattgatgaaggcatgttccgtgaaactgtgatggagaactgggcagtgccagcgggtatgccggccgcagcctggcaggctaaggtgccagaattactctctttctatgcgaagaacttgtccaacaatccagattggacgatgaaacctgatgaagagttagttcgacaatcacgaacggcattggtacgagagattggtcaccgtaatggcgaatcctcgctatatcagaaattgctgcaacaggtttctacccattatgcggacatgtctctctctgatatgacaggcgatacagattctgagcttcttttcgcggcagatagctttgtaccgggtatgtttacccgcaaggcatgggaggagtcagttgagcctgcgatcgaacggttggtgaatgaacgacggacagaaattgactgggtgttgagtgacggtcagcaaaatgccagtgatgagctttctccggaagtgctcagggtaaaactgacagatcgttactttgctgatttctcaggcgcttggctgaatttcctgaatggtctgcactggagacgttcggatacgttatccgatacgattgatcaattgactttgatggcagatgttcgtcagtcaccgttgattggtttgatgaataccttggcgtatcagggtaaaacggggcgtcaggaagtgtcagattcatttgctcaatctgctaagtcaatttttaataaggataaacagccagcaatcagccaaaaggttggttttaccggccctctggaaccgactttcggcccattgctggaactgattgaacccaaagccggagcacaggatgggcaacatcttagtctgtacagttttctgacacgagtaacccgcgtgcggttgaaactgcaacaggtgacaagttcagcagatccgcaggcgatggctcagactatggcacagacgatatttcagggtaaagcggtcgatttatctgatacccgtgattatggcaacttagtagcagccagtttgggccaggaatggagcggatttggtcagaccgtatttgtgctgccaatggaacagtcgtggcagcaattgttggcgccaactgctgaaagcctgaatgcgcaatggaaacgggcaatagtggatgactggaatctggcttttggcgggcgttatccgttcaaattgggaggaagtgaagtttccctgccgttgctggcgcaatatttacgtgcggatagtggacggattagccgttttctggaaagccggttaagtggagttttacgccgtgaaggtaatcactgggtgcctgatagtattaatgcccagggattgaaatttaacccggaatttctgtctgccctgaatacactgaattctctatcagatatcgtatttaccagtggcgaagcgcggctggcgtttgaagtacgaccgggaacggccggtggagtaatgcagaccaatctggtgatagacaaccagaaattgatttatatgaatcagcgcccggactggaagaaatttatctggccggcagataccactgcgcaaggagcgatcttaagctggtcgggtacaagatcgagaatgcgcatttatgcggagcaaccgggaacatggggttttatccggttgctggaaaaagcaaaagttacaccgtggtcaggttcaagcagtagctatcagatgagctggaggacgccgaatggacaggtactaaactatacactgcgaacggaggctggcgaaggcccgctggtgctgctgaaactgcgtaattttgttctgccagacaagatatttgactgatttttgactaaaaatggctgagtacaattgagggaatttattccctcaattgcatcctccaccgtcaccacttccacaatccccataaccagagtcactactatcacaatccccggcactattattgacatcaatatgagatggtatataggtaaatttactattttttaatttttttcgaaacattcatttttattgcatattgcaattaatatccaaaagaagttttcctgacctatataggtgtttataaacattctacagtagttaataaaattatagttttcttcgtctaatatacttgttatggcacttattatttcattttctatgctgtcatctataattagtattaattgagtattaattggttttttgcgaaatccattataaagttgatttcaccttgagttttcttttttttatttgtctgttcttccgcggttctttatttttcctaatccctgattataagagtaaatgatatctatttatatcgcatcccgatgaataaac

SEQ ID NO: 1783 - DNA, 13890 bp, Xenorhabdus sp.; identical to SEQ ID NO: 1782
  CDS (9091)..(9936)

SEQ ID NO: 1784 - DNA, 13890 bp, Xenorhabdus sp.; identical to SEQ ID NO: 1782
  CDS (6686)..(7609)

SEQ ID NO: 1785 - DNA, 13890 bp, Xenorhabdus sp.; identical to SEQ ID NO: 1782
  CDS (3915)..(4529)

SEQ ID NO: 1786 - DNA, 13890 bp, Xenorhabdus sp.; identical to SEQ ID NO: 1782
  CDS (1703)..(3157)

SEQ ID NO: 1787 - DNA, 13890 bp, Xenorhabdus sp.; identical to SEQ ID NO: 1782
  CDS (661)..(1662)

SEQ ID NO: 1788 - DNA, 7936 bp, Xenorhabdus sp.
  CDS (5780)..(6850)
gcgctacagaatgctggcatccgtgccactgccagtgccctgaatattagtattaatgccgtcgttcgctttttaaaaaaccgtcctacgatgcgtaacctcattaccgctggaacaggtgaaaattcatctcatctgtgaaatcgatgagatgtggccatttgtcgggaataaaaagcaacaacgttggtaatggtatgcttgggagcctcgtctgaagcagattattgtgcacatcttcggtagacgcagaaaaaagacactgaagaaacgattcaagaaattatcgcgctttaaagtcgcttttctctgtaccgataatgtgaaactttaaaacgtgctacccacaaataaacacctcatcggaaaaagtttcacacagcgtattgaacgtgaaaatctcaccctccgaaatcgaattaagcgactgaatcgtaaaacatcgggttattcaaaatcaccggaaatgcatgacaaagtcatcgggacttttatcgaaagagaatattatatttaaggtaaatcaataaattgaatacgtgaccctttttctcttctggagtaaaattgatttatattttggagagcagagtgacattttaaacttgcaataacaaagggttgaggaaaatcgaaatagcaaccaccgctaagtggctacttaaaataagtatttaattataaaccaataaattattactctttattcaccatttttttcagactgaattagcctgtcaaaaatatcagatggtattgcagttattttctttttcagaagatcaacaaaaaacaatacaacctcacactggttaatgacttctccatgacggttactgatgaactgctctattctcaggcgtatttttcccattccagttataactgtttttatgtgaagtaaatcatcaaagaaagacagagaaagatattcgagaccgattttcctgacagcattaaataatatcattacagagtcttatttctatattggtattaatgattaagaagtttttgtccaatttcattctaacgacaacatcgcaaaaaatactttatctggacattgtcgttatgaaagttataaacctagtccattggcgatgatattacgctgaatatccgatgtccctgaataaatgacggatgcaatggagttgcgtaattctctttcggcatgactgtcagcaagataaccctttgctccgtagatccgtaatgcatctattgataactgtgtgtacgtttcagacacgaacaattttgcacaagccgcttccatcgtggcatctttccctgcgtcttttaagcgtcccacccgatagacaagttcacgtgcagcatccagattaaccttcatgtctgcgatacgatgtgatatagcctgatttttcccgatgggctgaccaaactgtttccgtgtgcgtgcatgagtgatacatccgtcaaggctgcggcgcattgctcccaagactgtagcaagaatacatccacgctcatactccatcgcactttcaaagatcttaataccgcgtccttcccgccctaatatggcatctgcggggatacggcaatccttgaatataactcgccccatttgtgcggtacgtaaccccattttttccagcggttgactgacctctatacctggcgtggatgattcaacaagaaaagcggtgatacccaaagggccgagtgtgggatcaattgtggcatagataacataaaggtcagcaataggagcatttgtgatataagttttcattccattaagaatataacaatcaccacttcttactgcgtgagtgcgcatagagaaaacgtcggaacccgcttcatcttctgtcgagccattagccccgattaacgttccatttaatagaccgggtaagaaacgagaacgttgggccggcgtaccgtggatagcaagttgcatcgtcactgtccacagatgagcgttgagtgaaaacaatagccccatatcttcgcaaccgtatcccaggccttccatgatagacagaagatcagataatgaggccccttcaccaccatattcttcaggtatgcccattttaagtaacccgaaatctgcgcatttttgccaacctttctggaagaacgtcccgttacgatcagaggctgagatatctgtcttcaattgctcatgagcaaaacgttcggctttatcacgcaataatagccgtttttcatccagttgatttgtcatggtttcgttgctccagaaattgttgtttcagaaattgatagtcagttttacccgtagaagttcgtggaagttcaggcaggtaactgaaatagtcagggagcatgtatcgtgcaagccggttatgacaatactgactcagctctgtcaatgacagctgaggataataagacaccagaaaagcagtaattatcacttctccatctatctctgtactgataactgcactgtcagagagtttaaggtgagttatcaggcatgactcaatctcatccagttctatccggtatccatggcgcttgatcatacgatcgcgacgtcccatgaaaatgtaaccttctggtgaggaacgaactacttctcccgtgttgtaccaacatttgccgttaaggtaaaagatactctgggcggttttctcctgatcattccaataaccagcaaaaacagaatctcctgaaacaaataactgacctgattcaccttccggcacgagctgaagatgttcattgacaacaatcgtttcacaatgagtacaaggactaccaatggataatgactccagacgattctccggaataggcgcgggtacttggtaaacagtacatacattggtttctgtgggaccatacaagttgaagtaatcggctttaggccacagattcatcaacttacgtaatttggtaatagggaaaacctctcctgcaaatagtacgaggcgtagctggttagggatatgccctttttgaccctgctcagccaaaatacccaaaattgcaggcgcagaataccagatggtaattgctctgcgggcaataaatgaagccagatggcgtgggcttgcggcaagatcagtatcaatcagatgaatgcaggctccattcttcacagaaacataaatgtcgaaaatagacaggtcaaaatgaaatggggcatgactggatatttgatcttttgccgtcacccggaagaaatctgaagcccattcaacgaaactcactgagttacgatgggttatgactacccctttcgggataccagaagaaccggatgtgtacagtatgtaggcagggcgatttgcatcaggtgtcccacgtggataatcaggctctttttcacttttttccgtggatcgtttttctatagataaaatatcccgtacctgtaatgccccgcttgttttttctccaattgcctgtatcacaatgatctgaaattgaaagtgaggagcaacttgtgtcaggtatgctgcggactcgggatcggtcagaatgcaacgaacatgacaattatcaaatacggcgaatgcccgtgaagcggagctattcacatcggcgggtacgtacacagcacctaaacgaagtacaccaaaaatggcggcaagggtttgtggtttcttgtgcatgaaaataccaacacgatcccccatcacaacgtctttttggtaaagaaaagtcgcaacctgatccgcagcatcagaaagctgcttgtaactcattgttgaatcgtcagaaccaatgactgcacaagcttcaggatgtcgtaagacagaatcatctaagtacttagccagatcgactgaagatccagtttgttcctttaatactgtcgctatcattacttgccttcttctgatgaattatcagccacttttttttcaacaacatagcgtgatatttcacgaatagtcgtaaaacgtattcttggatcactgacaccaacgataatattgaactcatcttcaatgaatgaaaccagacgcatcattgccaaggatgaaagtatccctgattctcctaaattcagatcatcagtaatatcaaggtcatttccttttaggatatcgtcgataataaaagcccggattttagtcaaggtattagtcataataactttctctatcagtcagtaattaatgtaatggatgaaaaatgttcacagtgggtttatagcaggctcataagggtgccagaataacgtcaggccagcggagtatggcggctgaagcttctgcctgaccaccaaacccgtacagaagtacagtatcaccgggtttaatgtcaccggcagcagcggctgtatatgcattgaatggcatcaacaccggcccgatattagcaacctgtgggaaagtatttaccacacggttaagttctactcctaatacactggccgaaaactctgcgtgccaggctgtcggagtattcacaacaacaaagtcaatatcgttcaattcaagcccggcttttgccagagcaccctttgttgtctgtacgagatactcttcagccgtagcgcgtaatacgtgggagatagaaggatctacacgcaagcggattttttgcccgaggggggttgttcctgaggtatcttcgactgcatcaagcagccaggtgccacaggtttttcctgtatgcaaagattcagcgcccagtaaaccagaaccggcttctaccggcccgaccaaaaatgctgccgaagcatctccacataaacgcagggtgacatcgtcaggttcgatcgcccgcgatagtctggatgttgttatgactaaaactcgttcttttaaccctgcttgcacccaggcacaggctgtcaataatgctgtcatggaaccaccacaggttgcttctatgttaaaagcaccgccgccagttccaattagctgagcaagatacccggcatcacctgagccaatccgatccggaaacattgacactgaaatcagacaatctacctctgccggagaaacacccgcagcccccagtacacgatgtgcggctttaacacctagctccacacttccttcgttagttgctgcgattcggcgttcgacactaccgaaaaaaggatcgtccagataacgttccatcgcggcatcataggggttaattttacgatgactggatacaccacgtgctcccgctactattattgactgctcttgaggcatatcttcacaccaccaatcatttgtacgcacctcatcaggcaaatatacggcaatagcctgaattcctgctgcttgcatagagtctcctcatataataaagcggattacctaaaatcatgcggcatgaatttgcgttctgatttgcaggcaataaaataaattcgaactaaaaatcagttgtatgataaatgcaaaagttcactttaaatactataaatttattgaactattaaaaaagaaaaccacctagaatttaatgtttatccagcaatatcgccgagtaagccgatgaataaaataaactattacttacatcagagaatataactcaataaatattatttattgtaaactcacttcacattgaatgagtgtttatttcattttttctcatttaactttagtatcaaacatattgatgaatttattgatcaccttccatgaaaacagaatttaatcgactttattcgatatttcatataaaaaaccttttattaacaataaaatttttaggatagatcatacatcattttaacggtattttacttgtatctaactgtttaaataagtgaaatatgagcatgaaaaaaattaatgataatatattaataacattaatagccataatatgtggttttactgctgctaatatgtattatgttcagccactaatccccatcatccgggataacttattggtatcttatgagaaagcatccatgctatattcgttatctctggtgggtaatgctgcgtcactattttttataataccattaggtgatttttataataaaaagaaactaatagctattctttaccttatttcatcattgtcgttattagttttttttgtatgcgacaactattacgccctgttattgatgtcttttttaattggcgttggaacctcagccattccattgattattgcagggttaagtaaacaaaaaaatggaacgatatatattggcaggatcatggctggagtactgattggcattcttttttcaaggtttttatcaagtatccttagtgaaatttggggttggaaatcaatatatattatttcaagtattttgatggctctttctggatattttttattaaaaaattactcgacaccagaaagtacagaaaaaaatacagttaaaaattatcgaaacattttatttctgaatataacagaaatcattaaaaatgacattatccggcattattgttttaacgcttttgtcattatgtttgtgttctctgcattctggaataatatatccatgtttctgaaatcatcatttaaccttagccaatcagaaataggttttttttcactgattggtattgcaggttcttcctctgctctattttcatcttatattttaaaaaagataaattataaaaataaaatcctctatttattatctgtcatagctttaattattatggttagttctaaaaaatacattttaagtactataatatgcgcattgctgattgatgcgtttattcagctaatacatgtcaacaatcaaaggaatttgtatctttcttgtaaagggaatgaggctcgcgctgcaagttgttatatgacaagctttataatcggtggtgccttcggtggatttgtttcatcctatatttatacaatatatggatggagtatggtcttgatgatttgtgcaattatttctttcgttccagtgtgtttaaatccgagagaaaataatcatgaaaaacattaatgcatcactaagacgtattgactttttatgaaagggatttgaacagcatgataatttgaattctaacggaaaaactacatatggtcagtaaacattatacccaatgtatagtgaggtataatttgaatcttcgtcagtgtttggcaaaacttcccctcatgtctaacattcatggaaatgtatcgcagagaattattaggcattatctaaacattcatcacaacattaattattcctcctaacgattaatcgcagtaaaagcatgaatatcaaaattaacagctactgattcagtacctcctatctcaatcaccttcctcataaattcattgaaatacaactcaccaccttcctgctcaatataatgagtgacataactggtggataagaaaaagagtactacttcttctggtgaaaggaaaataatgttggcaaacacttcgcgctgtagatcatacaggtgggaacattcactcattagttccagggtattatcatattgagtgagccgtggatcacgatatttagcccagcgagtaaccagctctttttcaatgtaatctcgcaatgggccataaaccaaaggaaaatcgtacttataggcacaaaacaatccactgggttttagccagcttttcagattcatcagcaccgccttacgatccatccaataaaaagaggtagcacttgtgatcagatcatatgggtgtgagacagaaaaagtttctgctggtgagatattaaaaataatatcaggaatgagatgaacgctccccactcattaaatctggagcacaatgatgaatgaagggaaagtacataaaggtgtggagcctcgcagatttccggcatcatagtgcccaatacgggatgcataaagctccctcagactggagactccacaacatgaaatgtacaccggttggcgttgatattgcaaaacatctgatccaagtccacttcattaatgagcacacaggtgatagtggttgataagcagttgcgtagtcaagattttat

SEQ ID NO: 1789 - DNA, 7936 bp, Xenorhabdus sp.; identical to SEQ ID NO: 1788
  CDS (4723)..(4890)

SEQ ID NO: 1790 - DNA, 7936 bp, Xenorhabdus sp.
  CDS (5710)..(6855)
ataaaatcttgactacgcaactgcttatcaaccactatcacctgtgtgctcattaatgaagtggacttggatcagatgttttgcaatatcaacgccaaccggtgtacatttcatgttgtggagtctccagtctgagggagctttatgcatcccgtattgggcactatgatgccggaaatctgcgaggctccacacctttatgtactttcccttcattcatcattgtgctccagatttaatgagtggggagcgttcatctcattcctgatattatttttaatatctcaccagcagaaactttttctgtctcacacccatatgatctgatcacaagtgctacctctttttattggatggatcgtaaggcggtgctgatgaatctgaaaagctggctaaaacccagtggattgttttgtgcctataagtacgattttcctttggtttatggcccattgcgagattacattgaaaaagagctggttactcgctgggctaaatatcgtgatccacggctcactcaatatgataataccctggaactaatgagtgaatgttcccacctgtatgatctacagcgcgaagtgtttgccaacattattttcctttcaccagaagaagtagtactctttttcttatccaccagttatgtcactcattatattgagcaggaaggtggtgagttgtatttcaatgaatttatgaggaaggtgattgagataggaggtactgaatcagtagctgttaattttgatattcatgcttttactgcgattaatcgttaggaggaataattaatgttgtgatgaatgtttagataatgcctaataattctctgcgatacatttccatgaatgttagacatgaggggaagttttgccaaacactgacgaagattcaaattatacctcactatacattgggtataatgtttactgaccatatgtagtttttccgttagaattcaaattatcatgctgttcaaatccctttcataaaaagtcaatacgtcttagtgatgcattaatgtttttcatgattattttctctcggatttaaacacactggaacgaaagaaataattgcacaaatcatcaagaccatactccatccatatattgtataaatataggatgaaacaaatccaccgaaggcaccaccgattataaagcttgtcatataacaacttgcagcgcgagcctcattccctttacaagaaagatacaaattcctttgattgttgacatgtattagctgaataaacgcatcaatcagcaatgcgcatattatagtacttaaaatgtattttttagaactaaccataataattaaagctatgacagataataaatagaggattttatttttataatttatcttttttaaaatataagatgaaaatagagcagaggaagaacctgcaataccaatcagtgaaaaaaaacctatttctgattggctaaggttaaatgatgatttcagaaacatggatatattattccagaatgcagagaacacaaacataatgacaaaagcgttaaaacaataatgccggataatgtcatttttaatgatttctgttatattcagaaataaaatgtttcgataatttttaactgtatttttttctgtactttctggtgtcgagtaattttttaataaaaaatatccagaaagagccatcaaaatacttgaaataatatatattgatttccaaccccaaatttcactaaggatacttgataaaaaccttgaaaaaagaatgccaatcagtactccagccatgatcctgccaatatatatcgttccatttttttgtttacttaaccctgcaataatcaatggaatggctgaggttccaacgccaattaaaaaagacatcaataacagggcgtaatagttgtcgcatacaaaaaaaactaataacgacaatgatgaaataaggtaaagaatagctattagtttctttttattataaaaatcacctaatggtattataaaaaatagtgacgcagcattacccaccagagataacgaatatagcatggatgctttctcataagataccaataagttatcccggatgatggggattagtggctgaacataatacatattagcagcagtaaaaccacatattatggctattaatgttattaatatattatcattaatttttttcatgctcatatttcacttatttaaacagttagatacaagtaaaataccgttaaaatgatgtatgatctatcctaaaaattttattgttaataaaaggttttttatatgaaatatcgaataaagtcgattaaattctgttttcatggaaggtgatcaataaattcatcaatatgtttgatactaaagttaaatgagaaaaaatgaaataaacactcattcaatgtgaagtgagtttacaataaataatatttattgagttatattctctgatgtaagtaatagtttattttattcatcggcttactcggcgatattgctggataaacattaaattctaggtggttttcttttttaatagttcaataaatttatagtatttaaagtgaacttttgcatttatcatacaactgatttttagttcgaatttattttattgcctgcaaatcagaacgcaaattcatgccgcatgattttaggtaatccgctttattatatgaggagactctatgcaagcagcaggaattcaggctattgccgtatatttgcctgatgaggtgcgtacaaatgattggtggtgtgaagatatgcctcaagagcagtcaataatagtagcgggagcacgtggtgtatccagtcatcgtaaaattaacccctatgatgccgcgatggaacgttatctggacgatccttttttcggtagtgtcgaacgccgaatcgcagcaactaacgaaggaagtgtggagctaggtgttaaagccgcacatcgtgtactgggggctgcgggtgtttctccggcagaggtagattgtctgatttcagtgtcaatgtttccggatcggattggctcaggtgatgccgggtatcttgctcagctaattggaactggcggcggtgcttttaacatagaagcaacctgtggtggttccatgacagcattattgacagcctgtgcctgggtgcaagcagggttaaaagaacgagttttagtcataacaacatccagactatcgcgggcgatcgaacctgacgatgtcaccctgcgtttatgtggagatgcttcggcagcatttttggtcgggccggtagaagccggttctggtttactgggcgctgaatctttgcatacaggaaaaacctgtggcacctggctgcttgatgcagtcgaagatacctcaggaacaacccccctcgggcaaaaaatccgcttgcgtgtagatccttctatctcccacgtattacgcgctacggctgaagagtatctcgtacagacaacaaagggtgctctggcaaaagccgggcttgaattgaacgatattgactttgttgttgtgaatactccgacagcctggcacgcagagttttcggccagtgtattaggagtagaacttaaccgtgtggtaaatactttcccacaggttgctaatatcgggccggtgttgatgccattcaatgcatatacagccgctgctgccggtgacattaaacccggtgatactgtacttctgtacgggtttggtggtcaggcagaagcttcagccgccatactccgctggcctgacgttattctggcacccttatgagcctgctataaacccactgtgaacatttttcatccattacattaattactgactgatagagaaagttattatgactaataccttgactaaaatccgggcttttattatcgacgatatcctaaaaggaaatgaccttgatattactgatgatctgaatttaggagaatcagggatactttcatccttggcaatgatgcgtctggtttcattcattgaagatgagttcaatattatcgttggtgtcagtgatccaagaatacgttttacgactattcgtgaaatatcacgctatgttgttgaaaaaaaagtggctgataattcatcagaagaaggcaagtaatgatagcgacagtattaaaggaacaaactggatcttcagtcgatctggctaagtacttagatgattctgtcttacgacatcctgaagcttgtgcagtcattggttctgacgattcaacaatgagttacaagcagctttctgatgctgcggatcaggttgcgacttttctttaccaaaaagacgttgtgatgggggatcgtgttggtattttcatgcacaagaaaccacaaacccttgccgccatttttggtgtacttcgtttaggtgctgtgtacgtacccgccgatgtgaatagctccgcttcacgggcattcgccgtatttgataattgtcatgttcgttgcattctgaccgatcccgagtccgcagcatacctgacacaagttgctcctcactttcaatttcagatcattgtgatacaggcaattggagaaaaaacaagcggggcattacaggtacgggatattttatctatagaaaaacgatccacggaaaaaagtgaaaaagagcctgattatccacgtgggacacctgatgcaaatcgccctgcctacatactgtacacatccggttcttctggtatcccgaaaggggtagtcataacccatcgtaactcagtgagtttcgttgaatgggcttcagatttcttccgggtgacggcaaaagatcaaatatccagtcatgccccatttcattttgacctgtctattttcgacatttatgtttctgtgaagaatggagcctgcattcatctgattgatactgatcttgccgcaagcccacgccatctggcttcatttattgcccgcagagcaattaccatctggtattctgcgcctgcaattttgggtattttggctgagcagggtcaaaaagggcatatccctaaccagctacgcctcgtactatttgcaggagaggttttccctattaccaaattacgtaagttgatgaatctgtggcctaaagccgattacttcaacttgtatggtcccacagaaaccaatgtatgtactgtttaccaagtacccgcgcctattccggagaatcgtctggagtcattatccattggtagtccttgtactcattgtgaaacgattgttgtcaatgaacatcttcagctcgtgccggaaggtgaatcaggtcagttatttgtttcaggagattctgtttttgctggttattggaatgatcaggagaaaaccgcccagagtatcttttaccttaacggcaaatgttggtacaacacgggagaagtagttcgttcctcaccagaaggttacattttcatgggacgtcgcgatcgtatgatcaagcgccatggataccggatagaactggatgagattgagtcatgcctgataactcaccttaaactctctgacagtgcagttatcagtacagagatagatggagaagtgataattactgcttttctggtgtcttattatcctcagctgtcattgacagagctgagtcagtattgtcataaccggcttgcacgatacatgctccctgactatttcagttacctgcctgaacttccacgaacttctacgggtaaaactgactatcaatttctgaaacaacaatttctggagcaacgaaaccatgacaaatcaactggatgaaaaacggctattattgcgtgataaagccgaacgttttgctcatgagcaattgaagacagatatctcagcctctgatcgtaacgggacgttcttccagaaaggttggcaaaaatgcgcagatttcgggttacttaaaatgggcatacctgaagaatatggtggtgaaggggcctcattatctgatcttctgtctatcatggaaggcctgggatacggttgcgaagatatggggctattgttttcactcaacgctcatctgtggacagtgacgatgcaacttgctatccacggtacgccggcccaacgttctcgtttcttacccggtctattaaatggaacgttaatcggggctaatggctcgacagaagatgaagcgggttccgacgttttctctatgcgcactcacgcagtaagaagtggtgattgttatattcttaatggaatgaaaacttatatcacaaatgctcctattgctgacctttatgttatctatgccacaattgatcccacactcggccctttgggtatcaccgcttttcttgttgaatcatccacgccaggtatagaggtcagtcaaccgctggaaaaaatggggttacgtaccgcacaaatggggcgagttatattcaaggattgccgtatccccgcagatgccatattagggcgggaaggacgcggtattaagatctttgaaagtgcgatggagtatgagcgtggatgtattcttgctacagtcttgggagcaatgcgccgcagccttgacggatgtatcactcatgcacgcacacggaaacagtttggtcagcccatcgggaaaaatcaggctatatcacatcgtatcgcagacatgaaggttaatctggatgctgcacgtgaacttgtctatcgggtgggacgcttaaaagacgcagggaaagatgccacgatggaagcggcttgtgcaaaattgttcgtgtctgaaacgtacacacagttatcaatagatgcattacggatctacggagcaaagggttatcttgctgacagtcatgccgaaagagaattacgcaactccattgcatccgtcatttattcagggacatcggatattcagcgtaatatcatcgccaatggactaggtttataactttcataacgacaatgtccagataaagtattttttgcgatgttgtcgttagaatgaaattggacaaaaacttcttaatcattaataccaatatagaaataagactctgtaatgatattatttaatgctgtcaggaaaatcggtctcgaatatctttctctgtctttctttgatgatttacttcacataaaaacagttataactggaatgggaaaaatacgcctgagaatagagcagttcatcagtaaccgtcatggagaagtcattaaccagtgtgaggttgtattgttttttgttgatcttctgaaaaagaaaataactgcaataccatctgatatttttgacaggctaattcagtctgaaaaaaatggtgaataaagagtaataatttattggtttataattaaatacttattttaagtagccacttagcggtggttgctatttcgattttcctcaaccctttgttattgcaagtttaaaatgtcactctgctctccaaaatataaatcaattttactccagaagagaaaaagggtcacgtattcaatttattgatttaccttaaatataatattctctttcgataaaagtcccgatgactttgtcatgcatttccggtgattttgaataacccgatgttttacgattcagtcgcttaattcgatttcggagggtgagattttcacgttcaatacgctgtgtgaaactttttccgatgaggtgtttatttgtgggtagcacgttttaaagtttcacattatcggtacagagaaaagcgactttaaagcgcgataatttcttgaatcgtttcttcagtgtcttttttctgcgtctaccgaagatgtgcacaataatctgcttcagacgaggctcccaagcataccattaccaacgttgttgctttttattcccgacaaatggccacatctcatcgatttcacagatgagatgaattttcacctgttccagcggtaatgaggttacgcatcgtaggacggttttttaaaaagcgaacgacggcattaatactaatattcagggcactggcagtggcacggatgccagcattctgtagcgc

SEQ ID NO: 1791 - DNA, 7936 bp, Xenorhabdus sp.; identical to SEQ ID NO: 1790
  CDS (4164)..(5729)

SEQ ID NO: 1792 - DNA, 7936 bp, Xenorhabdus sp.; identical to SEQ ID NO: 1790
  CDS (3949)..(4098)

SEQ ID NO: 1793 - DNA, 7936 bp, Xenorhabdus sp.; identical to SEQ ID NO: 1790
  CDS (2685)..(3758)

SEQ ID NO: 1794 - DNA, 7936 bp, Xenorhabdus sp.; identical to SEQ ID NO: 1790
  CDS (354)..(782)

SEQ ID NO: 1795 - DNA, 9319 bp, Xenorhabdus sp.
  CDS (88)..(423)
gatatccacctttactgattttgaagatggtagctttgaaggtgatagcttcaaagataatagtattcaaaattaatagttttaaaagtgaggtgttgtatgtcaatttccctgacagaaagtgcagcccagcgtgttttggctttccttgataatcgtggaaaaggtgttggtctgcgtctgggagtgagaacttccggctgttctggtatggcatatgtacttgaatttgctgatacagttaatgatgaagatcagatttttgaagataagggcgtgaaagttatcgttgacggtaaaagcattgtttaccttgatggaactgagttggattttgtcaaagaaggcctgaatgaaggctttaaattcaacaaccccaatgtttccggcgaatgcggctgtggggaaagttttaacgtttaacccccccgtattttgcgaaaccaagagtaacttatggactactttactttattcgggttgcctgtgcgttatgcaatcgatcgccaacaattggcgacccgctatcaggagttacagcgtcagtttcatcctgatcgttttgccaaccaaccagagcgtgaaaaaacgctggcacttcaacaggctgcaaccattaatgatggttatcagactctgaaacaccccctgaaacgtgcagaatatatgctatctcagcaagggtttaacttatccagtgaacagcacacgatgcaggatacggctttcctgatgcaacagttagagttgcgtgaagagcttgatactattgagcatagtgccgagccggatgccgcattggctggtttttcatctcgcctgaataaaatgattaaaactcgtagtgagcagatggaaaagcagctggatgcagaacagtggtcaattgcagccgatactgtccgtaagttacgctttctggataaattgcaacagcaggtcgaacagctagaagaacggctgttggatgatttttagctgaatcgcgttttagtgaacaatgcggggctgatttagtatatccgagaaatttcaagttatatcgaggccaataacaaagaggcagcttgaaaagcgggtatagttggtttttataggggcacacatggctttattacaaatcagtgaacctggtttatctgccgcaccacaccagcgtcgtctggctgcggggattgatcttggtacaacacactccctggttgcgacagtccgcagtggtcaggctgagaccttagcagatagtgaaaaccgtcacttgcttccttcagttgtacaatactgcaaggatgaaattcagatcggctggcaggcccgtcaacaggcggctttcgatcctgttaatacgataagctctgtcaaacgtatgatggggcgctctctggctgatattcagcagcgttacccgaatcttccttatcaatttcaggccagtgaaaatgggttgccgttaattaatacagcggcaggtttggttgatcctattcaggtttcttctgacatattgaaatcgttggctcaacgggcagaagaaacactggatggtaaacttgatggtgttgttatcaccgttcctgcttattttgatgacgctcagcgtcagggcacgaaagatgcggctcgtttagcgggtttgcatgtccttcgcctcctgaatgaacctactgcggctgcgattgcctacgggcttgattctggtcaggaaggtgtgattgctgtttatgatctgggcggcggaacatttgacgtttctatcctccggttgagccgtggtgtttttgaagtattggcaacgggcggtgatactgcactgggtggtgatgactttgaccatctgctggcagactggatccgtgagcatgccgggattaccgataccaaccacgggttacagcgtcaattactggatgttgcgacacaaaccaaaattgcgttgagtgatgcagattcagtctcaattaattttgctgactggcagggcaatattacccgcaccgaattcaatgaattaattacaacactggttaaacggactttattggcttgtcgtcgggcattgaaagatgccggcgtgacagctgacgaagtcttgcaggtcgtgatggtgggaggctcaacaagagttccgctggtgcgcagcatggtaggcgaattttttgatcgtgaaccgctgacctctatcgatccggacaaagtagttgcggttggtgcggcaatacaggcggatattctggcaggtaacaagccagacagtgaaatgttgttgctggatgttattccgctgtcactgggccttgaaacgatgggcgggctggttgaaaaggttattccgcgcaacaccactattcctgtcgcaagagctcaggaatttacgaccttcaaagacgggcagagtgcaatgagcatccacgttgttcagggtgaacgcgaactggtggcagattgtcgttctctggctcgtttcactctgcggggaattcctccgttgccggcaggtggtgcgcatatccgcgtgactttccgggttgatgctgatggtttactgagtgtcagtgcactggagaaatcgacgggtgttgaagcctctattcaggtgaaaccttcttacggactgtctgatgaagaaatcgcccgaatgatcaaagattcaatgagtaatgcgcaggaagatattcaggcgcgtaaattggccgagcaaaaagtagaagcagcccgcgtgctggaaagcttaaccggtgcgctggaaaaagacgctgatttactcagtcaggaagaacatgctgcaattgatgctgccgtacaagtattaattgaaagtgctcagggaacgtctcctgaagcgattgaaagtgcaattaaacaattggacaagcaaacgcaggaatttgctgcgcgtcgcatggacacatcaatccgtcgggctttggcgggtcattctgtggatgaaatttaattatgcctaaaattgtatttttacctcataacgaactttgccctgaaggtgcagtattggacgctaaagaaggcgaatcaattctggatgttgcactgcgaaacggtattgaaattgagcatgcctgtgaaaaatcctgcgcatgtaccacttgtcactgtatcgtcagagaagggtttgactcattggaagaaagtgaggaactggaagatgacatgctggacaaagcgtggggactggagccggaaagtcgcctgagctgtcaggctaaagttgctgatgaggatttggttgttgaaattcctaaatacacgatcaaccacgcgcgtgagcactgagtttaaaataaagttatacacaatggatttcaagatgtatcgcggcggcaagggaaatcatccccgggagcatagataaccgtatgtttataaaaacggtgactggggtgagcgagcacagccaacaaagaggcaacttgaaagacgaagtgtataaggagaacaaaaaatgaaatggtctgacagccgtgaaataggtgaagcactttatgataagttcccggatttagatcctaagacagtgcgtttcaccgacatgcatcaatggatttgcgaactggatggctttgatgataatccggaaaaatccaacgaaaaagtattagaagccattttattggtttggttggatgagtttgaataaaagagctcaatcttagaagtcatgttacgcaaacaaataatgcgaaaaacagtactaaatcaccaatttttgtccaatgacttggcatagtctgtatttaatgaaaaactggcatccgccagtttttttacatttattactctaataatgatcctaatacagtaaaaataagaagagagaaagataatgaccaaaaacgctataccggcgcaaatcatgccgataactctgtcttatgagccagctaaagcatgctggggtgaaaaagcgctaattagctcaaatgatcagggaatgatgattcatatgtcaggcgagaactctgacataaacagtaaactggcgttgattcagcgtgccggacgtaaaattaatgggcaaggtatctataatgttgctttggctggtgaaggctgggatctggaaaaaagctgggcattttggctcggtttccgggcaccaaaagggctgcgcactattgaatggccgcaactgaatgtcgaagaaaagcaggaactcgagcatcgaattaaattcatcgactgggtgcgtgataccgtcaacctgcctgccgaagaattggggccagagcagcttgctcagcgtgttatcgatttaattaataatgtagcgccagatgctatcagttatcgcatcataaaaggtgatgcgttatatgagcagggctatgttggtgtccatactgtcggtcgtggttcttcccgtgttcctgtttttctggagctggatttcaacccaacaacaaacaaaaatgaacccgtatttgcctgcttagtcggaaaaggtattactttcgattcaggcggatatagcctgaaaccatctaattcgatgagtgccatgaaatctgatatgggtggttcagcaactctgtcaggtgcgctggcactggcaatcagccgtggcctgaaacagcgtgtaaaactgtttctgtgcattgctgataatatggtcagcggaaatgcattcaaactgggtgatatcattcgttaccgtaacggtaaaaccgttgaagtcatgaatactgatgcagaaggccgtctggtactggctgacggtttgattgatgccagtgcagaaaatgcttctttgattattgatgcagcgacattgactggggctgcaaaaatggcagtgggtaacgattaccactctgttttcagttttgatgatcaactagcggcggatttattggttgcagcagatacagagcatgaacaattctggcgtctgccattggctgaattccaccgcaatcaactgccatccaactttgctgatttgaataacattgctgcaccttctcacacagctggcgcaagtactgccgctgctttcctgtctcattttgtcgaaaattacaaaaaaggctgggtacatatcgattgttcagcaacttatcgctcatctgcggttgaacaatggtcggcaggtgcaacaggttgtggtgttcgtaccatcgccaacttactgctgacaaaagcaaaataagcacatgggaaggaaaatgtaatgaatcaggacattgtgctacccgactttgacatcacggattctgacgaagatgatccacatgcgcgtgaacgggtcagtgaattactcgatcaatggaatatcaggcagacgggcgagcagggtaaccagcctctggatatttatatccgggatagcgatggggaagtgattggtggtttggtcggacgaacgtcacttggcatgcttttcatcaactatctttatctccctgatgaactcagaagtcagagactgggcagtgtgttactcagaaaagctgaggaaaaagcccgccagcgtggttgtcatgctgtgacgttgtacacgatgtccattcaggcacctgagttttacctcaaacacggatacacggttttcggtgaagttgcctgtaaaccggcaggaaacgccagaatatttatgtataagctgttgtgatatctgaatacttctgattttctgttttctggcctcctcatatggggaggctatgatttagcacttttaattaggtatatacacaatagatttcaagatgcgtcgcggcggcaagggaactcatccccgggagcatagataaccgtatgtttataaaaacggtaactggggtgagtgagcgtagccaacaaagaggcaacttgaaagatgaagtgtataactctgcttttaacatctgtatcaacatatatactgttcggagattttcatgagcttgtcaaacgaagccgttgccactgaaattgaggttccgagtggaagtcgtattactctcagccaactagaagaacaaccagtccagcttattgaagccctgattaatttatttaagcagcataaacccgtgcgccgtgcctttctagtgatggcacacgataaagagcaggacgaaaaacctaatctgttaattggtctggagctgagtgggatacaggcagacagtgacattaatatactgatccagactgctggagaggtagcttgtgaacacctgaatgaagatgaatcagtggatttttgcctgcttgatgaaaaagatggcgggataagccactacctgattcaacatactcagcctttctaccaacggaaattaggcagttggctgagggagactattcctgtactcaatcaataaatattacttaacacagggatatacacttcgtctttcaagttgcctttttgttggctacgctcgctcaccccagttaccgtttttataaacatacggttatctatgctcccggggatgagttcccttgccgccgcgacgcatcttgaaatccattgtgtatagtgtaatgaatgagtgtcagccggtgaacaataaggattatggttatgtgtcaacatcaactgaggcaatgggcaacaaggaaaaaacgcacaatcacgtcaatggttgttactttgtttgcatgctttgcgctaggtattttatctggatgcgatcaatcgcaggataatgaaaagagtataaaaccggaaacatcagcaagtccggcaccttcagaaataacggataccgccagtcgcggttctcacacaccggaaacacaatctccagcagcccaatccctgccacgccaatcactggaagagcaatatacgggtaaagatgtcactattttagatgcttcagaagtacagctggatggggccagtgcaatggtcgtgacattctctgttcctctgaaccctgatcaaaattttgctcagcgagttcatttggttgatgttaaatcaggcaaattagatggtgcatgggagttatcagataaccaaatggagttgagactccgccatttgcctcccaatcaccaattaatattaactattgatgaaggtttacagggcatcaacgggcgcagtttattcaatgtctatgaaaaaaaattccagactgcctcaattcaacctgctgtcggttttgccagtaaaggtgtgcttttacccagtaaactagcagaaggcttacccgttctggcactgaatgttgatcgggtcgatgttaattttttccgtatcaaagaagcttcattacccatgcttatcgctcgcgggcgatacctcagaggtataacttcctgggattctgagcgattactggaaaatgcagatttggtctataccggtcgctttgacttgaacccgacaccgaatacccgtgaaaaactgttattgccattgaatgatattaaagagttgcaaaagagtggtgcctatctggccgttatgcagcaggccggaaaatatgcttacactaacccagcaattctgtttacgcggagtgatattggcgtttcaatgcatagctatctgaatcagatagatgtttttacccaatcactggaacagggttccggcctgaaaggtgttgaggttcgtgtactggatatcaatgggcaacttctggcaaaaaatacgacagacagtaatggacacgccacgctggaaaaaagttccaaagcggccttgttgctggcaacgcagggcgagcaagtcagtatgattgatttgtcatcccctgcactggatctgtctgagtttgatatcggtggtgagcaagggtatagcaggcagttttttgtattcggcccccgggatctttatcgtccgggcgaaacactgattgttaatggcttactgcgtgatgcggatggtcgtttgctgaaacctcagccggtaaaagtggatatattaaaagccgataatcaggttgcgcgcagttttgtctggcagcctgaaaatgggttgtaccaatatcgttattcaatcccacagtctgctgaaaccgggatgtggtcactgcgtctggatttgggaggtaacactccacgttattataaattcaacgttgaagactttatgcccgagcgcatggccttagaaattaaaggaaatacggatagccaaccaatacagaaaaacgaaagtgttaatttttccattacgggtcgttatttgtacggtgctccggcagccgaaaatcggctacagggccagttattcatgcgcccggcccgtgatgcagtggcgaagctatcagggtatgaatttggttcgtcaaaagaagaagagttaagcagaacgctggatgagtttgatttagtcctgaatagtgaaggcaaaactaacattactgtcggtgaggataactggagatatgtctcttctccggtcagaatcgctgtacaggccagtctgcttgaagcaggaggacgcccggtaacacgccatgctgaacaggcagtctggcctgctgaaaaactggttggtatacgcccgctattcaataaaaaatcgaattatgactattatgcggatcgctatgaatcccgttataacgttaatgaaaactcgctggcggagtttgaagttgtttatgcggatgccaatggtaaaaaatacgccacgaatgacttgagagctcgcttgatatacgaacgccgtgattattattggcgctggtctgacagtggtggctgggattcgggatatgaccagaaagatctgatgatggcagatgagcctgttcaaattgtggaagatggtacagcaaaaatcagctttccggttaaatggggttcttatcgtattgaagttgtgaatcagaaaaatcaacttatcaccagtctgaacttttgggccggctattcatggcaggataataccgagggaacaggagctgtccggccggatcaggtcaaattatcactggataaacctgcatataaaccgggagataaagtcaaactacatatagctgcgccacaggcaggtaaaggatatgtattactggaatccagtgatggcccgttatggtggcaggaaattaacgtgtcagcacaaggtctggatattgatgtaccgattaatcagttatgggcgcgtcatgatctgtatctgactgcagttgttgtacgaccgggagataaaagccgtcaggcaacatcaaaacgggcaatcggcgtcttacacttaccactgatggatgaagggcgtaagctggatctgacgctcagcgcgccggacaaaatacgcccgaatcaggatctttcggtcaaaattaaggttacccctcaaaaaggcagagagttgccaaagcaagtttatgtactgctttct

SEQ ID NO: 1796 - DNA, 9319 bp, Xenorhabdus sp.; identical to SEQ ID NO: 1795
  CDS (487)..(978)

SEQ ID NO: 1797 - DNA, 9319 bp, Xenorhabdus sp.; identical to SEQ ID NO: 1795
  CDS (1106)..(2953)

SEQ ID NO: 1798 - DNA, 9319 bp, Xenorhabdus sp.; identical to SEQ ID NO: 1795
  CDS (2956)..(3291)

SEQ ID NO: 1799 - DNA, 9319 bp, Xenorhabdus sp.; identical to SEQ ID NO: 1795
  CDS (3461)..(3655)

SEQ ID NO: 1800 - DNA, 9319 bp, Xenorhabdus sp.; identical to SEQ ID NO: 1795
  CDS (3866)..(5167)

SEQ ID NO: 1801 - DNA, 9319 bp, Xenorhabdus sp.; identical to SEQ ID NO: 1795
  CDS (5204)..(5629)

SEQ ID NO: 1802 - DNA, 9319 bp, Xenorhabdus sp.; identical to SEQ ID NO: 1795
  CDS (6054)..(6326)

SEQ ID NO: 1803 - DNA, 9319 bp, Xenorhabdus sp.; identical to SEQ ID NO: 1795
  CDS (6590)..(9319)

SEQ ID NO: 1804 - DNA, 13198 bp, Xenorhabdus sp.
  CDS (408)..(1958)
  unsure (1)..(13198): unsure at all n locations
tgctgtaaagcgcaggactcttgatccttaattaccatatttaaactattccaaaactgttttcttggctaataataggtactgatcataccagaatgcgccagatcgacatagttacataataaataaaccatgaaagagtgaaagaggtcataaaaaaatataattattacccaattaattatgagattatccccttaaattaccaccagttagagcgtacgatactctatgtatttcgagttgcatcaagacggtcgggaagcgtctcccagagggataatcgctatatgactggatgactggaataagcgagcgtaaccaacagagaggtaactggaaaaacaacgggtatgttgtgctttagaaatgtcccatgtatccacagaagaggaatattaataataatggaaatcagtatccgacgtgcagtggtgaaaaactttctcggcaattcgccggattggtacaaattggctatcattgtttttcttatcatcaatccactggtttttttctatgtcagccccttcgttgcaggctggatgctcgttgtggaatttatcttcacactggcaatggcgttaaaatgctatccattgcaaccgggaggcttacttgctattgaggcggtgcttatcggcatgacctcaccaaaacagatagggcatgaaatcagcaataatctggaagttatcctactgctgattttcatggttgccggtatttacttcatgaagcaacttctgctatttgttttcactaaactactcttgagcattcgttccaaaaaaatgctggcactggccttctgtctggcgagtgcattcttatctgcttttcttgatgccctgacagttatagctgttgttatcagcgtatctgttggcttttattctatttatcatcgttatctttctagccagaataatggcagtacagatcttaacgatgatcaatttattgatagtgaagataaaagacaaacactggatcaattccgggcatttctgcgcagcctgatgatgcatgccggagtcggtacagcattaggtggtgtgatgacgatggtcggtgaaccacaaaacctgatcatcgcaaaacacgttggctgggatttcgtgacattctttatccgtatgtctcctgtcaccgtacctgtttttatctgcgggctactggtttgtctgttggttgaacatttcaaactgtttggttacggtgccgaactacctgagcgtgtccgctctgttttggaagactatgcgaaaaaagccggtgaaaaacgtacccgtcaggaaaaagctcagcttgttgttcaggctttaatcggcatctggctgattgtggctttggcattccacctagctgaagtcggtttgattggcctgtcagtgattattatggctactgctttttgtggtatcacggaagaacatgctttaggtaaagcctttgaggaagccttaccgtttactgcattactgactgtcttcttttctgttgttgcggtcattattgatcaacaactatttaccccatttattcagtttgtattgcaatcctcaccagcgtcacagctttccctgttttatctgtttaatggtctgctttccgcagtatctgacaacgtatttgtaggtactgtttatattaatgaagctctgactgcgcttaaaagtggtcttatttcgcagcagcaatatgagtttttagctgtagccattaatacagggaccaacctgccatcagtcgcgacaccaaacggacaggctgctttcctgttcctgctgacatctgcactatcgcctctgatccgcctgtcttatgggcgtatggtgctaatggctctaccttacacaattgtgatgacccttgtgggtctgctgtgtgttgaattttggctactgcctgctactgaatatctggtaaaacttggctgggttatcccacaataatcccttatatttattattaaggaattctgccggatagggtgtaaaatccccctatccggtttttttatcccttcgaatacccaatcgatttcatgttgcctccggcggcaaaggaacgaatttgcaccgtcaacaaaaaagcaatttgaaagaggatgggtataatttaaaaaaacaacacaactgaccttaaattgattcttttgtgatttaagaaacggcagaataatcggctacctatatatacgatacgggaagaagaagaatgttacattttctaaaatggagttcccaagggcgaagcgcatggttgttaatggcgttaactgctcttttactggagttttgttgctctttactttcaacatgttatgcagttacaaccctgtgtaatgtgcatttatgagcgtgttgctctgttcggtattttcggggcagccctgctgggagctatcgcccccaaaaccccgctgcgctggctggctattttactctggctttatagctcatggcacggattacaactggcatgggatcataccatgatgcagttataccccagcccttttaatacctgtgaattttttgtcagatttccgtcatggctgccgttaaatgaatggctgccttcggtgtttcaggcttttggcgattgttcaataaaacaatggtcatttctgacactggatatgccgcaatggctgattggtgtttttgctgcttatttattagtgggcgttctggttctgatcagccagtttttccggctgaaatataagtattaagaacaaaaaggctgtctttcctgtgtagggaaagcagcctttttcgctaactctaattgataatcccttcctatccgctattattgtttccttttcatgttctccgccataaaatcatcgtaattttttaagggcctttagtcgaacagccatcagaaacaataaagaacaaccagaaatgaatactcaaaaagaacagtataattttaataaattacaaaagcgcttgcgtcgtgatgtcgggcaagccattgcagattttaatatgatcgaagaaggcgatcgcattatggtctgcctttctggtggcaaagacagctacactctgctgtctattttgcagaacctgcaaaaaagtgccccaattaatttttcgcttattgccgtcaatctggatcaaaaacaaccaggttttcctgagcacatccttccggcttatctggatgaactgggcgtcgagtataagattgttgaagaaaatacctatggtattgtcaaagaaaaaatcccggaaggaaaaacaacctgctctctgtgctcccgactacgccgtggtattttataccgcaccgctactgaactgggcgcaaccaaaatcgctctggggcatcatcgtgatgatatcctgcaaactgtttttctgaatatgttttacggcggcaaattaaaaggtatgccacctaaactgatcagtgatgatggtaaacacattgttatacgcccgctggcttactgccgggaaaaagatatcgaacgctacgcagaagcgaaagcatttcccattatcccttgtaatttgtgtggatcacagccaaacctgcaacgtcaggttatcaaggatatgctgcgtgactgggacaaacgctatcccggacgtattgaaactatgttccgggcggtacagaacgtggttccatcacatctcagcgattttaatctgttcgacttcaaaagcattaatcacgacagtgaaattattggtggaggggatctggcttttgatcgggaagagttacccgtacaacctgctattgaccctgatgagcaaattgattttcaggcggatcggctggatattatcgaaataaagtaataaaaaaatagccgatgctaaggattttagtatcggcataatgtcaattttaatcggtataaaactcaatatgagaaacactacaatcatggagcacaacgttcatcgctcagtattcacctgcagggttatagtgcctcaacttgagatactgattattgatatatctcaaatccgaatgaaattaaccatcagattcaatgaacattcggttcagaactcacgacagtcgcaattttccctataaccacttacttcgctttaaccaccatgcgaaccccgctatcaataacgacagcagcaggctgaataaaccaaaaccaaattcatccttatttccggggatcccgccaaggttaacgccaaataagccggttaaaaaagtacttggtaagaatatcattgttaacaacgacatcatgtaaatacgccggttcatcgcatccgccataatggaagtaatctcatcggcaagcaccgctgtccttgcgatacagctatccaaatcatccagcccacgcccgagacgatcagagacttcctgaatcagatgacgagcctcgtcactcatccacggtaacttctcactggacagtcgtgtcaaaacatctcgctggggtgccatataccgacgaagaacaatcaattgcttacgtaataacactaactcacctcgtccggggatcttctgttccagaatgttatcctcaaactcaatcaggttgtcatgtaactcttcaataaaatcgttcacttcgtcggtaatagcatcggcgatttcaaccagccagtgccctgaattttttgctcctacaccattatttaaatcagccagaacctgatcaaccgaatagacttttctatggctactggaaataattatctggtcattaatgtagatgcgaaacgataccaagtgatcagagcgggcattgtcattgcgattaattgtccgcaacataatcatcgccccttcaccggtacgaatgagtttgggccgaatactctcacccaccagcccttcttttaccggaactggtagttggttagttttcataatccattgataacttgcctgatttttataatcaagatgctgccagaatggttgccctgccgttgcagatacattttcgctaaaacctgtagtaccacccttcccgttcaattggcaggcatacacagcatttgaatctttaaatgctgagccataaatcgtttccacatccgctcctgttcaacatttaatgttttttaatgatatacatagtatgactataagccacatcttcaggattggtgatcgggtatccttttaaccattttttgattaaccgaccattagtgtactgataaataggaacaatcggagcctgttcttcaatcattttttcagcctgattgtaatccctgtttctggcgacatcgtctgtttccagactagcctcttttaacaaagcgtcataagctgagttatgaaatttggccagatttccgctgtgcgttgaggtcaaaagtgataagaaacttgatggttcattataatctccggtccatgatgcccggactacatcaaaattaccggtatttcgattatcaacgtaagttttccattcctgattgactaacttcacctcaacgcccagttttttcttccactctgaactgactgcaatggcaatacgttgattattttctaaattattatagagcaaagaaagttttaacggatgatcagggccataacccgcctctttgaacagcaatcttgctctcctatctctttcctgctgagttatcatctgttgctgacttttttccggatgaaaaccggctgtaacgtcaggtgtaaaatgccatgcaggtttttcgcctgtgcctaatatcttttctgcaaccagattcttattgatggtcatggcaagtgcctgccggacacggatatcattagtcggtgcccgctgagtattaaatgcgtaataatacgttcccagttgatccggagtgaacacctctcccgggatatcatgcagtaacttgtggtacatattcttagggaaagattcagtaatatccaaatcccctgccagatagcggttaaccgcatgagattcctgattgattggtacaaacgtcactttcttcagtactgttttcttgtgatcccagtaataagggttaggcgacagaacaattttttcattgactacacgccccgtcagcatgaaagcgccgttacccaccaaatggcctactttggtccagtcattaccgtatttttcaacgctctgtttattcaccggataaaggctgaagtgagtagtcatattggggaaataaggcactgggcgatccagcgtaacttttactgtataagcatcaagagcttcaacccctaatttttccggggggaatttaccatctataattttctgggcattctgaattcctgccaaagcagcaaaccaagaaaatgaagaggcatttttaggattaaccaacctctgccagctatatacaaaatcagaggccgtgactttgtcaccattagaccagcgggcatcctgtcgtagcgtaaatatccatgttttgttatctgtcgtcttccagttaatcgcaactcccggaacaggcttaccataggcatcctgattgacgagaccttccagtaaatcacgcaacacctgcgcctctattaaaccgaaggacttaatcgggtcaagtgatgctggttcatctttcagatggcgaaccagctcctgatgagggtctaactgagttcctacaggaacatcagcagcataaacagaaagaggtaaggaaagccctgtcatcagtaatacagaagggaacaaggtaaaattatgcataaatatttactcttttggtctaataattatcctaaaataaattataagacactgttaattaaacaatagatgagtatttataaatattacagctatttttgtgggcaagatcgcactattccattacactggcaccgcagtttacttatatagagggataaaaccatgacacaaaccgtcaagttccaaggtagcgatatcaccgtagctgggcattttccacaagcaggtgaaacagcaaaagaatttacgctggtagctaaagatcttactgacgtggcactgagccagtatgtagggaaacgtaaggtactcaatatattcccaagcattgacaccggcgtttgtgcaacttctgtacgtaaattcaaccaacatgccggtgaactgaacaatactgtcgtactttgcatttcagccgacctgccttttgcacaatcccgtttttgtggctctgaaggcctttcgaatgttgtcactctatcaacactgcgtggtggtgagtttcaggaaaattacggtgtagccattagccagggtccattaggtggattgactgcacgtgctgtcattgttctggatgaaaacaataatgttatttatagccagctcgtagatgaaattactaacgagcctgattatgacagcgcattagcagcactgaaataattcgttataaagaacttctggcggtaattattatgttgttaccgccaattttatctttcctttcctcacttcctctctctattcttattttaaaatatattaaatataatccaaacagataatagcagcctattacactcatccatcgctctcgtcgccttcaaatttatcactttgttaactttatctttttatttattagatataacacattaagttaaacgataaaaaaattatcagtaatttttctttttaaaattatcttaaatatagatacatcagcttaatttaattaaccatattttatggtattagaaaaaagtttaccccggtataactcattaatttaatatagttacttataatttcctatttaagtaatataggattattttacacaacaaaaacaaaacaatgcataaagtgatatctttatatcaaggtaaattataaacgcaagttatatattccttaaataaaccatcctctggtgattacacattctgactattgtgcttaactcaatatcagaaaccaacagctatatacttatatatccgagaatgcctcacaacagtaagttccaccagctatcatatattcccgcatccagccggaataggcggtagctttgcataaaagcgagtccatattatggaaagacagtttatcgcacatacttcatccggcgaagagttatactttaaatcacttaaaggaatagaaagattatcggaaccttatgaatttgagatcgaattactaagtaaaaatagattatctgaccctatatctcttcataatactgtactcaccgtagaaataaaaaccccatcaaaacaaacaagatatttaagtggttatatagaaaaaatttcttattcgccattttataaatatgatgacaggctttatttatatactgctacagtaaggcctaagctttcggaactaaaaaagaaatccggttatagcatctggcaggaaaaaaccgtacctgagattgtcactacagtattacagggtgccaatattaattttgaagataatctcatagaaaattatcgcccatgggaatattgcgttaaatataacgaaactgatttcgattttattcatcgtctaatggcgcatgaaggtatttattattactttaaacatgagaatggcaaccacactatggtattagtcgatatgccccaaatgcattatccaatgccggggtatgacacgattaaatatttcagtgtcggtagcatattcaggaaactggaccaagaatatatctatacttggaatattagcagttcgactatccccaacagtttcagtactgatgactacgattttcgtaaaccccgggctaaattacagtctctcactcaaacatcgctcagttctgttgatagtacagagatatttatgtggccgggacgctttataaaaggtgaccaggggcaattttatgtccgtatacttcaacaggcttcagaagcacaaagtgagctgattaatggggaaggcaatgtattgggaatggctccgggccacactttcacactctctctgcctaatagtatcaaaggggatgattacaatgattatctgattaccggggaacaatattcattttatgaatccgattatggctcagtctttgagtatgatagtgatgacgatgatagtgatgatgataaccctgacaaaaatattgttcagtttgaagctatcccctccaatgtccattggaaaccacaagccatcacgctctggccaaaagcaaccggtgttgaaactgcggtcgtaacaggccctaaaaataaaccgatatggactgataagtatggccggataaaagtgaaattccgttgggataaaacagataaaaaagacgataccagttcctgctggatacgtgtggcaacgcgttgggcgggctggcgttacggcagtatcaacgttccccgtgtgggagaagaagttgttatcagttttgtcaatggcgacccggataaaccttttgttatcggtagtacttataacaatgaaaatatgccaccgtgggaacttcccaaacatgaaactcgcagtggtgtgatgtcaaataccaaaaatggtaagcatgatcaggctaactatctttttatggatgatgaaccggataaggagttatttgatctgcacgcagagcgggatatgaatatctccgttgaaaaagataagacagtcaaaattgatgggaagcgtactacggaaattaaaaaagaacaaacagacacggtgacaggtaaagcgaatttcacctacaaagataatcgggatacgactgtcaacggcaaagataccttaacgattgataaagggcagcaacgaaccattaaaaaagggcgaaacaccgaaatcgatggtggagatacttacaaactcacaggcaatttaactgccaaaattgatggaaactggactcaaaatattaccggaacaacgctaatcaacagccctagtctcattacactcaaaagtgatactaatattgtgatggattgcccaacgtctatattttcttccagtatcggtaaaataagtgccacaggatttagtatttctgccacgggttttagtgcatccaccactcacactagtgtctcagccaatgagcttgttacatccatcacaggaatttccgtcggtgttactgtaatcaatctaagtaaaacaggcgtaaatattacaaaaaatgatgtcaatgtagccgcaaacgcacttgctgttgcacaatcaaacatccgactcattgcttcctccctacatttgtttgtctgataatttaacagtcaatacttcaatgaaaatcatcaaaccactacgcttaagtatgctttatcggccttatcgctggatgcagaaaaatcatctcggcgtcactgttatggctctggtcgatatgggattagctccccgtctgcggcctgagcctgaactttggcaactggcagaaaaagaactgaaaacctgtaatggtattattgaccttgccatgcctaaatccctacccgaatttctggcgacaggttatgcctatacccatcatcagactgataaaaccgcctgtaatgtgcgtattaaagttgatcaattagaaaaaaaactggctgtttttggtgatcgttactggttgggtgatacttcttcaaaacctcaggcttttgaacaaatgcgactggactggagccgggcttttggaggggaaggttatgatgataacccacacggcattggcttcacgccggaaatactggaaaacggcaataaaattcatcggttacctaatattgaagctttccataagcaattgttatccccggaagatacccctgaacctgccagtttttgcccactggattttacatggccacgccggtttgaacgcatcggtaagcaatatgataaggaatggctggaaaacgaatttccgggatatgcccatgatattgactggcggttatttaatgccgcaccacaggatcagtggtgggagcaactgcctgccctgccggttaaagctgcatggcggattgagaacatgcaccccaaaaaaccggtgcaggaaggccgtctgccagcatggaatgtgcgatgttttatcaaacggttacgtcttaatgaagagattgacgaagaaattgttatgcgccagacaaccgtatggtttttccctcatctggagcaaatgctcctgatatggcacggaagtacacgaataaatgaagatgatgcagccgatgtcttacagatgatatccgcactggaacaacaggatagcccgctacccgccagtcattatctggaaattgccagacagcgcatggacaaagaaaaaggtgtgttatacacgttcagggaaaaagatcttattcctgagggcattatcggcccctggatagatacagagtcctcagtagaaagcagcccgatacaggaatcggtacttaggcgtcaaaagctcctccatgaacagcaagcagcgcgtttagctgaacagggttatgatatcaatacaatgatcccacccacttctccggtcacagtaccttcaaccagtccccgactggatgaactaccagaattcatggaaaaaatcgaacaggaggccgctcaaagaaaagccgaagccgagctgaaacaaacagagataactgccaaagcaaaagaacagggtatcgatacgtatttatctcttccggagagtaataccaaaggcccggaaggaatttattcaacacgggatatattacgtaagcaacagcagcacaccggattgagcgatcaagaactggcacaaattgaacagtcgctacgtgatacctattttttgacggtgcaatcccagaatcctgctttgcgactgaagggtgagttatcagaaatcatccgaaaacgggcacaaaaaattatggagcaaggtggtaatttcagtggcatggattttactggtgcagatttatccaacatggatctacgtggcgcaaacttttccggcgcattattggaaagtgcctgttttaatcacagccaactggataaagcggatttcagtgaagctatgctggccagagcagaattctgccatacttccctgtctggcgtgaaactggataaagcgaatctggtactggctaaatgtgagcagagtgacttttccaataccgatttcaaagaggttcaattgcaggaagccctatttgatcactgtcaattcaaccactccacattcaccgatcttttactgagacaagtctttattacacattgtgattttcactcttcacaatggaataactgcacactgacagaactggaattacccgctctcagctttaatcacgcaacactgaataaagtcacttttcttaaatgtaaactggaacaagccgtttttgatgaagcacaatgtgaaagttgttcatgggtagaaacggaagtcaatcacatccggttctgttcagccagcctgttgaattgtgcttttgtgatgaacactacacttaatcaggcggattttacacaggcgacactgacagaatgtaatttgcgtcagatgcctctggtgcaagcccgatttcattccgctatgctgaataacagcgatttgagtgaagctgactgtcggtcagccgatatgcaacatctgaatgcaacaaaaagtattttcatcagaacggattttcgggaggctctgttgaataatgccaacctgatgggtgctctgatgcagaaatgtagtttgcatggtactgatttacacggtgcgaatttatttcgggccgatatgtctcagtctgtcattgatgattcaacccagtttgaaggcgcctatctgcaaggtatcaaaaccttgcctaaacgcgataaggaagtgatatgaatttactgtcagcagatgaactgatcgcaaaaatcaaacagggtgacatcattgaaaaagtcagtctgacacatatctcactagcccagcgggatttaaccgacggaatattcaaagaagtcgatttctccggtgctgatttttcccacgcctcaactgaaagataccatttttaccgcctgtcagttcaaagaggcaaattttgattntccgcctcttcaaaaagagtgtttttgaaaagtgcagtcctggcgaagtgcccacctttcgataaaagccacataaccaacagcctgtttaatcaatgtgatttaaagaaaacccgctttacagaaacaatacagaacaactctcaatttacctcaagtattctgcaagaagccgatttcaatcacagc

SEQ ID NO: 1805 - DNA, 13198 bp, Xenorhabdus sp.; identical to SEQ ID NO: 1804
  CDS (2309)..(2743)
  unsure (1)..(13198): unsure at all n locations

SEQ ID NO: 1806 - DNA, 13198 bp, Xenorhabdus sp.; identical to SEQ ID NO: 1804
  CDS (2910)..(3836)
  unsure (1)..(13198): unsure at all n locations

SEQ ID NO: 1807 - DNA, 13198 bp, Xenorhabdus sp.; identical to SEQ ID NO: 1804
  CDS (6872)..(7375)
  unsure (1)..(13198): unsure at all n locations

SEQ ID NO: 1808 - DNA, 13198 bp, Xenorhabdus sp.; identical to SEQ ID NO: 1804
  CDS (8030)..(10198)
  unsure (1)..(13198): unsure at all n locations

SEQ ID NO: 1809 - DNA, 13198 bp, Xenorhabdus sp.; identical to SEQ ID NO: 1804
  CDS (10275)..(12800)
  unsure (1)..(13198): unsure at all n locations

SEQ ID NO: 1810 - DNA, 13198 bp, Xenorhabdus sp.
  CDS (8138)..(9121)
  unsure (1)..(13198): unsure at all n locations
gctgtgattgaaatcggcttcttgcagaatacttgaggtaaattgagagttgttctgtattgtttctgtaaagcgggttttctttaaatcacattgattaaacaggctgttggttatgtggcttttatcgaaaggtgggcacttcgccaggactgcacttttcaaaaacactctttttgaagaggcgganaatcaaaatttgcctctttgaactgacaggcggtaaaaatggtatctttcagttgaggcgtgggaaaaatcagcaccggagaaatcgacttctttgaatattccgtcggttaaatcccgctgggctagtgagatatgtgtcagactgactttttcaatgatgtcaccctgtttgatttttgcgatcagttcatctgctgacagtaaattcatatcacttccttatcgcgtttaggcaaggttttgataccttgcagataggcgccttcaaactgggttgaatcatcaatgacagactgagacatatcggcccgaaataaattcgcaccgtgtaaatcagtaccatgcaaactacatttctgcatcagagcacccatcaggttggcattattcaacagagcctcccgaaaatccgttctgatgaaaatactttttgttgcattcagatgttgcatatcggctgaccgacagtcagcttcactcaaatcgctgttattcagcatagcggaatgaaatcgggcttgcaccagaggcatctgacgcaaattacattctgtcagtgtcgcctgtgtaaaatccgcctgattaagtgtagtgttcatcacaaaagcacaattcaacaggctggctgaacagaaccggatgtgattgacttccgtttctacccatgaacaactttcacattgtgcttcatcaaaaacggcttgttccagtttacatttaagaaaagtgactttattcagtgttgcgtgattaaagctgagagcgggtaattccagttctgtcagtgtgcagttattccattgtgaagagtgaaaatcacaatgtgtaataaagacttgtctcagtaaaagatcggtgaatgtggagtggttgaattgacagtgatcaaatagggcttcctgcaattgaacctctttgaaatcggtattggaaaagtcactctgctcacatttagccagtaccagattcgctttatccagtttcacgccagacagggaagtatggcagaattctgctctggccagcatagcttcactgaaatccgctttatccagttggctgtgattaaaacaggcactttccaataatgcgccggaaaagtttgcgccacgtagatccatgttggataaatctgcaccagtaaaatccatgccactgaaattaccaccttgctccataattttttgtgcccgttttcggatgatttctgataactcacccttcagtcgcaaagcaggattctgggattgcaccgtcaaaaaataggtatcacgtagcgactgttcaatttgtgccagttcttgatcgctcaatccggtgtgctgctgttgcttacgtaatatatcccgtgttgaataaattccttccgggcctttggtattactctccggaagagataaatacgtatcgataccctgttcttttgctttggcagttatctctgtttgtttcagctcggcttcggcttttctttgagcggcctcctgttcgattttttccatgaattctggtagttcatccagtcggggactggttgaaggtactgtgaccggagaagtgggtgggatcattgtattgatatcataaccctgttcagctaaacgcgctgcttgctgttcatggaggagcttttgacgcctaagtaccgattcctgtatcgggctgctttctactgaggactctgtatctatccaggggccgataatgccctcaggaataagatctttttccctgaacgtgtataacacacctttttctttgtccatgcgctgtctggcaatttccagataatgactggcgggtagcgggctatcctgttgttccagtgcggatatcatctgtaagacatcggctgcatcatcttcatttattcgtgtacttccgtgccatatcaggagcatttgctccagatgagggaaaaaccatacggttgtctggcgcataacaatttcttcgtcaatctcttcattaagacgtaaccgtttgataaaacatcgcacattccatgctggcagacggccttcctgcaccggttttttggggtgcatgttctcaatccgccatgcagctttaaccggcagggcaggcagttgctcccaccactgatcctgtggtgcggcattaaataaccgccagtcaatatcatgggcatatcccggaaattcgttttccagccattccttatcatattgcttaccgatgcgttcaaaccggcgtggccatgtaaaatccagtgggcaaaaactggcaggttcaggggtatcttccggggataacaattgcttatggaaagcttcaatattaggtaaccgatgaattttattgccgttttccagtatttccggcgtgaagccaatgccgtgtgggttatcatcataaccttcccctccaaaagcccggctccagtccagtcgcatttgttcaaaagcctgaggttttgaagaagtatcacccaaccagtaacgatcaccaaaaacagccagttttttttctaattgatcaactttaatacgcacattacaggcggttttatcagtctgatgatgggtataggcataacctgtcgccagaaattcgggtagggatttaggcatggcaaggtcaataataccattacaggttttcagttctttttctgccagttgccaaagttcaggctcaggccgcagacggggagctaatcccatatcgaccagagccataacagtgacgccgagatgatttttctgcatccagcgataaggccgataaagcatacttaagcgtagtggtttgatgattttcattgaagtattgactgttaaattatcagacaaacaaatgtagggaggaagcaatgagtcggatgtttgattgtgcaacagcaagtgcgtttgcggctacattgacatcattttttgtaatatttacgcctgttttacttagattgattacagtaacaccgacggaaattcctgtgatggatgtaacaagctcattggctgagacactagtgtgagtggtggatgcactaaaacccgtggcagaaatactaaatcctgtggcacttattttaccgatactggaagaaaatatagacgttgggcaatccatcacaatattagtatcacttttgagtgtaatgagactagggctgttgattagcgttgttccggtaatattttgagtccagtttccatcaattttggcagttaaattgcctgtgagtttgtaagtatctccaccatcgatttcggtgtttcgcccttttttaatggttcgttgctgccctttatcaatcgttaaggtatctttgccgttgacagtcgtatcccgattatctttgtaggtgaaattcgctttacctgtcaccgtgtctgtttgttcttttttaatttccgtagtacgcttcccatcaattttgactgtcttatctttttcaacggagatattcatatcccgctctgcgtgcagatcaaataactccttatccggttcatcatccataaaaagatagttagcctgatcatgcttaccatttttggtatttgacatcacaccactgcgagtttcatgtttgggaagttcccacggtggcatattttcattgttataagtactaccgataacaaaaggtttatccgggtcgccattgacaaaactgataacaacttcttctcccacacggggaacgttgatactgccgtaacgccagcccgcccaacgcgttgccacacgtatccagcaggaactggtatcgtcttttttatctgttttatcccaacggaatttcacttttatccggccatacttatcagtccatatcggtttatttttagggcctgttacgaccgcagtttcaacaccggttgcttttggccagagcgtgatggcttgtggtttccaatggacattggaggggatagcttcaaactgaacaatatttttgtcagggttatcatcatcactatcatcgtcatcactatcatactcaaagactgagccataatcggattcataaaatgaatattgttccccggtaatcagataatcattgtaatcatcccctttgatactattaggcagagagagtgtgaaagtgtggcccggagccattcccaatacattgccttccccattaatcagctcactttgtgcttctgaagcctgttgaagtatacggacataaaattgcccctggtcaccttttataaagcgtcccggccacataaatatctctgtactatcaacagaactgagcgatgtttgagtgagagactgtaatttagcccggggtttacgaaaatcgtagtcatcagtactgaaactgttggggatagtcgaactgctaatattccaagtatagatatattcttggtccagtttcctgaatatgctaccgacactgaaatatttaatcgtgtcataccccggcattggataatgcatttggggcatatcgactaataccatagtgtggttgccattctcatgtttaaagtaataataaataccttcatgcgccattagacgatgaataaaatcgaaatcagtttcgttatatttaacgcaatattcccatgggcgataattttctatgagattatcttcaaaattaatattggcaccctgtaatactgtagtgacaatctcaggtacggttttttcctgccagatgctataaccggatttcttttttagttccgaaagcttaggccttactgtagcagtatataaataaagcctgtcatcatatttataaaatggcgaataagaaattttttctatataaccacttaaatatcttgtttgttttgatggggtttttatttctacggtgagtacagtattatgaagagatatagggtcagataatctatttttacttagtaattcgatctcaaattcataaggttccgataatctttctattcctttaagtgatttaaagtataactcttcgccggatgaagtatgtgcgataaactgtctttccataatatggactcgcttttatgcaaagctaccgcctattccggctggatgcgggaatatatgatagctggtggaacttactgttgtgaggcattctcggatatataagtatatagctgttggtttctgatattgagttaagcacaatagtcagaatgtgtaatcaccagaggatggtttatttaaggaatatataacttgcgtttataatttaccttgatataaagatatcactttatgcattgttttgtttttgttgtgtaaaataatcctatattacttaaataggaaattataagtaactatattaaattaatgagttataccggggtaaacttttttctaataccataaaatatggttaattaaattaagctgatgtatctatatttaagataattttaaaaagaaaaattactgataatttttttatcgtttaacttaatgtgttatatctaataaataaaaagataaagttaacaaagtgataaatttgaaggcgacgagagcgatggatgagtgtaataggctgctattatctgtttggattatatttaatatattttaaaataagaatagagagaggaagtgaggaaaggaaagataaaattggcggtaacaacataataattaccgccagaagttctttataacgaattatttcagtgctgctaatgcgctgtcataatcaggctcgttagtaatttcatctacgagctggctataaataacattattgttttcatccagaacaatgacagcacgtgcagtcaatccacctaatggaccctggctaatggctacaccgtaattttcctgaaactcaccaccacgcagtgttgatagagtgacaacattcgaaaggccttcagagccacaaaaacgggattgtgcaaaaggcaggtcggctgaaatgcaaagtacgacagtattgttcagttcaccggcatgttggttgaatttacgtacagaagttgcacaaacgccggtgtcaatgcttgggaatatattgagtaccttacgtttccctacatactggctcagtgccacgtcagtaagatctttagctaccagcgtaaattcttttgctgtttcacctgcttgtggaaaatgcccagctacggtgatatcgctaccttggaacttgacggtttgtgtcatggttttatccctctatataagtaaactgcggtgccagtgtaatggaatagtgcgatcttgcccacaaaaatagctgtaatatttataaatactcatctattgtttaattaacagtgtcttataatttattttaggataattattagaccaaaagagtaaatatttatgcataattttaccttgttcccttctgtattactgatgacagggctttccttacctctttctgtttatgctgctgatgttcctgtaggaactcagttagaccctcatcaggagctggttcgccatctgaaagatgaaccagcatcacttgacccgattaagtccttcggtttaatagaggcgcaggtgttgcgtgatttactggaaggtctcgtcaatcaggatgcctatggtaagcctgttccgggagttgcgattaactggaagacgacagataacaaaacatggatatttacgctacgacaggatgcccgctggtctaatggtgacaaagtcacggcctctgattttgtatatagctggcagaggttggttaatcctaaaaatgcctcttcattttcttggtttgctgctttggcaggaattcagaatgcccagaaaattatagatggtaaattccccccggaaaaattaggggttgaagctcttgatgcttatacagtaaaagttacgctggatcgcccagtgccttatttccccaatatgactactcacttcagcctttatccggtgaataaacagagcgttgaaaaatacggtaatgactggaccaaagtaggccatttggtgggtaacggcgctttcatgctgacggggcgtgtagtcaatgaaaaaattgttctgtcgcctaacccttattactgggatcacaagaaaacagtactgaagaaagtgacgtttgtaccaatcaatcaggaatctcatgcggttaaccgctatctggcaggggatttggatattactgaatctttccctaagaatatgtaccacaagttactgcatgatatcccgggagaggtgttcactccggatcaactgggaacgtattattacgcatttaatactcagcgggcaccgactaatgatatccgtgtccggcaggcacttgccatgaccatcaataagaatctggttgcagaaaagatattaggcacaggcgaaaaacctgcatggcattttacacctgacgttacagccggttttcatccggaaaaaagtcagcaacagatgataactcagcaggaaagagataggagagcaagattgctgttcaaagaggcgggttatggccctgatcatccgttaaaactttctttgctctataataatttagaaaataatcaacgtattgccattgcagtcagttcagagtggaagaaaaaactgggcgttgaggtgaagttagtcaatcaggaatggaaaacttacgttgataatcgaaataccggtaattttgatgtagtccgggcatcatggaccggagattataatgaaccatcaagtttcttatcacttttgacctcaacgcacagcggaaatctggccaaatttcataactcagcttatgacgctttgttaaaagaggctagtctggaaacagacgatgtcgccagaaacagggattacaatcaggctgaaaaaatgattgaagaacaggctccgattgttcctatttatcagtacactaatggtcggttaatcaaaaaatggttaaaaggatacccgatcaccaatcctgaagatgtggcttatagtcatactatgtatatcattaaaaaacattaaatgttgaacaggagcggatgtggaaacgatttatggctcagcatttaaagattcaaatgctgtgtatgcctgccaattgaacgggaagggtggtactacaggttttagcgaaaatgtatctgcaacggcagggcaaccattctggcagcatcttgattataaaaatcaggcaagttatcaatggattatgaaaactaaccaactaccagttccggtaaaagaagggctggtgggtgagagtattcggcccaaactcattcgtaccggtgaaggggcgatgattatgttgcggacaattaatcgcaatgacaatgcccgctctgatcacttggtatcgtttcgcatctacattaatgaccagataattatttccagtagccatagaaaagtctattcggttgatcaggttctggctgatttaaataatggtgtaggagcaaaaaattcagggcactggctggttgaaatcgccgatgctattaccgacgaagtgaacgattttattgaagagttacatgacaacctgattgagtttgaggataacattctggaacagaagatccccggacgaggtgagttagtgttattacgtaagcaattgattgttcttcgtcggtatatggcaccccagcgagatgttttgacacgactgtccagtgagaagttaccgtggatgagtgacgaggctcgtcatctgattcaggaagtctctgatcgtctcgggcgtgggctggatgatttggatagctgtatcgcaaggacagcggtgcttgccgatgagattacttccattatggcggatgcgatgaaccggcgtatttacatgatgtcgttgttaacaatgatattcttaccaagtacttttttaaccggcttatttggcgttaaccttggcgggatccccggaaataaggatgaatttggttttggtttattcagcctgctgctgtcgttattgatagcggggttcgcatggtggttaaagcgaagtaagtggttatagggaaaattgcgactgtcgtgagttctgaaccgaatgttcattgaatctgatggttaatttcattcggatttgagatatatcaataatcagtatctcaagttgaggcactataaccctgcaggtgaatactgagcgatgaacgttgtgctccatgattgtagtgtttctcatattgagttttataccgattaaaattgacattatgccgatactaaaatccttagcatcggctatttttttattactttatttcgataatatccagccgatccgcctgaaaatcaatttgctcatcagggtcaatagcaggttgtacgggtaactcttcccgatcaaaagccagatcccctccaccaataatttcactgtcgtgattaatgcttttgaagtcgaacagattaaaatcgctgagatgtgatggaaccacgttctgtaccgcccggaacatagtttcaatacgtccgggatagcgtttgtcccagtcacgcagcatatccttgataacctgacgttgcaggtttggctgtgatccacacaaattacaagggataatgggaaatgctttcgcttctgcgtagcgttcgatatctttttcccggcagtaagccagcgggcgtataacaatgtgtttaccatcatcactgatcagtttaggtggcataccttttaatttgccgccgtaaaacatattcagaaaaacagtttgcaggatatcatcacgatgatgccccagagcgattttggttgcgcccagttcagtagcggtgcggtataaaataccacggcgtagtcgggagcacagagagcaggttgtttttccttccgggattttttctttgacaataccataggtattttcttcaacaatcttatactcgacgcccagttcatccagataagccggaaggatgtgctcaggaaaacctggttgtttttgatccagattgacggcaataagcgaaaaattaattggggcacttttttgcaggttctgcaaaatagacagcagagtgtagctgtctttgccaccagaaaggcagaccataatgcgatcgccttcttcgatcatattaaaatctgcaatggcttgcccgacatcacgacgcaagcgcttttgtaatttattaaaattatactgttctttttgagtattcatttctggttgttctttattgtttctgatggctgttcgactaaaggcccttaaaaaattacgatgattttatggcggagaacatgaaaaggaaacaataatagcggataggaagggattatcaattagagttagcgaaaaaggctgctttccctacacaggaaagacagcctttttgttcttaatacttatatttcagccggaaaaactggctgatcagaaccagaacgcccactaataaataagcagcaaaaacaccaatcagccattgcggcatatccagtgtcagaaatgaccattgttttattgaacaatcgccaaaagcctgaaacaccgaaggcagccattcatttaacggcagccatgacggaaatctgacaaaaaattcacaggtattaaaagggctggggtataactgcatcatggtatgatcccatgccagttgtaatccgtgccatgagctataaagccagagtaaaatagccagccagcgcagcggggttttgggggcgatagctcccagcagggctgccccgaaaataccgaacagagcaacacgctcataaatgcacattacacagggttgtaactgcataacatgttgaaagtaaagagcaacaaaactccagtaaaagagcagttaacgccattaacaaccatgcgcttcgcccttgggaactccattttagaaaatgtaacattcttcttcttcccgtatcgtatatataggtagccgattattctgccgtttcttaaatcacaaaagaatcaatttaaggtcagttgtgttgtttttttaaattatacccatcctctttcaaattgcttttttgttgacggtgcaaattcgttcctttgccgccggaggcaacatgaaatcgattgggtattcgaagggataaaaaaaccggatagggggattttacaccctatccggcagaattccttaataataaatataagggattattgtgggataacccagccaagttttaccagatattcagtagcaggcagtagccaaaattcaacacacagcagacccacaagggtcatcacaattgtgtaaggtagagccattagcaccatacgcccataagacaggcggatcagaggcgatagtgcagatgtcagcaggaacaggaaagcagcctgtccgtttggtgtcgcgactgatggcaggttggtccctgtattaatggctacagctaaaaactcatattgctgctgcgaaataagaccacttttaagcgcagtcagagcttcattaatataaacagtacctacaaatacgttgtcagatactgcggaaagcagaccattaaacagataaaacagggaaagctgtgacgctggtgaggattgcaatacaaactgaataaatggggtaaatagttgttgatcaataatgaccgcaacaacagaaaagaagacagtcagtaatgcagtaaacggtaaggcttcctcaaaggctttacctaaagcatgttcttccgtgataccacaaaaagcagtagccataataatcactgacaggccaatcaaaccgacttcagctaggtggaatgccaaagccacaatcagccagatgccgattaaagcctgaacaacaagctgagctttttcctgacgggtacgtttttcaccggcttttttcgcatagtcttccaaaacagagcggacacgctcaggtagttcggcaccgtaaccaaacagtttgaaatgttcaaccaacagacaaaccagtagcccgcagataaaaacaggtacggtgacaggagacatacggataaagaatgtcacgaaatcccagccaacgtgttttgcgatgatcaggttttgtggttcaccgaccatcgtcatcacaccacctaatgctgtaccgactccggcatgcatcatcaggctgcgcagaaatgcccggaattgatccagtgtttgtcttttatcttcactatcaataaattgatcatcgttaagatctgtactgccattattctggctagaaagataacgatgataaatagaataaaagccaacagatacgctgataacaacagctataactgtcagggcatcaagaaaagcagataagaatgcactcgccagacagaaggccagtgccagcatttttttggaacgaatgctcaagagtagtttagtgaaaacaaatagcagaagttgcttcatgaagtaaataccggcaaccatgaaaatcagcagtaggataacttccagattattgctgatttcatgccctatctgttttggtgaggtcatgccgataagcaccgcctcaatagcaagtaagcctcccggttgcaatggatagcattttaacgccattgccagtgtgaagataaattccacaacgagcatccagcctgcaacgaaggggctgacatagaaaaaaaccagtggattgatgataagaaaaacaatgatagccaatttgtaccaatccggcgaattgccgagaaagtttttcaccactgcacgtcggatactgatttccattattattaatattcctcttctgtggatacatgggacatttctaaagcacaacatacccgttgtttttccagttacctctctgttggttacgctcgcttattccagtcatccagtcatatagcgattatccctctgggagacgcttcccgaccgtcttgatgcaactcgaaatacatagagtatcgtacgctctaactggtggtaatttaaggggataatctcataattaattgggtaataattatatttttttatgacctctttcactctttcatggtttatttattatgtaactatgtcgatctggcgcattctggtatgatcagtacctattattagccaagaaaacagttttggaatagtttaaatatggtaattaaggatcaagagtcctgcgctttacagca

SEQ ID NO: 1811 - DNA, 13198 bp, Xenorhabdus sp.; identical to SEQ ID NO: 1810
  CDS (6487)..(8118)
  unsure (1)..(13198): unsure at all n locations

SEQ ID NO: 1812 - DNA, 7584 bp, Xenorhabdus sp.
  CDS (723)..(1835)
gtgctctaaagaggttctggcgaaatttcctgtccgggcaggctgttgttcatcacaagagccatcatttgcggataaaattgccagaatagtgtttcaaaatcagaataatgctcttcgatatcctgataagaacctgccagtgcggataatttagggcgtctgcgtgccattccctgtagcacattggcaatacatgtcaggtcagcgtaacggataagcagattttgtgaccagagatattgattcagttcctgaaatttttcaggggtaacactgaggtgaggctctatttgattgcgcgctagctgcacaaactcaggcaaggagtaattcttttcgagtttgttccagtgtttggacaggaaatgatcccagatgatatcaagggttataggcgctacgcgccgatattcgctacgaaatagagtccgggcttcggtgaccagcggatgactgtctgtcaggctgtctatcctgcgatgaagacgaatgccagagacaacatcaggggcgaaccggccttccggggctccacggacaaaatccgccattaaattacccagcagagagctttcagatagtgtagctaaatggaggtgtgcgagaaaattcatggtgagagtataacgcaaatagttaaactaatatgcttctttcttgcaccattgcccgtgcagcactagactagtccgcctgtttttttgaatgatacagataaaatgcgtgtcgctgattttacatttgaactgccagaagagttaattgctcattatccccaaccacagcgcagtggctgccgtttgctctctcttgatggggaaacgggggagctgactcacggtatttttactgatgtgctgaataaactggaagcaggtgatctgctggttttcaataacacccgggttattcctgcccgcctgtttggccgtaaggcaacaggtggcaaattggaagttttggtcgaaaggatgttggatgataagcgagtactcgctcacgttcgtgcatccaaggctccaaaagagggcactgaactgatcctcggcgaagataaagcgcctgatggtaatcagatcgttaaggctaccatgctggcccgccacgatgctttatttgagattcgtttcgatgatgagcgtgatgtattgaccattctggatgaaatcggtcatatgccattgccgccttatattgcccgtcctgatgaagaatcagataaggaattataccagacggtgtacaatgagcgcccgggcgccgttgctgcaccgactgccggattgcactttgatgagccgcttttggctgccttacgtgaaaaaggtatcgaaatggcgtttgtcacactgcatgtcggggcgggaacttttcagccggtgcgtgtagataccatcgaagaccatataatgcatgctgaatatgcagaagtaccgcaaaatgttgttgatgcagtactggcatgtaaggcccgtggcaataaagttgtggcggtggggacaacatccgtccgttcactggagagtgctgccagagcctgtcaggatgggctgattgcgccgttttttgatgacacccaaatttttatctatccgggatttgaatatcaggttgttgacaccctgattaccaatttacatttgccggaatcgactttaatcatgttggtttctgcatttgcgggttataaaaataccatgagcgcttataaggaagcagtaactgaaaagtatcgcttctttagttatggtgatgcgatgtttattaatcgcaactcaatagctgcaaaagagatggtagaggttgccactgatattgatcaatcagaatagatggattgagggaatgattaacccgcaggaaattgcgggttaaatggttactcataattaagcagctctgactatataattgaaggcgatgttgcggggacgagtttcttttcctgttgagttagcaaccgcattatccatataaccatagccaccagatcccattcctatggcaatgcctaatcctctggggtcagcgccatagttaatgtttttttgaacgctgttaaaaatggcgttccctgtacctaaattctcagcactcgcagtggatctagaccacatgcggtgaattctgtggttatgtggagcaatatctgctgattgatgagaaagcaaatgccggccagcatccactcctcggctattatcccagccgcgaataaactctccccgcaaatcgggtagcacaccagatggataagcaagagcaagtttcgggtatcttacaggatcaaatgagtcaccgttacatatcagccaaccctctggtggcgttgctgttggccaaggtacgggaacgccagcaggtaaggataattcttccattaatgtttctattccaaggtttttaacaaactcttttttgtccggtatgtcagccccgttctggttctttgctaagcgagtattagcattgtcatttgcgctattagcgacattgttcgcattatctgcgttattgtttgctgtatttgccaaatcataggcagttttaaccgcttttggtgttgctgccatagtctcgttatcactgccagtatcattactcagaatagtaaaacctttatcttgcagcgtggcatctggatgattgcggctttgagcgtgttctgcaatcgcttttttgacatattccggtgttgtaacgacagcaaggttactatcttctgaaacaaggacgtcaggtttttgattttgcataatcattccctcatttaatcaacaatacacattgccaagtaacataaaggcgttggaagacttctccgccagtgaatatcaataacgtggtttatcgatactgaaataactgtcttaaacgatatttgataggttgcatgttttgttgcaggatgacatacaatgacaggcgagtaattaatcaaatttatcaaataactgatggggttggtggaaggttcattgctggtttattggtgttttttatttttatcagaaacattggtggcactttattaatgtaggctgacaccattgatattggattaaaatcattcaattcagataagccgcttcatgctgtttttttgaaccttcagggccgaagctatatcagaaggttagcaaaaaggtggggcgcatttggcacacaaaaatttcctaatatccttcaaacttttttaatgatgtgtcaactttgacaaaattgtgtcacaaggaagtaggaatgacacaaaaattcgcaaatattgacataccgtatatcacaaggctggcgtgtacagtggcgtcattagtgtttagaatgcatcattttatgtcaaacatcagactgtttttctgatgtctggaggttaagtgaaatttgagttacaaaaaacggatgggcatgcccgccgtggccgtctgatttttgatcgtggtgtagtggaaacacctgcctttatgccagtgggaacttacggcacagttaaaggtatgacaccggaagaggttaaagatacaggagcacaaatcctgctgggcaatactttccatctttggttgcgtccgggtcaggaaattatgaaactgcatggagatttgcatgattttatgcagtggcacggcccaattctgactgactcaggcggttttcaggtcttcagcctcggtgctatgcgtaagattaaggaagaaggtgttcatttccgtaatcctatcaacggaacgcctgttttcctcagcccggaaaaatcaatggaaatccagcacgatctgggctccgatatcgttatgatttttgatgaatgtacgccatacccagcagactgggattatgccaaacgttctatggaaatgtcactgcgttgggctgcgcgcagtcgccagcgttttgatgagctgggcaataaaaatgcgctgtttggtattattcagggcagtgtctacgaagatttgcgtgatgtatctgtcaaagggctggtggaaatcggttttgacggttatgcagtgggtggtctggctgtaggcgaaccaaaagaagatatgcatcgcattttggaacatgtttgcccacaaattccgcaggataagccacgctatctaatgggtgttggtaagccggaagatttggttgaaggtgttcgtcgcggtattgatatgtttgactgtgttatgccgacccgtaatgcccgaaatggtcatctttttgtgacggaaggtgtgatcaagatccgcaatgcgaagcataaagaagacacatcgtcattagatgagcattgtgactgctatacttgccggaattatagtcgtgcatatctgcatcaccttgatcgttgtaacgaaattcttggtgcaaggctgaatacgatacataatttaaggtattatcagcgtctgatggccggaattcgtcaagccattgaagaagacagactggaacagtttgttgaagagttttatcagcggatcggtaaacccgttccaccgttaaatgtataatttggcgtgactaaccagcctcaatgtgtgtagcatattgggctggtttttgatcgagccactgtcgattttcgatagcaattttttcgataaccaattttcgtaatctgtttgtttgtaaacttttttttcgcaaaataagtgttttcgataacaatgagggatatttgatgagtttttttatttctgaagctgcggcagctgctggcgcaccagcacaagctcagggaaacccatattctctgattatcatgctggttgttttcggcctgattttctatttcatgatcctgcgtccacaacaaaaacgcaccaaagaacataaaaaactgatggattccatctccaagggagatgaagtgctgacttctggtggtttggttggtcgtgtctctaaagtgtctgaaacgggctacgttgttattgccctgaatgacaccacagaaataactgtcaagcgtgatttcgttgctgccattctgccgaaaggtacgatgaaagctatttaattttccgattttcccgaagggaactgccgtgttgaaccgttatcctttgtggaagtatctgatgctgatcgctgcgatcctcatcggtctgctttatgcacttcccaacctttatggtgaggatccggctgtacaaatcactggcgcgcgaggtatcgccgccagtgaaaaaacgctggaccaagtccgtaatgttttagataaagatcatattcagagtaagtccattgcgctggaaaatggggcaatccttgctcgtttcaatagtactgatgttcagctccgcgcccgtgaagcactggtttcggctttgggcgaacaatatgtcgtggcattaaaccttgcgcctgcgacacccgtctggttaagtaaaatcggtgcagagccgatgaaactggggttggatttgcgtggtggggttcacttcctgatggaagtcgatatggacaccgctctgagcaagcttcaggaacagaatattgatagcctgcgttctgaactgcgtgaacagggcattgcttattccactatccacaaggcagaaaattacggtgtagaaattcgtttccgtgataatgatgcccgctctaaagcagaagactacctcgaacctcgtcaccgtgaccttgtattctctactggtaataacagtacgctgaaagcggttatgacagatgagcgtctgcgcgaagcccgctcttatgctgttcagcagaacattacaatcctgcgtaatcgtgttaaccagttaggcgttgctgagcctctggtacagcgtcagggtgcggatcgtattgttgttgaattacctggtattcaggacaccgcccgcgcgaaagaaatccttggtgcaacggcaacactggaattccgtctggtaaacaccaatgttgatcagagtgccattgtatcggggcgtattccgggcgattcagagctgaaatatacccgcgatggcaatcctgttgtgctgtataagcgtgtgatcctgaccggtgaccatatcaccgattcaacctcgagcactgatgagaacggttatccgcaggttaatatctcactggatagcgccggtggtactgcgatgtctaacttcaccaaagataacttacagaagccgatggctaccctgtttgtggagtataaagacagcggtaagaaaaatgctaacggtcgtgcgattctggctaaacatgaagaagtcatcaacgttgcgactattcagtctcgtctgggtaatagtttccgtattacagggattagtaacccgaacgaagcccgtcagctatcgttattgttgcgcgcaggtgctctgattgcaccaattcagattgttgaagagcgtacaatcggtccaactcttggtttgcagaacatcgaacaggggcttgaagcctgtctgtgggggctgatttcctccgtactgttcatggtggtttactaccgtaaattcggtctgatcgcgagtagcgcactgttggcgaacctggtactggttgtcggcgtcatgtctctgttgccgggggcgacactcacgatgccgggtattgccgggatcgtactgactctggccgttgccgtcgatgcgaacgttttgataaacgagcgtattaaagaagagctgcgcaacgggcgtactgtacagcaggcgatacatgaaggctataaaggtgcgttttccagtattattgacgccaacctgacgacgctgattaccgctgtgattttgtatgctgtagggacggggtccatcaaaggctttgcaatcacaaccagtatcggtgtcgcgacgtcaatgttcactgccattgtaggaacacgtgcaatcgtgaacctgctgtatggtggtaagcgcatcaataagctgtcaatttaaggagcacgttgtggcacaggattatactgttgaacaattaaactatgggcgtaaagtcattgactttatgcgctgggacaacgttgcttttactatctcattgctgctgttggttgcttccatcgcgatgatggcaacacgtgggtttaactgggggcttgattttaccggcggtacggtcattgagataaacctgagcaagcccgcagatctggacaagatgcgtgagagtctggcgaaaaatggttttgctgatccacttctgcaaaacttcggcagcagccgtgatgtgatggttcgtatgcctccggcaacaggtaacgcgggtcaggagctgggtaataaaatcatctcggtcattaacgcggatatagataaagacgcggttgttaaacgagttgaatttgtaggcccaagtgtgggaagcgaattagcacagactggggcaatggctctgttggtggcgctgatctgtatcctgatttatgtcggattccgtttcgaatggcgtctggcgctaggggcagttatcgcactggctcatgacgttatcattacattaggtgtattgtcgttattccacattgaaattgacctgaccatcgtcgcatcgttgatgtctgttatcggttattcactgaatgacagtattgtggtttcggatcgtattcgtgagaacttccgtaagatacgtcgt

SEQ ID NO: 1813 - DNA, 7584 bp, Xenorhabdus sp.; identical to SEQ ID NO: 1812
  CDS (3378)..(4502)

SEQ ID NO: 1814 - DNA, 7584 bp, Xenorhabdus sp.; identical to SEQ ID NO: 1812
  CDS (4673)..(5011)

SEQ ID NO: 1815 - DNA, 7584 bp, Xenorhabdus sp.; identical to SEQ ID NO: 1812
  CDS (5040)..(6887)

SEQ ID NO: 1816 - DNA, 7584 bp, Xenorhabdus sp.; identical to SEQ ID NO: 1812
  CDS (6898)..(7584)

SEQ ID NO: 1817 - DNA, 7584 bp, Xenorhabdus sp.; identical to SEQ ID NO: 200
  CDS (6968)..(7579)

SEQ ID NO: 1818 - DNA, 7967 bp, Xenorhabdus sp.
  CDS (1)..(294)
gggtatgctagccagaagcgtgaacgtgtgctgaaggagcagggctatcgtgtgcatattcagagaaaagcggcacgtaataagcccttatcacactgccaaaaaggccgaaataagaaaatagcgaaaactcgggcacgcgtagaacatatctttggctcactctctcagatgggtgaaaaaattattcggacgataggccagctgcgagccaattttgcgatgacgatgaaggcaacctgctatgatttgcaacgtttggtttatttcggaaaatcgggtattcatgctttttaatttcgagatgtgatgaaaaagtgatgcgtttgtttttttcccctgaacaagcaagaaaaagtcatacacaataaggtcagttattggtgagttcaaaattgatcttattttttgtattgagagtttttagaggttccctattgtaattctagctccagaatttcacattttttcttagtctgaggttaaaaacacgccccctatcaggaggcgctatgctgtagttcattttgctcaaatttctttagatagaaggcctaatatttagaatggtggttaaaatgtaagtagattactgaagaggcgccattcgctggctggatttcataggatacctgtgctgtagaatgcagttcatagttgataaactgttccaccgataccgtgaattttcccttcccgaataggtaaggcccgcaggaccatttgccggatgcgatcacggtggtatcacacgctttattattaccttttttgcctatatgtatttgggcgccgggttcgcctatcccggtaatgtcgaaaggtttccggtggaatttagcattctgcttaggcgctgtgatactgattcggttttgggtgatctcatattggcgtgtaacttccgaagttcttttataatggtgtatggtcagatcttctgagtggatttcttgatattgggctgcataaagggagaatattccttcctgttttgccgtcatgactggattatttgggcatacccatttaccgttggcatccactttggtctgacaaatcagtgtatcagatgcagtcggcaggacggtttcttttggcggtagaaacaattttgaactggcgataaggatctgttggccgggagtaccttctccttgaattgatatagcgctatttatccggtaatgagcgtttttttgcggctcagtaatccgtattggcatagtaaagtgccattcgataggtgcaccaattttattcccatccttggtttcctgtatcactaatgtataggcttctcctccgcgtaatttgcttgtgtcaatgtttaatccccaatgaggaatagcaaggcctgcgatggtagaaacggcaccgataacagcaccagaagcagctcctgccagcccggtggccagccctgctgcagctcctgccgccgcactgaatataccgaacaggcttattaacccgccgtctggatcaatcggtggagaattggcgggattatcaatttcaggtttgtcctcatccggctctttttcttccacagtcaccacttccgtattagtcgcaactactttgttgcctttcattaattcggcggtcagttcatacgtgccttcggtgaaagtgacgggtgtccaacatccccagtcaccattatcactgacgacagcatcctcacaaattgtgtccgggaagatgtctgacgtatctccccctgatgccccccgagaaagggtgagtttacgttttctgacgttaactgtttcaccgggaatactggcagttcctgataccgtcgtaacggtatctgagatgttttccgggcttgtaaagttaacgtcaggggctatgatttgaaaatatgcttttgataaggaatctgaaaaaatatgaggttcaatcttgagtccttgagggagaaacctgtccactacctcaatataataaaccccgtttttcaattcaggaggaagcgataaactccattttggaaaatcatgcctttttccaaattcactatattgtattggtatttcggaaaaatatttaccctctttcaatgggatttttacgtagatattcttatcattatcatcgctattacattgaggggtatttgaaggtgaatgattgctttttttcatgcagatagaatattctgaaggtaaaagtatatcatcatttgagagagtataacgttgattatcaccaccaagaccatcgaatttttcattttggatatcagtagatacgatttctgttggtgattccatcttatattctttattaaaagaaggcataagatatccgccttcagattcgaaaaactgaagataccataactttggatcaatcgggtcaacgttctccagtttttgtattgcactgatatataaaaactgttttttgcctgaattaaaatcttcttttgatgcaaatgaatttcttaaatgaaaattatcttcacctcgaggattatttttacaatttgcataataaccgttaaaaatgcaaactagttttgcattgttagcataggttgcgttatattctaatattttcctatatatgcttccttttttattcttgtttggctcaatatttaaaatggaataatcttctggatgtaaactaatgctaactttatcttttatttctttatgtttggattttttggattttttggattttttggatttttttggttttttgtatttttgtactgcatttatataatagttatcatctttacctaaatttttaagattaatattagtatttatactgcatgaccatagtccattctcacctgtttttatcaattcgttattatttaacccggcgcataatttatcctgtgtataatcttctttaccatacttagggttagcgcttaatgtcaatattatttcagaaccagggtcggcgtatccacgtatggtaaagtttttggttagaactattgatttatctgatgggtaaataatactaatttcttgctctgcatttggtattgttgctgttatggtatcactctcccatggtttatcatttccatttaactcttcggctgtaatagtaatttcatattcatgatcttcatgaattatatcagtaaaataagaatcatatgggatattacatttccatttactatcttcgcctaccttacatttagtgcttttttcctctttgtgatcaatggagtaacgaagattgatctcagcagatggacggccaaatccctctacaggtatgctttttctccttttacttaatttttcaccccaatccggattggagatccatattcttttcatttttttagaaaaccaacctcctaggtttcttttgccaataaaattgttatcaagatattttcctgtaacatctgaagcgaaaaaaaatggacgaggtttattgctatctttaagagtatttaatcctgtggatgcaacaccgatgattgtatcatgccaaataaccgggccgccagagtctccaggttgtataattcctggctttaaatctttattttcttttataagaagcccatgatttatttcacgatctacagcattagtgacaatattaacatcagctctccgctgttttttttcagtatttcttacctgatttcctgttattggatcaattcccaaattaccatagccatagacagaagcattataataatttttgtctattttttcattagcttcatcatagtcaaagaaacgacgaacatggccataattatctacatcattagtaggattatctaattttattattgcaaactctgcgatcgcaccttttctctcatagtatggaaaaaattttttatattctgcagtgccaattactttttgtttataatttacaatcgaatatgttttaatgattttaccgtcaccctggcaatgtgctgctgttaaaacatagcttggagagatcaacgaaccactacatgaacccatttttattccttgtctattttgcttaaggataattacaacccaaggtttgcatttactatttttactatcaatacagctttcttctcctcccgcaattgtttctattgggtgagggttcaatacagtatctgagaatacatttatactgtaagataataatgagagggtgaaaaatactttaaatatcatcataacagcctcctgaatgggagattaattatttttttcaatacaagtcatatggtcattacctccagtacattccagtgttttatctttccttgctggataattttcattatcagatgtttcatgaatagtaaaaagatacacccctcgtttagcataatattcattgtctgaacaccaatttcctttttcatcaggaatgatttcttccgattttacaccgtcagaaaatattattattttagggtgaagagtttctttgaattcactgatttttttatcattattaggtaaggaagttccataaatgtggataaatacatcatcgatgatttcatattttacagagaaatcttttgatttcagtatagtgacttcgtcattgctatttttaatgggaacatttggtgttcctgtatttttagttttgatttttataaaaccggcaggagcattactaattttagtttgccagctatttccaatgcgagaaagaattgggagagaatgttcaccatttgaatagtagtttgcaatgacatcgagcggtgttttttccgttactttcccttcaattacaatctgtttaggattgtcgtctgttgaagtaataaattcatgcataacaggttttgtgatttttaccggacaacgtgcgacaccaaatttaatttctttttttccggggagattattgtcatatttcctattctggttaaaaatcacagatgctttatagtaattaaaacattttgcggttaaacctttaatgctccatgtgccggaattaagatcaacatcaggtgtatattctttcgttggttcagaagtatgagtgtaatcaggatcatcaaaactagaaattgacactttaatttttttagcatcatttagaattttagtatgaattaaaccggatatgtcatattttccatcgggtataatttgagaatccttcattgacgttatggttgcaccacatggtggtcctttaataataattcctgaattttcaataccttcaatactaatttttctgggaattagttcgcagtttatccagacttttgcccgccattgagtcctttttccttctataagctcaactttatatttattttggtcaaaattagtgacaagataaggtaacgattcatctttcataagaccctgtcccataatagtgatataattattttgggcttgctcttgcggatcagtggaagtaatttttggtggtgtgaaaacataatcatccttgatatctatattcatactatagccatcctcaaccaaaatcccatgatttaaacagtcatagtcttttttgcaagtagcgctgatttcaagattacaatagcctattgtattaaccgaactaagccatggtccaaaaagtgattctgaatatattaataattgtaaatcacatgttttatatagttgaaagttatgataggtagttgcagtccattccacgaatttattttcactatggcagctacctattgtattgtaatctacgatgttttcactataactttgtccacttttcaaattgatatattcagatccatgatttttcatgcagctatcattaataacgcgaatttttaactcaccatatttactactgtttttaaaggttaatttatatcttgatgaaaaaatgtttggatttttttttgaatttctattctcgtaatttggaatgaaagaatggtttgttaagttatttgcatagcctctactaagacagggaaataatatggatagtgttattatatataaatttaatttattttcatataaaaaccttaaatgaaaaatgtatcaccatgatagtaagtttaatatttaaatctatcggtattttttattaaatataatttattaaaaaatgtaataggatatattgtggaaaatctggaaccagccaattccatcaaaggaaaaagggcctatacttaagtatggtaaagcattccaataatgtccaaatttggaattattttttatattcctttatatatcagtgtgtcctaattggctttggtcaactatcccacagatgtaaattgtgagcgtaccaactacaatattcgatcaggattacatgtgagtaatttcattccatcctttcagtatgtgaaagttatcaatgcattgcagagatatctggtcataaaaacattagtgggatttttagaagttcaatcttttatttgatgaatcgaattactggaatagtatttggagatgtattcaatttgttgatgggtatcaaatatagtaatgacattcaatgaatgtgccaataattttatcgtgcagttcggatgatttagaataaccgagtgtcttacgattgagttgcttaattcgggtgcgtaaagttaaattttctcattcaatacgtagggtaaaactctttccgacaagatgttggttttctggtaacagattgtatgccttgaaattatcggtacaccagaatacaacattaaacgaggcaagctttttgagcagtttcctaagtgtttttttgcttctttttccaaacgtatgagcaatgatccgtttcagacgaggctcccaagcataccataaccaacgttggcactttttatttccaacgaatgatcacatcccgtcaacttcacagataagctgaacttctactttatccagcgaaagagttgttacgcatcgggattgaagtttttaaagtgcgaacaacggcattgatgctgatatgtaatgcgcgggcagtatcactaataccggcgttgttcatagccagctcaacaaattgttcttttatatcggattggcacgctcgataggcgtattcaagttgaaaggtttgtttacaggaaaaacagcgatagcgttgatgcctcgcatcgcctttaccccactttttaacgaatccagtttgctgacaaaatcgacatttcacttcaaccgtcaccatttaatttctccgaaaaaaggggaattatacacaactaccaacgggttggatgagtgacccatttttgtgagttttcaatttctgtagccacttcatggcagagtatttccgatattactcgttttcttttcctggatttcgtgatttcgcttatctaattctgctaagatatgctctattttttcatcaaaatcaaatgatagacttcctgttcgccaaaacaacgaactactacgtttaaaatcagtctcactgactgattttttaccttttattatgtagttaataataaaagcctgaatttcagtatgtatggaatgtcttttctttccccaaagacatttagtaatatgtaaccgaaaattagtagaacataacgtatttttattgtttataaaatagagtattaatccatctggtttgctctgaggcaatggggtgaattgataggaaataccagcttgctgataacgagcagcgctaagttttaaggatggagaaaatatgatctgtctttcacgatcgattatgataaggtcctgagggattaaaaataaaatgtggataatgaataagataaaaatcaggaactgtccaaaatagataacataatcagaaaaatcaaaataatataaattaaatattccagagtcatactctttatcacgaattagatcatcataatgcaatcgatgataaatgaaattccaaattgggatggaattattatcttctatatcaagtccagctatatatttttcaggagaaaatgaagttgccagatcatttctaagatgaaaactttttcc

SEQ ID NO: 1819 - DNA, 7967 bp, Xenorhabdus sp.; identical to SEQ ID NO: 70
  CDS (810)..(1103)

SEQ ID NO: 1820 - DNA, 7967 bp, Xenorhabdus sp.; identical to SEQ ID NO: 70
  CDS (2608)..(3762)

SEQ ID NO: 1821 - DNA, 7967 bp, Xenorhabdus sp.; identical to SEQ ID NO: 70
  CDS (4636)..(7413)

SEQ ID NO: 1822 - DNA, 668 bp, Xenorhabdus sp.
  CDS (70)..(636)
aatgctgcattctcattcactgccaaatcatgcgatactgtcgactttgtacattcttggagcaatcaggtgactcaaggtattcccgctgtatttttagatcgtgacggcacaattaacatcgatcatgggtatgttcatgaaatagataattttcaattcattgatggcgcgattgaagccatgctggagttgaaaaaaatgggttatgcactggtattagtaacaaaccagtctgggattgcccggaaaatgtttaccgaagatcaattcttgcagttaacagaatggatggattggtcattggcagaccggggtgttgatcttgatggtatctattattgtccgcatcatccagaagcaagcgatgaacactataaaaagacgtgtgattgtcgtaagccacaaccgggtatgttatttgatgcccagaaaacactgcacattaatatggcggcttcttatatggtaggagacaaaatagaagatatgttggcagcgaatgccgccggtgttggaacaaaagtccttgtgcgtacaggaaaaccagtaacaatagaagcagaacagtctgctgatttggttattaatagcctgtcggacctgccaaatgtgataaaaaataggcaaaaatagcctttgggattaaattgtaagcgctctataga

SEQ ID NO: 1823 - DNA, 8621 bp, Xenorhabdus sp.
  CDS (3)..(290)
tgtgccctaaagtgcgcggcattgagattgaagcggatgttgtgttaaaagcaaccaaagttgacggggtctactccgctgatcctgcaaaagatccagaagctgttctttataacaaactcgattatcaggatgtattggagcgtgaactgaaagttatggatcttgctgcctttacactggcccgcgatcataacctgccaatccgtgtcttcaatatgaacaaaccaggtgcacttcgtcgtgttgtaatgggtgaaaatgaaggtacgctgatttctcacgactgatttcttcgtacacagagacatcggtgagatttgacggtatgatcagcgtcctgatgcgccaaatttaatgacacagggtcatagtatgccatactggcatgtatggtctagaaaataaccagttcccaagggtttataacgtgattaatgaaatcaagaaagacgcacaagaccgcatggaaaaaagcgtcgaagcactgaaaaaccaaatcagcaaggtgcgtactggccgtgcttctcctagcctgctggatggcatcagcatcgaatattatggcgcagcgactccattgcgtcagattgcgaacgttgttgctgaagatgcacgtactttagcgatcacagtatttgatcgttctatgactccggctgttgaaaaagcgattatggcttctgatttgggtctgaacccatcttctgccggaaccattattcgtgttcctctgcctccactgactgaagaacgtcgtaaagatttgatcaaagtggttcgtggtgatgcagagcagggacgtgtatctatccgtaatatccgccgcgatgctaacgataaagttaaagcactgctgaaagataaagaaatcagcgaagatgaagaacgtcgttcacaggacgatattcagaaactgactgataccttcattaaaaagattgatgaagcactggcgaacaaagaaacagagttgatggaattctaattgccatttctctgctatgcctggttgattccgggttgtttctcagtcaataaagaggcagcttgaaagacaacgggcataacttaacgccgcagccctgcggcgttattcttatcatttaatattatcaatattacatttcgtatcacatttctttctcaggcaatggacatagcgatcaggacagatcaaactattgcgatattatgtcagtagaatactcagagtattaatatgaaacgcttaactatcctcggctcaacggggtccatcgggacaagtacactctcagttgtcagaaagaacccagataaattccgtgttgtggcacttgttgccgggaaaaatagtggagtcatggcacaacagtgtctggaatttcagcctcagtatgccgcaatggccgatgagcattccgcaacagaattgcggcggttattgcaggaacagggctgtcagactgaagttctggcaggaaaagaggctatctgtgatttagccgcgctggaagatgtcgatcaggttatgtctgcgattgttggtatcgcagggttactgccaacactggcggctatccgtaaaggtaagcaggttctgctggccaacaaagaatcgcttattaccagcgggcgtttatttatggaggcagttaatcaatataaggcgcaattgttgccgattgatagcgaacataatgccatttttcagagtttacctgagtcagtccagcacaatcttggtaatgcaacattaaaagatcatggcatttccagtattattctgaccggatctggcggcccattccgtaaaacaccgctggaaaaattctcttctgtcacccccgatgaagcttgcgctcacccaatctggtcaatgggacgtaaaatttccgttgattctgcaacaatgatgaataaagggctggaatatattgaagcccgccatctgttcaacgcttctgctgatgaaatagaagttctgctgcacccgcaatccgttatccactcaatggtgcgttatcaggatggcagtatcattgcacagttgggcacacaggatatgtgtacgccaattgcttatagcatggcttatcccaatcgcattgagtctggcgctaaaccgctggattttaatgaactcagcacactgactttcgaagctctggattatcgtcgttatccctgcctcaaactggcgattgatgcctgtcatgaaggtcaggcagcaacaacggcattgaatgccgctaatgaagaaacagtgagtgccttcttgcagaatcagatccgtttcactgatattgcggtgatgaatcggcaggttgtagagaaattaaatttgcctgaacctcaaagcattgaagaggtcttagaaatcgaccatatagcaagaactctggcgaaagaggcaattggcgcctttactaactagcgaattttgttaataagtatatgtttgtttgcattttggcaaatgatatagttcgcaggtaaatcgtagttgctataatagccagttcaatatttagcgtattttggtatctgtttttaaaacatgtatcagagataaaggttttcgaccgggtctatgccagaaacagccgtgataattgttggcacggctttttcatgtgtggaaattcttgagctataaagtgtcagcttaattatttaaggattagtttgagtgatatctcctagtgattgtgactcatcgctgtcattacccagacatgttgccatcattatggatggtaatgggcgttgggcaaaaaagcgtgggaagttaagagtttttggtcatcgtgcagggattaaggctgtacgaagtgctgtgagcttttcggttaaaaataatatcgaatcactgacattatatgctttcagtagcgaaaactggaatcgtccacaacaagaagtcagttcattaatggaactgtttgtttttgctctcgataatgaagtgaagagcttacataagcacaatgtgaaattgtctgttattggtgatattagtcggttcagctcacggttgcaggagcgtatccgccgttcagttgagttgacggcgggcaataccggattgcagcttaatattgctgccaattatggcggtcgttgggatttaattcagagtgtcagacaggttgctgaaaaagtcagggcaaatcagcttgaacctgaagacattactgaatcaacagtaagcagttttatgagcctgagtcagcagtctgatgttgatttagtgatcagaaccgggggcgagcatcgtatcagtaatttcctgttatggcagatagcttatgcagaattatattttaccgatatactttggcctgattttgatgaaacagcctttgaaggtgctattcatgcctttattaaacgagaacgccgttttggcggaacgccagacgatgccgaagtgggatcataggaggagaacttgctgaagtaccgtcttttaactacgttaatattaattccccttgttgttgcagctctgtttttacttcctccttcagggttcgggctggttgtcattgcagtttcagcacttgctgcatgggaatgggggcaatttgccggattattcacacagtccaaacgcatagcactggcagtattgtgtgctgctgggctgcttgctttacaacattctttggccgactttactcacctgactgagaaacctcaaattctgtatcttttatgggcaggaatgctctggtgggttgtcgctgtcgtattagttgttgcttatccagcttcagcttctatttggaaatcttccgttatattacgcctactattcggttttctgacgattgtgccattctattgtggaatgatggttctccgtactcaggggtatgaaaataatacctataatggtgcgtggtggctgctgtatgtgatgttgctggtttgggccgctgattcaggggcttatatctttggtcgcacattgggtaaacacaaaatggcacctaaagtatccccgggcaaaaccctcgaagggctggccggagggctgctgacagcggcactgatttcctggttgttcagtaaatttgctccggtcccagtggtgcctgaaaacttgttgctgatttctgctgttgtcgttattgcctctgtttttggtgatctgaccgaaagtatgtttaaacgggaatcgggtattaaagatagcagtcagttgatccctgggcatggcggagtaatggaccgggtggacagtttaacggcggcagtacctgtttttgccgggctggtcatgttagtttcttctggatttggtctctgaaggtacattaatggatattctctggaatctggctgcatttattgttgcattgggagtgcttgttacagtgcatgaatttggtcacttttgggtggccagacggtgtggtatttacgttgagcgtttttctatcgggtttggcaaagcgctttggcgtcgtacagataaacagggaaccgaattcgttattgcccttattcctttgggcggctatgtcaaaatgctcgatgaaagagttgagaccgttgcccctgagcgccgtcatatggcgttcaataacaaaactataggacagcgagcggcagttgtcagtgccgggccaatcgcaaacttcattctggctattgttgcttattggctggtttttgtgatcggcgtcccttccgttcgttcagtgatcctggatgttaagcctgattcgattgcggctcaggcaaatattttgcccggaatggaactaaaagccgttgatggtatcgaaactcctgactggaattcagtaaggctggctttgataagtaaagtcggagaatcttctgtgtcgctggatgtggccccggaggattcttcggaatccattcaaaagacactggatttacggcactgggcttttgatccgtcccggcaggacatcctgctgtctttaggcattatgcccgttattccgtaccctagttctcagatagagaaaatttatcccggctcagcggcggaaaaagcgggtttacaaagcggggacaggatcgttaaagtcgatggccagaacgtagatatttggcactcttttgcatcttacatcaggaagaatccgaatcttcccctgaaacttgatgttgcaagagccggcagtatgatcactctgtcattgatacctgaggctaagaaactttccgatgggcgcgaagagggttttgccggagttgaattgaaaatcattccattggctgatgaatacagaacagttcagcagtatgggcctttctattcggtttatgaagctggagagaaaacctggcaattgatcaagctgaccgtgaatatgattggcaaattgattgtcggggatgtgaaacttgataatttgagtggccctatttctatagccaagggtgctggtgtgtcagcggattctggcttggtgtattatttgatgtttttggcgttaatcagcgtcaatcttgggatcataaacttgttcccgttacctgtactagatggtggacacttgcttttccttgctatcgagaagatcaagggggggccagtttccgagcgtgtacaagacttcagttatcgcattggtgctatattgctggtgttattaatggggcttgcacttttcaatgatttctcccgcttttaggtgggggaccagttaggaaaacgcataacaacgatggcgatgaaaaagttgctcatagcgtcgctgctgttcggcagcgccactgcatacggttcagacggattcgtagttcaggacattcattttgagggtcttcaacgtgtcaccgttggtgcagcattattgaatatgccagttcgcgtaggtgagacagtcagcgatgaagatatcagtcgtatgattcatgccctgttcgcgactggaaactttgaagatgttcgtgtcttgcgtgatggtaattcactggttgttcaggtaaaagaacggccaaccatcgccagtattactttctccggtaacaaggccgtgaaagatggcatgctcaagagtaatcttgaagcatcgcgcgttcgtgttggtgaagcccttgaccgcaccatgctatcgaatatcgaaaagggtctggaagatttttactatagcgtcggtaaatacaacgctacagtgaaggctgttgttacacctcttccccgtaatcgagttgacttgaaacttgttttttctgagggtgtctctgccaaaattcagcaaattaacattgttggcaataaagatttctcaacgagtgaattactcgatagtttccaactcagagatgatgttccgtggtggaatctgacggctgatcagaaatatcagaagcagaaattagaaggtgaccttgagaaattacgtagtttctaccttgatagaggctatgcgcggtttaatattgattcgactcaggtgaatctgacgcctgataaaaaagggatttatattactatcaacgtcactgaaggggatcaatataaaatctcaggtgttgatgttagcggtaatctggcaggttatcaggcccaaataacaaaactgactactattaagccgggttcactgtataacggaacagaagttacccacatagaaacagcaatcaaacagcttcttggccgttatggttatgcttatcctcgtgtcatgacacaacctgaaatcaatgatgccgacaagacggtgaagttgcatatcaatgtggatgccggtaaccgtttttatgtacgtaatattcgtttttctggtaataccaccagtaaagattcagtattgcgtcgcgaaatgcgccagatggaaggggcgtggctgggtagtgacttagttgaatatggcaaagaacgccttaatcgtctgggttattttgaaactgttgatgttgccaccgaacgtgtgccgggtagcccggatcaggttgacgtcatttataaagttaaagaacgtaacacaggcagcatgaacttttctgttggctacggtactgaaagtggcatgagttttcaggtcggcgttcagcaggataactggctgggtacaggtaatgcggttgggatcagtgccagtaagaatgattattcaacttcggctgacttatcgtttactaatccttacttcacggttgacggggtcagtttaggcgggcggatattctatagtgatttccgtgcggatgatgcctcgctttctaattacaccaataaatcatacggtacagatggctcttttggcgttcctctgaatgaaaataactcattatatttccggttaggttacgttcataactcattgtctaacatacgtcctcagttagcgatgtggcgctatatggaaaaaatgcataaaaagccggatttcacggataaaatcaggtttgatgcaaatgacgtaacaatgacagtgggctggagctataacaaccttgaccgtgctttcttcccaacatcaggtgttaaagccggtttggatacaaaagtcacggtgcctggctccgataaccagttctataaagttacgctgaactcttccggttactaccctattgatgatgatcgcacatgggtcatgatgggacgtacccgattgggttatggtggtggcattggtggcaaggagctgccattttatgagaacttttatgccggtggctccaatagcgtccgtggtttccgtcctaacaacattgggccaaaagcggtttaccttggaaaaggcccgggaggccagcctaaggttcactcaagaggttcattccaggatgccgtgggtggtaatgcgatagcagttgccaactttgagctgattacgccaaccccgttcctggatgcaaaatatgctaattctgtacgaacgtctctgtttgtagatgcgggaacagtatgggataccagctggagcaacagttacgctggggtaaattaccctgatttacctgattacggtaaacccaatagaatacgtgtttctactggtatcgcactgcaatggttatcaccattggggcctctatctgtctcttatgcgaagccagtcaaagattacaaaggggatagaacagatcaattccagttcaacatcggtggaacctggtaaaaaaccaatcgttattggtaggaaatcgccttatttattggataaggcgattataaatatcccaacgtgtaaaatggcgtaggtcaaaggagtttatagtgaagaaagtactgtgtgcagtaagccttggtattgcattagcgttttctgccggtgttcaggcagcggacaaaatcgctgttgtgaatattgccgaaattttccaacaattgcctgctcatgaggctgttgcaaaacaattggaaaatgaattcaaaggccgcgtttccgatttacaacgtatggaatctgatttgcagtctaacatccagaaattgcagcgtgatggctcaacaatgaaagcgagcgaccgcgaaaaactggaaaaagacgtaatggctaaacgtgatgagtttgcgaagaaagcacagtctcttgacaacgatagccgtcgccgtcagatggaagagcgcaataagctcgtcaaccgcattcaggatgcagtgaaggttgttgcaggtaaagaaggttatacct

SEQ ID NO: 1824 - DNA, 8621 bp, Xenorhabdus sp.; identical to SEQ ID NO: 1823
  CDS (389)..(988)

SEQ ID NO: 1825 - DNA, 8621 bp, Xenorhabdus sp.; identical to SEQ ID NO: 1823
  CDS (1280)..(2419)

SEQ ID NO: 1826 - DNA, 8621 bp, Xenorhabdus sp.; identical to SEQ ID NO: 1823
  CDS (2717)..(3427)

SEQ ID NO: 1827 - DNA, 8621 bp, Xenorhabdus sp.; identical to SEQ ID NO: 1823
  CDS (3548)..(4300)

SEQ ID NO: 1828 - DNA, 8621 bp, Xenorhabdus sp.; identical to SEQ ID NO: 1823
  CDS (4308)..(5663)

SEQ ID NO: 1829 - DNA, 8621 bp, Xenorhabdus sp.; identical to SEQ ID NO: 1823
  CDS (5697)..(8105)

SEQ ID NO: 1830 - DNA, 8621 bp, Xenorhabdus sp.; identical to SEQ ID NO: 1823
  CDS (8204)..(8620)

SEQ ID NO: 1831 - DNA, 12491 bp, Xenorhabdus sp.
  CDS (5758)..(6276)
  unsure (1)..(12491): unsure at all n locations
gctggggttttgagtgattgcccaatagattgcccgatatgattggctaacgagccggtgaatttgataagccgttttgtacgccgactatcgcccaaatttgcgcgagaaaaagtttcatcagcccattgttctgcgtgagtttggaacattttaccgtacctcaatgaaatcgttattactcagatcggtaaagtggaaaaagattcaaaaaatcccccgattttttatcgggggatttgtgtatgaaagacaggtgcgacgcagggtaataccgatggaaatcaaacgtattatacctttaccctaaaacctgaaatgtggcggatgacgcttaatcaggacagccgcatttaccagcacctttctgtccctgatattttgaagaaattactatcagaacatcgcattaaggcagacagcaaattttatgatagtgccgcttatcacgcaccacgggattatattacccagaagcgggagtcctcctatgaattctggtgccggttggcggcggaagaaggcattattttctggtttgaggaaaaccagatgttctacagtaacagccatctggggatgacagccgggcttccccttcgctataacgcccaaccggacacggatgagacggattctacggtctggcaatggcagtacggcgaatacttgtgcccggatgaatttatccataaagattataattatctgcgcccttcacagccgatgcagaccaaagccacctcagcacaaaacagtcaacactcggtgtttgagagctacgggcgttttcagtggagcacagaaggtcagcctttgggtgaaattcgtcttaaccgattaaatagtgaaagcaaactgggtgaggcccgttccaactgcattaaattgcggccgggtaaaatctttaccctcagtgcgcatccgtcagaccccatgaatgaccgctggcaagtggtgagcgtcacacatcatggccaccagccacaggccgctgggatcgggggcgaaggaacgacattaaccagtgacatgacctttattcccggcgttgatgattggcgacccccgtaccgttacaaaccgctggccgacggtgatgaactggccacggttgtcggtcccgaaggggaagaaatcttcactaatgaactgggagccattaaagtccattttcactggaatcgctacgataaacccggtgatgggtcgtcttgctgggtgcgggtggcacagggctggaacggcaacggttttggttttatggcaatcccccgcatcgggcaggaagtcattgtctcctacctgaacggcgatattgatcgtccgattgtaaccggttgtaactacaatggtcgcaacagtccaccattagatttaccggggcaaaaaacccgcaccaccttcaagacacatacccataaaggcgaaggctttaacgaactgcgctttgaagatgccaaaggcagtgaggaagtttatatccacgctcagaaagatatgaatactaaggtgctgaacaatcggaccacccatgttgacgttgaccataaagagcgtattggtcgtgaccagacattaaccatcgtacgggatcagtttgaagacattcaacgcaaccgtcagacagtcataaaacaggatgatgatgaatcggtttccggtcatcaaacgctgttggttgagaaaaaccaatccaagactattaccggacaacaaagtgtcaaaatcggcaaaagccagttgctggacattgcagacaatcaggaagtacgggtcggtaaacatattgtcctgcaatcccaaagtggccaaatcaccattggtaattcaggcggtcaaatcattatcgatccaacgggagcgattaccatttccggcacatcgatttccatgactgaacatgcggccggaaaagcgggcagtcaggcactgtttgattattccgggcgttatattctgaccaatagcaagaatgggaataaaccactgactaataccctgtaccagattaaaaccccatcgggcattgtgtccgggcgtaccgatgcagccgggcgtaccgccattgtgcaaactcaacaagccgacacactggaattcagcctcccggaagagcagaaaaagaaaaaaaccaagaaattgtaccacgtaggggataaccaacccgtggattacattatggaatttaaggaggaatctaaatgacccaacaattaaaaccaggcggaatgtgtccggctattacttcggtgagttgccgtatggagcagattgagtttccgaaagatgaagacgagtgttatctggtaaaaaaagctgctttagctatttgggcaccaaagatagccatcggtaaaaagggcattttctctctcaaacaggcagcaatgagccagtttattaaaatagaagagaaggtgtatgactggctatggccttataaagctgaagtgactttttatatgagaggatacagaacccctttacctaaactgacgaacaatgcagaaaaaaaagtacgctatggcggtaatcttccccattctgaaagctggtttcccaatttgtctgcaaaagatatcgctaaacacggtatcaccggctttcggcggcccgatattattctggttaaaaatgagcaattacgctggccggggcgtgatgccgaataccttgatggtactgcacatcccgataacctgaagatattgattgaggtgaaatttccgggagactccatgtcagaaggacaaaaaagggattatcctctcattgccactaaagagcgttttggtatttttgtggttgaagataatcgtggttcaaaagaatgggaaaccctttcggaggaagccaaagcggtagaaatggacaatattcgcaagcatgtcgccttatttggccgccttttttcgccggtgggggacggaaataccccacctgtctccttaccgatccctacccagccagaaatagcccggtatacaccaaaaaatctcccgctggtgagtgaaaaaccgtggcaacataaacccgttttcagtatttggatggcattatcgcatgatcaaacggttccaccgttgattatgccacctaatgagtcttcatttgtggaacgtgccaaagaatactatcaccaagctgctcaatgggtggaagagggatttatctataccaaagacatgattgtccatagctgggaatggacatgggacttaacggccagtggatttacttacctgagtgataagacacgtgctgcactggcagcctgcggtgcctggtttcgtgaatcgggtaaatggatagcagacgaaattattgatccggtgacaaaaaaactgagctatgccattcattgggtctgtgagaaaacaggggaaattgttcaccttaccgaagctaaaatcaaggaagccgtagaaacggtgtaccaatatactgacctgacgatagacgcattgaaacaggtcgagtggtatcaaatagccgcagatctcggtgatggtacaattcagttgatggtaaaaataggcgaagaaatcatgaccattattgcagccattatcgttgtcgccgcgatagttttgttggcaggtataattatttgggcaggtagtattgttggtggtgttgcatccgcaatctgggcgactttgacagcggcagcagcaggcattgccgcattaacaacattaacagcagcaactgcctcataaggaataatgattattatgaataaagaagcgtattttgagcatattaaatcacaattaacgggattcaccctgcaaagtgaacgcgatatcacggtgacgcgtttggggctggcaattactttgatcttcaagcaagggtatacacgagaaaaaaaggagcgcattttagcctgctttcgccattttcgggacatgtacggcgacaaattaagattccatacccatgaatttgacgggttaaaaaagtattcagctgaaaatattgcaaaaatagaacagctaattctgaaggcggacaacggcatcttcgttggaaacaaaatatgtggttggtatgtgagtgatgcaaagaaggctaacgatgcacctcagtatattatgcgttatcttgattcatgggaaacagagggcaataacgcaagctcttatttatgtctggtcttaccttgggataccctgactacggacaaaggacaaactgagtttaatgaatggcttgcttttctttgcgaacaactcagtccggatcatggtgaatgtggttacacactggtgttgcctcgggactatgaggaatatatgcctcaagagtatcagcttgctatccgttatccagcgatgcaggttaactctaatatttttatagatgcgatgtatttttttaattccatacgtagcattaactggataacgttactctcaacgcgatttattaagcgattagggggggaacaatgggtgagaaataaactttcagcctaccctgatatcaccattactgaatacggtaatggattaattattcgtgcaggcgaataccccgatttaaccccattgcctgccagtgtacccgaaagctattttgcgattaatgaactaacccgccctattcgttataccttaaaagatgaaggatactcgttacatacctacggagaaggtcatttcacaggaacaaccagcgccctctggtatgcccgttatgatcgtggccccttacaggttgatcccctgatggcaggcgaaccggccagagtcgatggctactggacaacccaaggccgtgaaggactggaaaacgtcattctgcaaggtgatattgcaccagatgtagagggcaatgcgccgggtacaaccgtatggcgcttggtacgtcagattgaacatgatgatgacaaagatctaagggaacttgaggcgcaacaaaatgcgggtaaccattgacggtaaaaaaatcatcctgaaaggcgatactacaaacacgaatggcacggtgctgacaggttcaggactcaccaagcacggtgaacctgttgcctgtgtgggggacagtgtattttgcccggcttgtaaaagtacaggatcgattgctgaaggttcttcactgacagtgatacaggataaagccgttgcactggaaggacacaaagtggattgcggttgcccatccgggtgtacgctggtcgcagcagggtaataaaacaatgtcatgaaagccagaatgagactggctttctttgtatctaaaattgagttaattaaacttatctaagggacaaagttcatggctgaaccacagtttttattgagaagattggtcagacgatggaatacttatataccctgaaggcgttattgccgggtcgataatagtatctggtatgaagaaaaggaattattggacgtggatgtagaatcatttgttatcaccgatgagtacacagcgcgtgctaaatatgatccatttttttgcaatgaacgaaaatgacggattcaatatgagctcatcactggctgcatggtagtaaaataatgatcaccattgttgtttataggtaaaaaaatgaaagaggagcagtctattgccctcttctaaagacctaatcaggaattagattgcatgaaaattttttttggtaaactaatgcgttttttaatgaagttattcattgctgttatcttactgcttggatggttagcagtaattggagtaataaccctttggataaaaaattatggttatcaagattacacgacgtttattatctatctagttggtactatttctttacttttactggtatatccctattcccaatggatttcaaaattatcaattggacaattgaagtgttccacctctttgggattggcggcgagtgttatcattctttatttagtcacctatggtattgaaaatttattcggcattcctactgagtcctttgtatcccgactcaccaaccaatcaggtggagcactactcgcaacatatatcatgattcttgtattcgcgcccatttgtgaggagatcctttttcgaggcatgttcttaggtatgtttaactctactcatcactggattttatggacgggtgtctttatcacttctgttttatttaccagcattcacatccaatatgaacatatcagtacttttgtcgagatatttattctatccctcatattggcgattgctcgtatacgtagtggtggtctattactgcctatattgctccataccgaagcctcattaatagccgtgatttttgagtgatctggataatatgcaagattaatgttatcagaataagacaaaaatgattctgttgattgttaaaagacgttggatgatttgatttagtactatagccgtaattgcgctatgatcagatattcctttctgtagcagtacgggtcacggctgtagtattaggtcaaagctgatttcgctcccagaagtttcatttactctatgccagatcacaaccagaaattggttatttgggatctgaagctcgtttccttattacaagattctgtaggaaagaggtgatatagcttcagcaagggacaattagaaatgtttacacttattactcaccaatccaaatcacactaccgtaaattacagtaggaatggcgagatcaagctcataactaattgagaaaatgagttaactcagaattatgttaatgaaaagattgatctggcaatattctcttttttatagagtgtgccagatcaactctgattaattcacttttgtcgttaccaaccaccgaaaatttcaagtagtgtcaaatatagtgtattcatttttacttatatataacttgatgaaatatcatccatattttttattcggtatagtaatctattccaccatgataagaacatgttcccgaaccgctagaagttgaatacataccatctcgacaaaccgattgaatgtttggatcgtcaggattagtcgtaatataagcaaaaacactgcctgaatacacaagaaaaattaataaaaatatctttttcatttatgctatcctcatataattaaatggtctgaaattcataaattggttaatatttcaatagttaaaaacaattaattaagatttaatgaaatttaaaaacacttaaagaatagcattagaaataatatcaataagaaataatcatctttcatttatcaaattgttactaaataatcatatgggataagcttttagccccctagccatatccatcctccttgccacgaaaaccgcagcctccagctcactgcactgatgttcccgcattaatgcccgccgttcggctttttcttctttttccgtcatccccagcgccagatacaggctcggtggcaccacccggaacagcgcttcaatttttttcgccagcaccacgccttcagtataacaacgcgggagtttactggcagagagcaacaccgctttttgctcttcattgagttttttgaatcgcgcgatttgttccacctcatccgggggcatggtgagacataaccaccattccgccatgttcagcattttttcagccgtgtcgggatagtcagcgaggttttgcgttgccagccacaaccaggcccccagtttacgccacattttcacgaccttggtcatatagggagagagtaacgggttggtggtagtgatatgcccttcgtcaatcaccagttgcagttccctgtcctgatactggtcacgttcagccagattattgacggtgttaatcagtgacaccatcgccagtgccatctgggccgagtaattttctcgcgccagcggtacccaaatcaattaacgtcacatccacttccggccacggggtgccgggttggttgaacagttctccttcaaagccctgcgtaaacattgacatggccccagccatttcatcggcccgtgcccggcggtgggcagtgattaacggctggccgtgttcatcctgctgatggttgcgggcaatggcatacagcgcagtttgtaaatccgaggccaccatctgatgccctgcctcatagctggtctgcgcagccagcataatcgcttcacggatcaaaccgcgatccgaacgggtcaggcgttcttcttcttttttctcaccgccggtgatcatcagccgggcggcaatttccatctcccccagaatgtcacgctgttcatcgccgtcttcctgtgcttcatcagtctccggaatatcggcttcattaatccgtaattgtttgggactgagtttcagtaactgatgcgcatcagcaaacagggccagactgacgccacaacccggtttgataccaattttatttactgtcagccccagactggcgtaatagtctgccaacagtccaaaactgtttcccgcttcgacaataaacagacgcggacggtggatcgccatcagttgtaccagcgaagcacacaacgtggcggatttgcctgccccggtcgggccaaacagcaataagtgggcattctgggtgcgatcctgtttgttcatcggatcaaaggtcagtggcgcgccgccacgattaaagaaactgaagcccggatgcccggtgccggttgaacgtccggtcactggcaggagtcctgccagatgctgaacccacgtcaggcggctgtacccgtgttttttgtctttctgcgggttaaagcccatcggcaaagcccgtaaataggcattcagcggggaaacactgaattcaagtcgcacgggctgtaatccggcgctcagtaatgtggaagataactgatgcacccgctggttcagattatccaaatcctgaccgcgcaccagaaaggtcagtgcactgcggtacagtttatgccgtcgccccagtaattccttcactgcctgtacatcctgccgggcgcgcagtgattcggtattttccccgacggcattttttgccagtcgggtgaagctctcttccagtgtatcctgtgcttgcgccacaatggtcaacgtgaccaccgtgccttccggcatcatatccatcagcgcattgatatggtctccccgtttcacttccccctgtcagggtgcccggctcgggcggacgccgcaggcgctcaaccggcacggctttatgcggcaggccgtcaaaccaccagacaccgttatcgggatccgacaccggcggggtaaaccacaggctttcggcaaagtcattattcaccgggagatccggttgtgtgggagattcataacgcactgcccggtaaaaatcggctttggccatgccccagtccggcgccggattaaaatgacgcagcaaccagctgtggatctgcccgccatcctgccgggttgccacaatacctgctgatgccagtgaggaaaccagtcgttcgcagacctgattgagtgccgccaccgacgataccgtttggtggtgtgccttcgatttatgcgcaggcaaccagcggtaaaccaccatgcgggtctggcgctgctgtcctcgccacggttgcccggtgattaagctatcctgaaatattccgtcaggctgggcaatgctgttcaggtgacgtgctgattctgccagaaaagcgtcagtaaaggccgtgccctgcgcccacggtttcacatagtcccgcagggtattgagataattgtcaggatcatcttcatcctgacaaaaaaactgcactacccacggcgacatatcgtcctcgtccagactgtcctgaatggcatcttccagttgatcgcggatttcaatcaaccgtgcagcagggcgtccttcggtggcgaccggttcaatctgatagacggcccccacggacacaccatcatccagcaataaacactgcccgtcttccagatattccacccagggcaggtagtcaataatcgagggattcgcccgataaattgccgcttcatccgtttcgcgcagtttgccgggacggtgcaatgcgttggggttttccattaccatgcctccgtgcgttcacccggcagggcatactgcacctgctgataaaacggaaataccgtgctgtagcccggtatcggggtcttaccggcaaccagatgcgggtagacatacatcaccatatcgggattaaggagccggggaaactgctggctgatttcatgctctgccgagcggttgtaatgggtgggttcttctgacgccctgtggcgttcagccggggttaatgcccggcgcagggtttgcctggcctgtgttgcgctatgcccagcctgatttccctgccacatggccagtaccgtctgttcgccggctggcagcaacgtgtctttcgacgttgaacagcctgccagcagccccgtcagacctaacacgatagcgtaggttatttttcgcatccctgagcctccgggctacaaataagggtaaacgtggcaaattccgggtgtaccgccagttccgataaagtaaacggcaagcactcccagtgttcaacctcgctgttgcctgcaagcattgattgccactgaaattcggtcagccgaaaaacggtaaaatccccgtcattcagcaatcggctctcattgccgctaaagagatataattgactgcttttggtacggaaggaccgccagtcaagctgaaccgatgtgggttcagcctgtggcgtcatattaattttcagacaataaggcgggctggcactaaacagcctgtgagaaaaattcggttccattaatctaaggcttcctgagtgacagattgggtaggttcactaaaaccgtaacgcaccttacggcctgtcttttcataatcaatcgccagactttgggtgatatgcacgacaacatgggcaccgggtgggacgtaaatggcatcgaaggtctggctgtagcgttgtttgaaccattcactcatctcattcatgcccccggccaccgctttgcccagcgccgcctgtcccgcattgccggttaacgcggaagtgatgccgccggcaccgttggtttgtgcggtttgctggctctcgttcagggcattgccggcggaattcatggctgacagggcaaacagggtcggcagataggtactggcattggatttacgctcaccactgatgcagggaatgccgttctcatcagacaaccagccgataccctgttgattctgaccgcggcccggcaaggtgcgcacggtgccatcctgaaacacaaaggtgatggaattaacctgaccgcgcacgcaggacagtgtccagtcgccactggcggaaccggacaccaccgcgccttccacctccggcagttcgataccgttagcggtcaggttgtctttgccgataagaattttaaacggataggggtcggtgaccgtaccattgaccggtacccggcctaacaacgcggtcatggcctgactgcccaccagagtggcattttccggcagggtgtagaccgggttttcgttgtctgccttcgccgatggaacttgtggatgattttttacggtggtcggttgttcgcttaaaaaagaggtggggaactgagccgccgtttttccattgcccatcgcttgcctatcggggattttctcatcggccggggtaacccagataaggtcatcctgtcctctgagagtgctggcagaataagcactacctgccagtccactacccagtggtatctgattatcctgtgccggcaacggcgttgaatttaaccgttcagtgagcaaatcaatctgggccagcaatccctgctgttcgtcctgtaacgtgcgctggcgctgttcatcgtcctgccggatagccgcaaccgcggcttctatctgaccggcaacatcctgattttgaccttttaactggtcattttcttttcgcatcgcagcattctgctggtctaagcgtttctgctctgcccgtacggtattgagtgtcccgaccagcgtgcgcagggtatcttccggcgtatccccgccgactcccagtgcctgtaactcctccggggagagggtcgccagcgcgttattctggggtttatccggtacggtattctctattgagctgcaacttttaatcccgataaacccgccgacaaccagtaccgttggcaccagtatcttcaccagactgttcgatttaagctgcatcacggcctcccggtttcacggataccggttcagggattaacgcgttacccggcgccccttgggtaacaagatagagtaccgtggtatcttctggtgttcccgattttcccagccagcgatgctggaaggccgcggtcacaaagtgtccctgtaaggcacgggggtcaagcgggataatgcgtttggcggtattgcgcagtttcagggccatcaccgtgtgatgatgcagccgccagccggccagcggggtcacttcaaccggctctgacggatagagggtggtgatggaggcagccagatgcaggttcaccggctgaatgccgctgaccggctcaaccgtacgcaggggcgcatacagntgctgggc

SEQ ID NO: 1832 - DNA, 12491 bp, Xenorhabdus sp.; identical to SEQ ID NO: 1831
  CDS (268)..(2208)
  unsure (1)..(12491): unsure at all n locations

SEQ ID NO: 1833 - DNA, 12491 bp, Xenorhabdus sp.; identical to SEQ ID NO: 1831
  CDS (2265)..(3725)
  unsure (1)..(12491): unsure at all n locations

SEQ ID NO: 1834 - DNA, 12491 bp, Xenorhabdus sp.; identical to SEQ ID NO: 1831
  CDS (4062)..(4949)
  unsure (1)..(12491): unsure at all n locations

SEQ ID NO: 1835 - DNA, 12491 bp, Xenorhabdus sp.
  CDS (12340)..(12489)
  unsure (1)..(12491): unsure at all n locations
gcccagcanctgtatgcgcccctgcgtacggttgagccggtcagcggcattcagccggtgaacctgcatctggctgcctccatcaccaccctctatccgtcagagccggttgaagtgaccccgctggccggctggcggctgcatcatcacacggtgatggccctgaaactgcgcaataccgccaaacgcattatcccgcttgacccccgtgccttacagggacactttgtgaccgcggccttccagcatcgctggctgggaaaatcgggaacaccagaagataccacggtactctatcttgttacccaaggggcgccgggtaacgcgttaatccctgaaccggtatccgtgaaaccgggaggccgtgatgcagcttaaatcgaacagtctggtgaagatactggtgccaacggtactggttgtcggcgggtttatcgggattaaaagttgcagctcaatagagaataccgtaccggataaaccccagaataacgcgctggcgaccctctccccggaggagttacaggcactgggagtcggcggggatacgccggaagataccctgcgcacgctggtcgggacactcaataccgtacgggcagagcagaaacgcttagaccagcagaatgctgcgatgcgaaaagaaaatgaccagttaaaaggtcaaaatcaggatgttgccggtcagatagaagccgcggttgcggctatccggcaggacgatgaacagcgccagcgcacgttacaggacgaacagcagggattgctggcccagattgatttgctcactgaacggttaaattcaacgccgttgccggcacaggataatcagataccactgggtagtggactggcaggtagtgcttattctgccagcactctcagaggacaggatgaccttatctgggttaccccggccgatgagaaaatccccgataggcaagcgatgggcaatggaaaaacggcggctcagttccccacctcttttttaagcgaacaaccgaccaccgtaaaaaatcatccacaagttccatcggcgaaggcagacaacgaaaacccggtctacaccctgccggaaaatgccactctggtgggcagtcaggccatgaccgcgttgttaggccgggtaccggtcaatggtacggtcaccgacccctatccgtttaaaattcttatcggcaaagacaacctgaccgctaacggtatcgaactgccggaggtggaaggcgcggtggtgtccggttccgccagtggcgactggacactgtcctgcgtgcgcggtcaggttaattccatcacctttgtgtttcaggatggcaccgtgcgcaccttgccgggccgcggtcagaatcaacagggtatcggctggttgtctgatgagaacggcattccctgcatcagtggtgagcgtaaatccaatgccagtacctatctgccgaccctgtttgccctgtcagccatgaattccgccggcaatgccctgaacgagagccagcaaaccgcacaaaccaacggtgccggcggcatcacttccgcgttaaccggcaatgcgggacaggcggcgctgggcaaagcggtggccgggggcatgaatgagatgagtgaatggttcaaacaacgctacagccagaccttcgatgccatttacgtcccacccggtgcccatgttgtcgtgcatatcacccaaagtctggcgattgattatgaaaagacaggccgtaaggtgcgttacggttttagtgaacctacccaatctgtcactcaggaagccttagattaatggaaccgaatttttctcacaggctgtttagtgccagcccgccttattgtctgaaaattaatatgacgccacaggctgaacccacatcggttcagcttgactggcggtccttccgtaccaaaagcagtcaattatatctctttagcggcaatgagagccgattgctgaatgacggggattttaccgtttttcggctgaccgaatttcagtggcaatcaatgcttgcaggcaacagcgaggttgaacactgggagtgcttgccgtttactttatcggaactggcggtacacccggaatttgccacgtttacccttatttgtagcccggaggctcagggatgcgaaaaataacctacgctatcgtgttaggtctgacggggctgctggcaggctgttcaacgtcgaaagacacgttgctgccagccggcgaacagacggtactggccatgtggcagggaaatcaggctgggcatagcgcaacacaggccaggcaaaccctgcgccgggcattaaccccggctgaacgccacagggcgtcagaagaacccacccattacaaccgctcggcagagcatgaaatcagccagcagtttccccggctccttaatcccgatatggtgatgtatgtctacccgcatctggttgccggtaagaccccgataccgggctacagcacggtatttccgttttatcagcaggtgcagtatgccctgccgggtgaacgcacggaggcatggtaatggaaaaccccaacgcattgcaccgtcccggcaaactgcgcgaaacggatgaagcggcaatttatcgggcgaatccctcgattattgactacctgccctgggtggaatatctggaagacgggcagtgtttattgctggatgatggtgtgtccgtgggggccgtctatcagattgaaccggtcgccaccgaaggacgccctgctgcacggttgattgaaatccgcgatcaactggaagatgccattcaggacagtctggacgaggacgatatgtcgccgtgggtagtgcagtttttttgtcaggatgaagatgatcctgacaattatctcaataccctgcgggactatgtgaaaccgtgggcgcagggcacggcctttactgacgcttttctggcagaatcagcacgtcacctgaacagcattgcccagcctgacggaatatttcaggatagcttaatcaccgggcaaccgtggcgaggacagcagcgccagacccgcatggtggtttaccgctggttgcctgcgcataaatcgaaggcacaccaccaaacggtatcgtcggtggcggcactcaatcaggtctgcgaacgactggtttcctcactggcatcagcaggtattgtggcaacccggcaggatggcgggcagatccacagctggttgctgcgtcattttaatccggcgccggactggggcatggccaaagccgatttttaccgggcagtgcgttatgaatctcccacacaaccggatctcccggtgaataatgactttgccgaaagcctgtggtttaccccgccggtgtcggatcccgataacggtgtctggtggtttgacggcctgccgcataaagccgtgccggttgagcgcctgcggcgtccgcccgagccgggcaccctgacagggggaagtgaaacggggagaccatatcaatgcgctgatggatatgatgccggaaggcacggtggtcacgttgaccattgtggcgcaagcacaggatacactggaagagagcttcacccgactggcaaaaaatgccgtcggggaaaataccgaatcactgcgcgcccggcaggatgtacaggcagtgaaggaattactggggcgacggcataaactgtaccgcagtgcactgacctttctggtgcgcggtcaggatttggataatctgaaccagcgggtgcatcagttatcttccacattactgagcgccggattacagcccgtgcgacttgaattcagtgtttccccgctgaatgcctatttacgggctttgccgatgggctttaacccgcagaaagacaaaaaacacgggtacagccgcctgacgtgggttcagcatctggcaggactcctgccagtgaccggacgttcaaccggcaccgggcatccgggcttcagtttctttaatcgtggcggcgcgccactgacctttgatccgatgaacaaacaggatcgcacccagaatgcccacttattgctgtttggcccgaccggggcaggcaaatccgccacgttgtgtgcttcgctggtacaactgatggcgatccaccgtccgcgtctgtttattgtcgaagcgggaaacagttttggactgttggcagactattacgccagtctggggctgacagtaaataaaattggtatcaaaccgggttgtggcgtcagtctggccctgtttgctgatgcgcatcagttactgaaactcagtcccaaacaattacggattaatgaagccgatattccggagactgatgaagcacaggaagacggcgatgaacagcgtgacattctgggggagatggaaattgccgcccggctgatgatcaccggcggtgagaaaaaagaagaagaacgcctgacccgttcggatcgcggtttgatccgtgaagcgattatgctggctgcgcagaccagctatgaggcagggcatcagatggtggcctcggatttacaaactgcgctgtatgccattgcccgcaaccatcagcaggatgaacacggccagccgttaatcactgcccaccgccgggcacgggccgatgaaatggctggggccatgtcaatgtttacgcagggctttgaaggagaactgttcaaccaacccggcaccccgtggccggaagtggatgtgacgttaattgatttgggtaccgctggcgcgagaaaattactcggcccagatggcactggcgatggtgtcactgattaacaccgtcaataatctggctgaacgtgaccagtatcaggacagggaactgcaactggtgattgacgaagggcatatcactaccaccaacccgttactctctccctatatgaccaaggtcgtgaaaatgtggcgtaaactgggggcctggttgtggctggcaacgcaaaacctcgctgactatcccgacacggctgaaaaaatgctgaacatggcggaatggtggttatgtctcaccatgcccccggatgaggtggaacaaatcgcgcgattcaaaaaactcaatgaagagcaaaaagcggtgttgctctctgccagtaaactcccgcgttgttatactgaaggcgtggtgctggcgaaaaaaattgaagcgctgttccgggtggtgccaccgagcctgtatctggcgctggggatgacggaaaaagaagaaaaagccgaacggcgggcattaatgcgggaacatcagtgcagtgagctggaggctgcggttttcgtggcaaggaggatggatatggctagggggctaaaagcttatcccatatgattatttagtaacaatttgataaatgaaagatgattatttcttattgatattatttctaatgctattctttaagtgtttttaaatttcattaaatcttaattaattgtttttaactattgaaatattaaccaatttatgaatttcagaccatttaattatatgaggatagcataaatgaaaaagatatttttattaatttttcttgtgtattcaggcagtgtttttgcttatattacgactaatcctgacgatccaaacattcaatcggtttgtcgagatggtatgtattcaacttctagcggttcgggaacatgttcttatcatggtggaatagattactataccgaataaaaaatatggatgatatttcatcaagttatatataagtaaaaatgaatacactatatttgacactacttgaaattttcggtggttggtaacgacaaaagtgaattaatcagagttgatctggcacactctataaaaaagagaatattgccagatcaatcttttcattaacataattctgagttaactcattttctcaattagttatgagcttgatctcgccattcctactgtaatttacggtagtgtgatttggattggtgagtaataagtgtaaacatttctaattgtcccttgctgaagctatatcacctctttcctacagaatcttgtaataaggaaacgagcttcagatcccaaataaccaatttctggttgtgatctggcatagagtaaatgaaacttctgggagcgaaatcagctttgacctaatactacagccgtgacccgtactgctacagaaaggaatatctgatcatagcgcaattacggctatagtactaaatcaaatcatccaacgtcttttaacaatcaacagaatcatttttgtcttattctgataacattaatcttgcatattatccagatcactcaaaaatcacggctattaatgaggcttcggtatggagcaatataggcagtaatagaccaccactacgtatacgagcaatcgccaatatgagggatagaataaatatctcgacaaaagtactgatatgttcatattggatgtgaatgctggtaaataaaacagaagtgataaagacacccgtccataaaatccagtgatgagtagagttaaacatacctaagaacatgcctcgaaaaaggatctcctcacaaatgggcgcgaatacaagaatcatgatatatgttgcgagtagtgctccacctgattggttggtgagtcgggatacaaaggactcagtaggaatgccgaataaattttcaataccataggtgactaaataaagaatgataacactcgccgccaatcccaaagaggtggaacacttcaattgtccaattgataattttgaaatccattgggaatagggatataccagtaaaagtaaagaaatagtaccaactagatagataataaacgtcgtgtaatcttgataaccataattttttatccaaagggttattactccaattactgctaaccatccaagcagtaagataacagcaatgaataacttcattaaaaaacgcattagtttaccaaaaaaaattttcatgcaatctaattcctgattaggtctttagaagagggcaatagactgctcctctttcatttttttacctataaacaacaatggtgatcattattttactaccatgcagccagtgatgagctcatattgaatccgtcattttcgttcattgcaaaaaaatggatcatatttagcacgcgctgtgtactcatcggtgataacaaatgattctacatccacgtccaataattccttttcttcataccagatactattatcgacccggcaataacgccttcagggtatataagtattccatcgtctgaccaatcttctcaataaaaactgtggttcagccatgaactttgtcccttagataagtttaattaactcaattttagatacaaagaaagccagtctcattctggctttcatgacattgttttattaccctgctgcgaccagcgtacacccggatgggcaaccgcaatccactttgtgtccttccagtgcaacggctttatcctgtatcactgtcagtgaagaaccttcagcaatcgatcctgtacttttacaagccgggcaaaatacactgtcccccacacaggcaacaggttcaccgtgcttggtgagtcctgaacctgtcagcaccgtgccattcgtgtttgtagtatcgcctttcaggatgatttttttaccgtcaatggttacccgcattttgttgcgcctcaagttcccttagatctttgtcatcatcatgttcaatctgacgtaccaagcgccatacggttgtacccggcgcattgccctctacatctggtgcaatatcaccttgcagaatgacgttttccagtccttcacggccttgggttgtccagtagccatcgactctggccggttcgcctgccatcaggggatcaacctgtaaggggccacgatcataacgggcataccagagggcgctggttgttcctgtgaaatgaccttctccgtaggtatgtaacgagtatccttcatcttttaaggtataacgaatagggcgggttagttcattaatcgcaaaatagctttcgggtacactggcaggcaatggggttaaatcggggtattcgcctgcacgaataattaatccattaccgtattcagtaatggtgatatcagggtaggctgaaagtttatttctcacccattgttccccccctaatcgcttaataaatcgcgttgagagtaacgttatccagttaatgctacgtatggaattaaaaaaatacatcgcatctataaaaatattagagttaacctgcatcgctggataacggatagcaagctgatactcttgaggcatatattcctcatagtcccgaggcaacaccagtgtgtaaccacattcaccatgatccggactgagttgttcgcaaagaaaagcaagccattcattaaactcagtttgtcctttgtccgtagtcagggtatcccaaggtaagaccagacataaataagagcttgcgttattgccctctgtttcccatgaatcaagataacgcataatatactgaggtgcatcgttagccttctttgcatcactcacataccaaccacatattttgtttccaacgaagatgccgttgtccgccttcagaattagctgttctatttttgcaatattttcagctgaatacttttttaacccgtcaaattcatgggtatggaatcttaatttgtcgccgtacatgtcccgaaaatggcgaaagcaggctaaaatgcgctcctttttttctcgtgtatacccttgcttgaagatcaaagtaattgccagccccaaacgcgtcaccgtgatatcgcgttcactttgcagggtgaatcccgttaattgtgatttaatatgctcaaaatacgcttctttattcataataatcattattccttatgaggcagttgctgctgttaatgttgttaatgcggcaatgcctgctgctgccgctgtcaaagtcgcccagattgcggatgcaacaccaccaacaatactacctgcccaaataattatacctgccaacaaaactatcgcggcgacaacgataatggctgcaataatggtcatgatttcttcgcctatttttaccatcaactgaattgtaccatcaccgagatctgcggctatttgataccactcgacctgtttcaatgcgtctatcgtcaggtcagtatattggtacaccgtttctacggcttccttgattttagcttcggtaaggtgaacaatttcccctgttttctcacagacccaatgaatggcatagctcagtttttttgtcaccggatcaataatttcgtctgctatccatttacccgattcacgaaaccaggcaccgcaggctgccagtgcagcacgtgtcttatcactcaggtaagtaaatccactggccgttaagtcccatgtccattcccagctatggacaatcatgtctttggtatagataaatccctcttccacccattgagcagcttggtgatagtattctttggcacgttccacaaatgaagactcattaggtggcataatcaacggtggaaccgtttgatcatgcgataatgccatccaaatactgaaaacgggtttatgttgccacggtttttcactcaccagcgggagattttttggtgtataccgggctatttctggctgggtagggatcggtaaggagacaggtggggtatttccgtcccccaccggcgaaaaaaggcggccaaataaggcgacatgcttgcgaatattgtccatttctaccgctttggcttcctccgaaagggtttcccattcttttgaaccacgattatcttcaaccacaaaaataccaaaacgctctttagtggcaatgagaggataatcccttttttgtccttctgacatggagtctcccggaaatttcacctcaatcaatatcttcaggttatcgggatgtgcagtaccatcaaggtattcggcatcacgccccggccagcgtaattgctcatttttaaccagaataatatcgggccgccgaaagccggtgataccgtgtttagcgatatcttttgcagacaaattgggaaaccagctttcagaatggggaagattaccgccatagcgtacttttttttctgcattgttcgtcagtttaggtaaaggggttctgtatcctctcatataaaaagtcacttcagctttataaggccatagccagtcatacaccttctcttctattttaataaactggctcattgctgcctgtttgagagagaaaatgccctttttaccgatggctatctttggtgcccaaatagctaaagcagctttttttaccagataacactcgtcttcatctttcggaaactcaatctgctccatacggcaactcaccgaagtaatagccggacacattccgcctggttttaattgttgggtcatttagattcctccttaaattccataatgtaatccacgggttggttatcccctacgtggtacaatttcttggtttttttctttttctgctcttccgggaggctgaattccagtgtgtcggcttgttgagtttgcacaatggcggtacgcccggctgcatcggtacgcccggacacaatgcccgatggggttttaatctggtacagggtattagtcagtggtttattcccattcttgctattggtcagaatataacgcccggaataatcaaacagtgcctgactgcccgcttttccggccgcatgttcagtcatggaaatcgatgtgccggaaatggtaatcgctcccgttggatcgataatgatttgaccgcctgaattaccaatggtgatttggccactttgggattgcaggacaatatgtttaccgacccgtacttcctgattgtctgcaatgtccagcaactggcttttgccgattttgacactttgttgtccggtaatagtcttggattggtttttctcaaccaacagcgtttgatgaccggaaaccgattcatcatcatcctgttttatgactgtctgacggttgcgttgaatgtcttcaaactgatcccgtacgatggttaatgtctggtcacgaccaatacgctctttatggtcaacgtcaacatgggtggtccgattgttcagcaccttagtattcatatctttctgagcgtggatataaacttcctcactgcctttggcatcttcaaagcgcagttcgttaaagccttcgcctttatgggtatgtgtcttgaaggtggtgcgggttttttgccccggtaaatctaatggtggactgttgcgaccattgtagttacaaccggttacaatcggacgatcaatatcgccgttcaggtaggagacaatgacttcctgcccgatgcgggggattgccataaaaccaaaaccgttgccgttccagccctgtgccacccgcacccagcaagacgacccatcaccgggtttatcgtagcgattccagtgaaaatggactttaatggctcccagttcattagtgaagatttcttccccttcgggaccgacaaccgtggccagttcatcaccgtcggccagcggtttgtaacggtacgggggtcgccaatcatcaacgccgggaataaaggtcatgtcactggttaatgtcgttccttcgcccccgatcccagcggcctgtggctggtggccatgatgtgtgacgctcaccacttgccagcggtcattcatggggtctgacggatgcgcactgagggtaaagattttacccggccgcaatttaatgcagttggaacgggcctcacccagtttgctttcactatttaatcggttaagacgaatttcacccaaaggctgaccttctgtgctccactgaaaacgcccgtagctctcaaacaccgagtgttgactgttttgtgctgaggtggctttggtctgcatcggctgtgaagggcgcagataattataatctttatggataaattcatccgggcacaagtattcgccgtactgccattgccagaccgtagaatccgtctcatccgtgtccggttgggcgttatagcgaaggggaagcccggctgtcatccccagatggctgttactgtagaacatctggttttcctcaaaccagaaaataatgccttcttccgccgccaaccggcaccagaattcataggaggactcccgcttctgggtaatataatcccgtggtgcgtgataagcggcactatcataaaatttgctgtctgccttaatgcgatgttctgatagtaatttcttcaaaatatcagggacagaaaggtgctggtaaatgcggctgtcctgattaagcgtcatccgccacatttcaggttttagggtaaaggtataatacgtttgatttccatcggtattaccctgcgtcgcacctgtctttcatacacaaatcccccgataaaaaatcgggggattttttgaatctttttccactttaccgatctgagtaataacgatttcattgaggtacggtaaaatgttccaaactcacgcagaacaatgggctgatgaaactttttctcgcgcaaatttgggcgatagtcggcgtacaaaacggcttatcaaattcaccggctcgttagccaatcatatcgggcaatctattgggcaatcactcaaaaccccagc

SEQ ID NO: 1836 - DNA, 12491 bp, Xenorhabdus sp.; identical to SEQ ID NO: 1835
  CDS (4702)..(5274)
  unsure (1)..(12491): unsure at all n locations

SEQ ID NO: 1837 - DNA, 12491 bp, Xenorhabdus sp.; identical to SEQ ID NO: 1835
  CDS (3465)..(4730)
  unsure (1)..(12491): unsure at all n locations

SEQ ID NO: 1838 - DNA, 12491 bp, Xenorhabdus sp.; identical to SEQ ID NO: 1835
  CDS (2519)..(3634)
  unsure (1)..(12491): unsure at all n locations

SEQ ID NO: 1839 - DNA, 12491 bp, Xenorhabdus sp.; identical to SEQ ID NO: 1835
  CDS (2118)..(2519)
  unsure (1)..(12491): unsure at all n locations

SEQ ID NO: 1840 - DNA, 12491 bp, Xenorhabdus sp.; identical to SEQ ID NO: 1835
  CDS (1843)..(2130)
  unsure (1)..(12491): unsure at all n locations

SEQ ID NO: 1841 - DNA, 12491 bp, Xenorhabdus sp.; identical to SEQ ID NO: 1835
  CDS (947)..(1780)
  unsure (1)..(12491): unsure at all n locations

SEQ ID NO: 1842 - DNA, 12491 bp, Xenorhabdus sp.; identical to SEQ ID NO: 1835
  CDS (1)..(378)
  unsure (1)..(12491): unsure at all n locations

SEQ ID NO: 1843 - DNA, 10974 bp, Xenorhabdus sp.
  CDS (3)..(10916)
agattatcagccagtttgcttcctcaccctttgaattagctcagtcaccattgttacgcttggcagggctgacactaagaccgcacaatcatctgattgtactggtttttcatcatttgattgtggatgaagaatcagtcagacaactgtgggatgaattactggaaaactacacgcagttacaggcaagaaaggagcttactatccggtcatctcattatggtcagcgggaacatgtacgtatccagcatcagcgggtgaacgggaaaaccggaatggcggcccgtgaatactggcaacaacaactggcaggaacactgccgttactccagctgccttatgattttcccacacctgccgcccgcagttatcggggacgacgtatacctttcagtctgccctcagcagctcataaacagattgagacactggcctatcagtatggcgtcacgccttatctgattttacaggcgggatttattgcatttctggcccgctattcacgtcagagcgatattctgctgggaacaccggtttccaatcgtcattatagtgaggagcagaagccggttggcctgttactcagcttattggtgatacgtaatcaggttgatctcggtcagtcattcgaacacttgctggagcaggttaaatctaccttcattgatgcgattgcacatcaggatctgcccctcagccagttgttacttttgctcaaagaggattcaggacaaaccagttcaggaaaaaacggaggtgaagataatcatcatccgggggtttcgccactgtttcagactctgtttacctaccaaaacacacccgttacccacaagcgtctgggggcagtacaactttctccgttacgccactgggatgtgcaaatcgccaaatacgagctggcactggaaatgtggtgtgaagacggagaattacagggcgtatttcaatatgccagcgaccgcttcctgccggaaaccatctcccgcatgacggaaaacttctgttattttctgtcgcagttaatgaaccagccacaacaggctgtagggcgtgtagccctgctcagccccggccagcaacagcagctgactgaatggaaccggactgaacgccccttcagcgataatattgcgctgcatcagcttattgaacgtcaggtacaacgagtgcctgatgccattgccgttgaattcggtcagcaatgcctgacttacgctgaattggatcagcgcgccaaccaattggctcgttttttgattcaacaaggtgtcgggcctgaaatttgtgtcgggctgagtgttgagcgttcactggaactggtgatttgttttctggcgatcctgaaagcgggtggggtatatgtgccgattgatcctgactacccgctggatcgcagccttcatgtgattgaagatgcgggcctgtgtttgttgataacacaggagcagtttgtgtcacgttatcaggacggtaatgttcctctgttctgtcttgaaacgctgatgcctcagctctctgcattcagtactgacaatccacaggcagatgtccgggctgaaaataccgcctatatcatctatacctccggctcgaccggcaaaccgaaaggcgttcctgtccgccatcgcggagtctgtaatctggcagaaacggaagtggaatttttagctataccgccagatagccggatactccagttcgcctcttttagcttcgacacttccgtctgggaaatcctgatggcgttctgtagcggcagcacattattaatggcttcccgccttgctatcatgcccggccctgatctgctggaacagcttattacacggcgtgtgactcatgtcactttaccggcgtcggcactggctgcactgcctgtagctgatttaccggatttgcaggtgctgatcgtcgccggagaagcctgcgggccggatttactgcataagtggggaaacaaccggcgttttattaactcctatggcccgacggaagccacagtggggacgacgaatgccgagttgacgacagatgataaccagattcatatcggccgcccaatcgccaactcacaggtctggattttggacgaatatcaggcaccattgccgattggggtcgcgggcgaactctacatcggcggggtgggtgtgacggcgggttatctgaatcggcctgacctgactgaatcccattttatccccgatccgttcagctcccgaccggaggcccgcctttatcgcaccggcgatctggcccgttacagagctgacggcaatattgattatttggggcgcattgaccagcaaataaaaattcgtggctatcgcgtagaactaggcgaaattgaaagcgctctgcgccagtatcctgctatttctgatgcagtggcaatggtacgggaagattacctgaatgccagtgcaatcgtcgcctatatacttcccaaagcggggtctgaacttgatcaggcacagattgaatcgcatctgaacggcttattgccggaatttatgtgcccttcctgctatgtgtttttgcccgaatttcctcgtctgccgaataataaggtagatagaaagcgttttcccaaacccgtcaggcaggaaagcgaaattgttgcagaacctgcccagaacgacacagaacaggacattattcaggtttggcaggatttgctgaggcatcaggcgattggacgtcatacctcattttttgccgcaggcgggcactcactgctggccgctaaaatggtcgctatgctagctgaccagttccggctgtacttcagagtcagtgatgtgtttatctgccgtactccgatgcggctggcagaaaaagccgatttaacagcccgtgtgaatcctctgcatccggaaaccgttcatgaagctccgctgagtttcgcccagcaacggatgtggttccttgatcaactgtatcctgatagttgtcgttatcacattaccagtatcaaaacgtttacccgtactgattctctgaccaacacaaccggaaattgcggggatgctgaacggatacaaaacagcatcatgttgctgttccgtcgcaatccattactcaatctgcgtttacggatggaaggaactacgccacggcaatactacagtgagcagttacctgattgcccgcaccacattatcgaagtacagaatgaacaggaatggcagcagcagttacaacagcgggctatgaatatggcggaaacgccctttcagctgatcggacaaccgctgtatcggctattgctggtcacggatgcaagacaaggcagcgcactgattgtctgcctgcatcatattctggtggatgagcagtcactggcgctgctggataatgagttactgtcattgtatttgacagaagagtatctggcagaagagcatctggcagaagaaaacgccattcaaccagcagcccccgattatatgcagtttgccgcatgggaacacagtgcagaagcccagcaaatctggcatagccagttagattactggcgtcaggtctatcaccatctgccaccggtagtgacattccctcaacagcattctgaacggactgaagatgtaaaagcggcttatcaccgtctgccgctatccgctgaacagaccgccgcgctgcgcaggctggcacagcagcaggatacaacactgtttaccctgatgatggcggcgttccagattttattacagcgttactgcggggaaggtgacgcaacgggggatattgttgttgggatccctgtaacactgcgtgacaaacccgaactgcaatctgttattggattattgctcaatacgctggctgtacgtcagaacgtggatatcaggctgtcatttactgagttcctgcgtagcagtgtgcaaacactgaatcaggcaatggctaacaaagatgtgccatttgaacaggttgtggatgcggtattacccgcggaaaaacgctctctttctccgctgttcagaatcatgtttgtattcaatgcacagcagcagcagcaatgccggactggcacaataaacagtcagtcgataaataatccggaagctaaattcgatttaacgttgtttgttcaggagatgtttgttcaggaactgtctcagccggaaatgacggatagcctgttattaaccgtggaatatcgtcaggcgtgctttgcaccggaaatggtggaacaactggtgacgcattatgtccgtctgctgaacagcctgtgtgatacaccagagcagccaatctatcagttgcctatgttgtcaccacaagaatatcagcagcaggcgaacgagcttaatgctacggctcagccgctgttatatcagatggtacaccagcagtttgaacaacaggtgagtcggacgccacaggcgattgccctgcgggagcaagacgaaaccgagtttacattgagttatgaacagctcaaccaacatgctaatcggttggcgaatgatctgctgatacagggtattggtcagggatcgcaggtggggatctgtctgccgcgctccgccatgctggttgtggcgatccttgccgttctgaaaacaggggcagcatatgtgcctgttgactgcacttatccggcagaacgtgcccggtttatgctggaagatgcacaggtcgcacgggtgatcaccaatcatgagcaggcggccagattagctctgccagcgcagcaatgtattttgttgaatcctgaaccgtttatttcagaaatcgttaccaatgatcaggggaatattgttaatcctgatattgtgatttcaccggagcagcctgcttatattctctatacatccggctcgaccggcaggccaaaaggcaccatcattccgcatcgtgggctgaaaaactatctccagcatgcctgcgaatattatggagaccggagcagacagggaaatactctccatgcttccatctcctttgatgccactattactagtctgtttctgccgttattacagggacaaaccctgtttattctgccggaaggagatgatatcccggcattaatacagacgtggcaacagttgccggatttaacaatggcgaagatcacaccggcccatctggaactgttgagccagcagttatcaccggaacaggcagggcggatacctctgctggtcattggtggcgaaagtttgtcggccagttccctgcgtttctggcgacaacatgcaccacaagtcaggattatcaatgaatatggcccgacggaagccacagtgggctgctgtatctacgacatactggccggagagataaaaggtgatggtgtattgcccattggccgcccgatagccaatacacagctttacctgctggatgaatgccagcagttggtgccgtttggctccgtgggggaactgtatattggcggagagggcgtagggctggggtattttaatcgtccggatctgactgaaagccgatttatcacctctcctttctcttcatcatcacagaaaaaactctatcggacaggcgatctggcccgttatctgccggacggcaatttgttatttttgggccgcaaagaccagcaaatcaaactacacggttaccgaattgaactggaagaaatagaggctcaactttctgcctgtcagggtgtggttcaggcagcggcagggatgagagacgttcacggtcgtcagcatctggttgcttatctggtcatgaacaaacgggtggcaggccaggctgtaacagagatagaaaatgtgcggcaagaactgagccagcgcttgccagcatatatgtgtccgactcaatgggtcatacaggaagtactaccactgacggctaatggaaaaattgaccgcagaagtctggcacagattgccttacctgaacaacctgattacccgcatcgtcggatgccggagacagcactggaaaaacagctgacagaaatctggcaacaagtgttggatcagcaaaacttgggcattgatgatgatttctttgtgctgggcggagattctattcttagcctgcaaattgtgttcagagggcgggaaattggcctgcggatcacaccgaaaatgctgtttgattatccgactattgcaggattagccgctgtcgtgacacaagaagctacgcaggcaaataatgctgatgataaagccggaaacaatgctcagcctgtacagggagagtatgccctgctgccaattcagcgctggttctttgcccatcaccatgctaatccgcaccattataaccagtcttatctgtatgctctggagccggaaacagatattttgcggctggagcaggcattagcgctggtggttaatcaacatgatggactgcgttcacgtttcccgctgacaggcgagcagggccagagtcatgggcggatagacgaagcagtcacaatattgtcgatagagcggtgtcggatcaccgcaattccggtgagaaaagccctgctgcaagccgcggctgaacggcaggcccaactgaatatagagcatggcccgttgctgacagcgacccatttcatgaccactgaaggggactatttgttgctgaccgttcaccatctggtcatagatggtgtttcatggcgtattctgaccgaagatttaagccactattaccgggcactgctggcaggggaaaaaccacccctgatgacaaaaacggcctctttgattaattggtcatcccatcttatcgattacgcccagtctgagcaggctcaggaagagtatcgattctggcaacaaaaactgaatcaggccgtgccttcactgccttgtgatcagggcgaaaaaccgttccccggcttagttagggaatcagctaaataccggctggcattagcgccttctgttactacgaatctggttcagcataccggacaggcctatcgcacccatgtgggagatttgttactggcagcgctggcggcaacactgcaacaatggagtggttccggattactgcatgtggatatggaaggacacgggcgggaaagtctgcatgaaaatgtggacgtcagccgtacagttggctggtttacggccatttatcctctgctactggaactgccagcgttctgttcaccggatcaattgattcaacaggtaaaagaagcggtgcgtcaggttccttatagcggaaccggatatggtgcattacgctattcccagccaaatgccaatcatcaactgcctgcaattccgaaggctgatatctgcttcaattatctgggccaatttacccgtaccttccatcagacacctttacagggtgttgcagatatggtgctggatgatcgttatgccgcagataataccgcttcatatgcgctggcagtagattgctacattgatgaggggcaattacagatagagtggacgtataaccgtcagtgttatcgggatgaaaccatcaataaactggcgatggtgatgaaagagcagcttctcctgctgacagagcattgcgtggctcagacccggacaacatacacgccatctgatttcccgcttgccagcctgaatgcggaaaccctgcgccagttgcagcaacgatatggcgaaatagacgatatctacccgctgacttacacgcaggaagggatgctattccattcaatggcagagcagggccgcggtctgtatcacgaacagctctgctttacgcttagtcagcatgaaatagatatttcccgcttaaagagagcatggcagcaggtaaccgagcactatcctgttctgcgcagccgttttgaaatgagacttgccagtcagccgttgcagattgtcacccccaatcaggaagtggactggcgtcagcatgatttaaggtcttatagccgatcggaagctgagcaacattatcagatcctgttggcagcggatctggcagaagaatttacaccggagcagggaacgctgttccgcatcaccgtgctgcaattaccggatgaggcgatacggcttctgttcagccatcatcatgccattcttgatggctggtcagtcaggctgttactgacagccgttgaatctatttaccagcatacttctcattaccagcagggttcccagcctctgaataatatcctgccacccgcaccggcattccgatcgtttattcgctggcaacaaaataaccgcagagcgtgtcaggaatactggcaggcgcaattagctgatgttggtgcagctacacccttgcccgcagctcatccgctcagggctgccagtcagttaaaacaacgtcatgctttccggttgcctgccgtactttcggagcggctcgctgaaacaggccgtcgttaccgtttaaccatcaatacgctggtacagggcgcatgggctttattgttacagcattacagccagcaggatgagtgtctgttcggtatgacggtatccggccgacaggcagaattagccggtattgataaaatggtcgggctgttaatcagcacactgccagtccatattgttactcaccattatcagacgacagcagactggctgaatgctattcaacagcagcagcgggaacatgaaagattcagtgatatctcgctggctgatctgaaatcagcctgtgaactgccggaatttgagacgttgctggtgtttgaaaactacccgcaacccaaacaggccgatgaagagaaaaatctgttcagatttactcaggcgacggaaagcacgaattatccactggtgctggtggcatcattttctgacggcctgcatggcacgctggtgtacgacactggtttgtatgatgccgctaccgtgacccgtctgacaaggcattttatccgtctgttggagcagttaatcaataatatgacgggaagaccggacgatattgccctgctggacgaacgggaaaagcagcagttactgacacaatggcaaggggaagcattgcctgtttttgccgggaatgtgtatagcctgtttgcccgtcaggttcagacttctccccgtcagactgctgtgattgatgggcatcagcaggtcagttatgccgaattagcgcagaaggctgaacagatcagcctgcgtttgcaccacaaccgtgttaaagcgggagacagggttgcgctttatttaccccgcggtctggattatatcgctgctatgctggctgtcagcaggatcggcgcctgttatatgccgattgatacttcttatcccaccgagcgggtcacttatttattgtctgacagccaaagctgtctggtgctgacttatcaggctctggctgccagtcttacacatgacatcgctgctctggttctggatcagaagacagagccgttaccactgaacgcgttacctccggtcattgatgacgccagtgcactggcctatctgatttatacctccggctccacaggcgcaccgaagggcgtcatgattgaacatcacagcctgataaactatctgacagatgccgctcagcgttatcaggtgacggccggaacccagagcctgttccattcttccgtcagctttgatgccaccctgaccagtctttacctgccgttgttacatggcggcaccattaccgtgattaaggatgatgcggatattgctgcaatagcaacggcattacaacaaccgtcatccaaagatcgccatttattgaaaatcacgccggctcatctgggcgtgttgtcggaatatctgaatgctaccgcgagatctcatgtgcattcattggtgatcggaggtgatgcgctcagttgtgaaactgtacagggatggctgtcggacggaggagatatcggtgtattcaacgaatacggcccgactgagactgtcgtcggctgttgtgtccatcgtgcggacaaacagcaggatttacagggcatgatgccgattggtttacctatcgctaacacgcgtctgtttgtcctgaatgatgatttgtcaccgactccctttggcatggccggtgagttgtatatcggtggactgggagtggcgcggggttactgggatcgccctgaattaacggcagaaaaattcatcacattgtccgttccgctggaaggtggaacacaggaaaacatacgggtttatcgtacgggagatcgggtttgtgccttaccggacggaaaactgctctatcttggtcgccgtgatcgacaaatcaagcttcggggttaccgaatcgaaccgggggagattgaagcacaactgatgcagcacccatatgtacagcaaagtgcactgcttgcctatttcgataaaggatattctgacacagcatattccggtaaacaggaagacatgcagctggtggcttgtgtgtctcttaaacctgagttcctgaaaccggattcactaaaaccagcagtaaatgacggtataccttccgactccctatcagaaatatcagggcaaatactcgatttcctcagtcggtatctgccgactcatatgttgccgaatgtcattgtaccgatggatgaaatgccgcagaccatcaatggcaagattgattatcgggctttactggcacgtttgccggaacatctgtccggattgcagcatccttcccatcagccacaagaagaaaacgcatcgtattctccgcaaacggcactggaaagccatctgcgggatatctggtgtgaggtgctacgacaacaacagattgggcgcgatcagagtttctttgctctgggagggcactcattacatgccttacgtattgcagcccgtattgaacagcaactggcagtcaggctctctctggctgaacttttgcaacaccagacaattaagcaacttgctcattttctggattctcgtatgaccggaaaggtgatcgaaaagaatacacagtacaacacgataaaacgcgtcgtacgcggacggaaataaaaaacacaataacaatggaatatacccgaaaccagaaaagtcacgggttctttagagc

SEQ ID NO: 1844 - DNA, 11844 bp, Xenorhabdus sp.; identical to SEQ ID NO: 71
  CDS (1010)..(1237)

SEQ ID NO: 1845 - DNA, 11844 bp, Xenorhabdus sp.; identical to SEQ ID NO: 71
  CDS (777)..(959)

SEQ ID NO: 1846 - DNA, 11844 bp, Xenorhabdus sp.; identical to SEQ ID NO: 71
  CDS (1483)..(1686)

SEQ ID NO: 1847 - DNA, 11844 bp, Xenorhabdus sp.; identical to SEQ ID NO: 71
  CDS (1696)..(1959)

SEQ ID NO: 1848 - DNA, 11844 bp, Xenorhabdus sp.; identical to SEQ ID NO: 71
  CDS (2042)..(2500)

SEQ ID NO: 1849 - DNA, 11844 bp, Xenorhabdus sp.
  CDS (5959)..(8019)
cgtgagacagttcggtccttatctgccgtgggcgttggaagattgaaaggggctgctcctagtacgagaggaccggagtggacgcaccactggtgttcgggttgtcatgccaatggcactgcccggtagctaagtgcggaagagataaccgctgaaagcatctaagcgggaaacttgccttgagatgagtcttccctgattcctagaggatcctgaaggaacgttcgagacgaggacgtagataggctgggtgtgtaagcgttgcgagacgttgagctaaccagtactaatgaaccgtgcggcttaacctgacaacaccgaaggtgttttgcggggattgagagcatagacgaagtttcagatgaagagtgaccggaaaacagaaagtggccggtgacacagcttgttcgggattgaaaacaggatttgtctggcggcaatagcgcggtggtcccacctgaccccatgccgaactcagcagtgaaacgccgtagcgccgatggtagtgtggggtctccccatgtgagagtaggacactgccagacatcactttgacagagaagccatccttaaccggatggcttttttgcgttttttttatttattgatcgttatttatacgagaataagcggctaatacagttcgttctgatagatttaaataatcttccattttttgtgctgctaattctgtttggcctgaatttaatagctccagaatatgtttattcttatcgacataaggcgcatacaacagttccgggtcatttaaaagcccaaacgctaaacggagttcggctgaaatattccggtagaaggtcattaatctttcactgtcggccaattctacaatcgcggcgtgaaaacgcatattggccgtgcctacaccaacccactcctgcttatttctgtattgaccggcactgatgacggcttcttgcattttatttacgctagggtgcatgggatatgcttgtgcaagagcctgacattcaatcagcctgcgaacccgataaatatcaataatggatgcaatatctggtattgctacaaacaccccccgattaggctggtgttttagtaaaccttcttgcgtaagagtacggaacacttcccgtaaggtgttgcgggaaatttggagttgttcactgagagctgcttcagataagcgttgtccgggtaataattctccgatcaccagcttatttcttattacttctgcaatttttttactcaaaatttggggagagctctctattttcatagtcatccgttgggctatcgctgagaaaagtgtcttctgtgttcaaaacttaatcttcacatattcccggataaccagcaagccgaggctatttccctgcttatcttctgcaattttgagataaaaattagcgctattttgaactgataattttcccgttaatttgaatagagtgatcgctgttgtatttttgcacaataataagcgaatttagttgattatttactcatcagaaattatcgattgttcaacaattttataattatggtttaacaactatgatgaaaacaatcgatttaaatagcgatcttggtgagagctttggtcagtggaagatgggtaacgatgaagccatattgggtattgttagtagtgccaatgttgcctgtggctttcacgccggagatccggctgggatcctgaaaactctgaaattagctagggaaaatcaggttattattggcgctcatgtctcttatccagatttagttggttttggccgacgtaatatggatctcgccagtcacgaactcaccgcggatgtaatttatcagatcggtgccctgcaagggcttgctgcttctataggaacggcagttaattatgtaaagccacatggcgcactctataacacgatagctaatgatgaacgtcaggcacttgcagtcattgacggtattttggccgtagattccggccttgccttagtggggctggctggctcaaatattctgaggctagcgcaggaaaaaggtctgagaaccattgcggaagcctttgctgatcgtgcttatacagcaaaaggagaactggtttcgcgccgtgaagccggctctgtattgcatgatgccgctcttgttgcacagcgtatgttgcagcttgtgacagaaggtggagtggaatccattgatggcaaatttacccccattcaggcggattctatttgtgtgcatggagatagtttcggtgcgctggaaatggctaaacaggtaaaagccattttgcagcaggcaggaattactgtccgctcatttattcattcttaatcagaatggtcgatattgtcaggagataactgtgcgttttttacctgttaattttcataccatcatggttgagcttagcgacttgcctgaaactctggcgttatttgattctctgaatgctgaatcaatctcaggaattgaagagataatcccagcagcgagaacggtgatgattcgctttcaccctctgatgatttcagcccagcaactggtggcagaaattcaacggcgggatctgcaaaaatcttcgcatatacaaggaaaacagattgaaattccgatgcgctacaatggagaagatttagaggaagttgcggagatactcggaatatcggtacaggatgttatccaacaacatgcggataatgaatatatcgttgcatttaccgggtttgcgcccggatttgcctacatgatctctgaaaccatcgcctggaatatccctcgtcgtaaaacgcccagaacccgtattccggtaggttcagttgctctggcgggagaatttagtggtatttacccacaggcaagccccggaggatggcaactcattggtacgacatctgaacgaatatgggatttatcccggattgagcctgcgttattgcagccaggttatcgtatccgattccgtaacgtagaacactccacagtaacagtcagtttacctgcaactcccgttgttgattcgcttgttccggttgatagcgccagtattttagaaattcagtccgcaggattacaggcgctatttcaggatttagggcgtttgggtaaatcaggactgggaatatctgcatcaggtgcgatggataaaagtgctttacgcagtgcaaatcgcatagtgggtaacccttctgataaagcttgtctggaaattacgcagggaggacttcacgccattgcccgtgggcaaacagtcatttcagtaaccggtgctttatgcccgattcaaatcaaaaccccacaaggaaagcggcttaatgtaagcgcttatcaacccattgatttaaatgatggtgatgaaattatattgggtgttccacatgaaggaatgcgttcttacttggcagccagaggtggttttattgttccggaggtactatccagctgttcatttgacaccttgtctaatattggccctgctccgttaaaggcgggtgataatttagcgataggtgagacttcgcattgcccagcggtgtctgttttagaaaccccagaattcgtgatgcccaataaagatgagattgttgtactggatatatttttcggtcccagaactgactggttcactcaggaatctatcgagttattacgaaatcaaatctggcaggttacgccacaatcgaaccggattggtttgagattaaagggcgattgcccgttgtctcgaattaaggatgaagagctgccaagcgaaagaacctgttttggtgcgatacaaatccccactagcggacaacccgttctctttctggcggatcatcccgtgacgggtggataccccgttagttggctttcagttgagctggctatcatcttgatcttgctggccagattccgatcaatgccaaacttagatttaatcccatcaatcagtttcatgacattcaggggagtgaagagctgcaatgaataccactgtgcaccgcattaataaaaccacaaagaaaaataaaaccacaaaaaaagtcttaatcgcgaatcgtggggagattgccgttcgtattattcgtgcctgtcgtgattatggcatacagactattgctgtttatgctgatacagatgtcaacgcgttgcatgtgcaactggcggatgaagcctattcactggcaggaaatagcccggcagaaacctatcttaatattcctcgtttgttggatattgccaagcaagcgcaggctacgatggtacatcccggctatggttttttatctgaacgggctgaatttgcccgcgctgttattgaagccggtttaatttggattggcccggaatccgatacgattgatgaattggggaataaagttaaagcccgccaaattgctcagaaagttggagcaccgttagtcatgggaacggcagagccggttaaaaatgcgcaggaagttatcacttttgctgaaaagcatggtttaccgatagcgattaaagcggcatttggcggcgggggccgtgggttaaaagtagcatggcggcatgatgaagttgaggagttgtatcactctgcggtgcgtgaggcgacagctgcatttggccgtggcgaatgttttattgagcagtttctggataagccccgtcatattgaggcacagataattgcagataaacacggaaatgtggttgttttaggcacccgtgactgctccttacagcgtcggaatcagaaactggtagaagaagccccggccccttttttgactcagcaacaacgggagcgcattcatcagtcggcaaaagcgatttgtgcagaggctaattatgtcggagcaggaacggttgaatttttgctgagtgttgatggaacactctcctttctggaagtgaatacccgtttacaggttgagcatcctgtgacggaagaaacaaccggaattgatttagttattgagcagttgagaattgcagaaggctacccattaagcattcaggaaacccctatttctcgcgggcattcgtttgagttccgcatcaatgcggaagatgccggaaaaggctttttgcccgcatctggcgctcttaccgaatttatcccaccttctggccccggtattcgtttagattcaggcgtaatcaatggctctgtcattccgacaacctttgattcgttgatggcaaaactgattgtcacaggagcaacgcgtgaacaggctcttgtccgtgcgcgtcgggccttacgagaatttaaaatcagtggagtagcatcagttttaccttttcatcaggcggtgattgaacatcctgattttgtatcagaggatactttcaacgtccatacccgttggattgagacagaatttgccaatcaactggcagctttactccgtcaggatctggctgaaagcaaaggcatcatccgtacatttattgagattgatggtcgtcggcatgaaatgggattgccagcggatttattggcaggattaacgcctttagtgcctgctggtgagccacaatcttcttcgccggtagtccaacaaataccggaagatcctcatcaggtaaaaacacccatatccggtatcctgcattcgtggctagtacaggagggagagcaagtcaatgaaggagatgtgattgctatcatggaagccatgaaaatggaagtacagataaatgcacatcgctcagggaaaatcacattccgtgctcaggaaggtgattatcaggatgcagaaagcattctggcgaacattgaatagcctgattatttgaaaaatcaaatgggtataaattgactctaaatttatacccctctagtcaatctgcttttgtggaatcagcctcttcttagtatcgctgtattggatggcacctcaccacctaacccagatagtaaaatctaacgataatcacttaatgctatttacatttcttttgtgaatgtaaataataatgtttctcaataatatttgaactaaaaagtaaatgtctaaaactaccaaaatttacgcaagcatggctaaaagtggtttgtgtgttcctttgatgtcagcatctatgttgaccatcgctatttcgactaacgcagtggcacataccgaagaatcaaccagaaaatcagcctcaacaggcgatacacttgttgttattgcgggtaacagttcagaacaggacagtggaaaagtcagtcgcaacgaaattaaagttaaacaggcacaaagtgtcggtgaagtattaaagaatgtgccgggcgtacaagccgggcaccctagcgctttagggcagcgctttaaaatccgtggcatggatgaccaatttatcaatgtgacgattgatggtgcaagacaggaaggctatcactttcaccatgcagggagctacggtattgatcctgaaatgctgaagcaaattgatatcaatgtgggtacgaacagtattacctatgataccggagcattagttggttcattaaaatttgaaactgtcgatgctggcgatttattagaaccgggtcgcttatttggtgcaaaaggaaaattaagctatgtcagtaatggctctgaattccagaagtctttggcagcttatggaagaattggtgctgtagatttattgggctattttaaccatcgcaatatgagtgatgcgaaaacaggcagagataaagccgggcaagaatccattcctaccgatgggaaactgatcaactatttattaaaagctaagttcaatctgactgatgagcagtatatcaatgtctcaaaagagcattatcagaatgatgcagatactaatttcagattgaatttcggcccggatgtaaacaaaggaaggaaagggaaatacgctttagagcgtgatgcttataatatcgcttaccgatatgtaccggttggtaatgacctcattgatctgaagatctctgcttatcacacagaacaaaatttcaatcatatgaaggaagtcggtggtccgggcaaaggctttgacacgattaccgaaactcagggtatcagagcgcgtaacgtttctagttttgatacttatcagctagcccatgctttcacttatggctatgagtatttcgataccagaatggcgtatacagaggcagcaagaaatacatataacaaagtggtagaaacaggaaaatcatcttctgtttatttagaggatgatattcagtttgctgattttcatttcattcccggcgtccgatgggatcattataaatacaatactattaataaaaagaatgagccttttgaaagaacctatgctcatttctcaaaagcgttgggtctgaaatacgaactgggcgcatcaacaacgttgtttgctaattatactgaactcttcagaggtccgttgggtaaagaaatcggcatgggcccgagtaaccacaatgctaacttaaaagcgacaacgggttacaatctggaaacgggtgttggtggtatttatccgtctgtttttgctgaaaatgactcatttactgtcactggtaaagtattccagaccaatttcaaaaatctggctaccacgttagcaaaaagctcgcttaataatatccctaaatccagactggaagggtttgaactagcgactaaatataaactggataactggtctttaagagcgacttacgctaaagcaaataacaaaatcgttcagggtagcgcgttgtttgactcaagattagagtttacaccgtccattggtgattctttcactgttggcggaagctacctatttgataaaacagatattgaacttggctggaattcccgatttgtccgctcaacaaatgcgaatgggacagataatggcaaagttgtaaatattcataaagcgggctttggcgttagtgatatgcatatttcctgggcaccaacctcaggcgtatttaaaaacgcagaactcctgtttggtatcgataatatcttcgacaagcgttacaacgaacagtcttactatctgaacacctataaaggtcaggaagagaaaggccgagcttataaagcgacggtttcttataagttctaagaaacgagctgtaacttttaatcataaccacccgtataacgggtggtttgctcttgccctataagggcttgttaccgactgcgcctaaatgacgctgctttctcttcgttcaagctaagtgtctttgctgctttggcctaccccttgaaggggtctacatgctctttactactcaatttatccgagattaaaatccgacttttcttgctctctgatatacttttgaattgtcgcttcatttagccctaccgtactgacatagaacccttccgcccaaaactttctgttgccaaatttatattttaaattggcgtgtctatcaaagatcatcaacgaacttttacccttcaaatatcccataaagcttgaaacgcttagctttggtggaatactcaccaacatatgaacatgatctggcatgagatgaccttcgattatttccacacctttatacttacaaaggtctctgaggatctctcccacacttgaacgaatattattaaaaatcactttccgtctatatttcgacgaaaagacgatatggtatttacacagccactttgtatgcgctgagctttgtgctttaatgcccataaacacctttccttatttgagttacgaatattagcttgtacatctatatcgtaacggaaaggtgtttttcttggtataacctttgaactccacccgcaaagcgggtggttttatgtttaagacgctaacgcgacttaaactggctaaagccataaataataaaagcctttttattccaagataaaaaggcttttattggctctgtgggaagtcatgctcagttgttcaaagtgactacgatttacattgcctgaccacttcacggacatactgttgcagataatctaatttggactggtcactgatgatccctgctcggatatcgtaaatatcgcgtccagcttttgcagtgagttcgacttgggttccatcgcccatgctgcgggggccggtatctcgcttttgggtgagctgacaggtagcaaggttggcggcggcgatttgcacccggcgatgaccagcggcaatatcagcacgcaaagcggtgttttcttcagtaacatgggctagttttccggaatagtattcatctaattgggcggctttactctgagcatctttcatcttttgaatagctgacaatgtttcctgattcgctttctgatgaatggcaacaacctgagcactatgctgttgtttaaggttcgcaacctcaccaaggaacagtgaacgatgcccccaccagccagtacatcctccaatgacaaaaatagcaattaacgatattttcttcattcctccaatccccaacaaaccaactcagattcctgttcacgtcggaatacctgcccataacagccattcggctgtcctttggttgcccggcaatctcgcccgccatcgtaaatccagcgtttaatctcctgacaggcgccttttttatctccggcattgagtttgcgataaaaggttgaggagaaacattttgagggaccgatgttatacgggcaaaaactggcaattcccgcaatttgtggctcggtcagcggaacatgaacgttctttttcacccaatcaatcgctttgtcagcttcaacccgattcagcgcttcacattgctcagaagtcagttgcatccctttatataccgcctttccattaatacgcgtcacaccccggcatatcgtccagataccaccggcatcctgataagcaacaagccgattgccctctttctcatcaagaaactgggaaagaatgaccgaagaactggcgccaccgataatcaggccaatgagcaaccggctgagtctggttttgagatcctgcatatcacagctcttttggtgcgttatgtatcagctcgctgacgattctggctgatttagatgcaggctctacctccagattttccagaatatcttttaagatcaaagtgcgtttcatctgctcacgtcgattaagacgataagtcagaataccgagagaaatgctggctaatactcccaacagaaaactcagctcatataaagaaagaccggaaaaaatggcggttgtgctggcacaggcataagtggcatggctatatttatccattcatgcccctcaatcccaaagctgaatcataggcttactggcaacgggcacaaaatccggcatttcaacttttgttccatgaggcaatgtcgcgccaaaatcagccagccccggatttgcctgcaatacacgctccgtcatacctaaagtccggccataatgacgccagcacaaagcgtctaccgtttcgttttgttgtgcaataatttgcatatactctccttttatttgcagaaaataatcggtaaatcggagagttatgatcgaataatcagcgaaatgcctcaatgaaatggcattgttggggaaatagcacaaatgaagggcaattttgccagatgggatttattttcactgttcaggaaagtataagggcaggggataatccctgcccttatactatttaaattgcttattatccgtttattggagggttcaacccatcaggcctaatccaataaccaactatcgtcctcccagacactttggatcagttccatgatttgatcatggtcactactgtttttactccctgtcacttttacggacgtgttgctgctgagggcaattctaaaattagtatcaggatactgtggcagtattttcttctttaactcgctttcaagtgcagacatgactgattcagaaacattagctcgcttatcgaaaagtatttcaactcgcatcattttctcccgctaaaacctattcttttaccgaacccgaagtttttcaatcattcattatctaatgatttgttttttaaaaaattgttataaccactgagacttttttcataaggtgcagataactctgctatccagaccagtgccaattctttgtcttctgcctgattgcattcacaacttgttgccattctggcaataaaattaatacgttgtgctaccaatgattccataagagagtccactgatatgtccgcctccactctataactgtatatgcatacagtacacctaattagtgaaaatttaaagtagttttttcctttcttaaagataaaaattgatagttaataactattatttatttctttcatagaaacttttatctaaaaaataacatttatcaaaaccatttcacatctatatcacaatctcgtcttccctgtctatccgtacagttattgacagaactccaagagggccattttttgtgtcgtttatagacaatccgctctgatctgatgtagctggcgcatcagatttcgggacaactgtccattgatggatccgtgtacagatatatttttcctgactgaacaacgacgatgtcactccctgaatggagtgaatatcttcaccataaggactaccaaaagggatacgcttataagagagcctgataaccaaatcacgacgggcaacccatggccctccctgagcctgaatataagccgcccagtttcccttatccgcagcctgtaaaacgtcattcattttattatcaggtaaatgaacttctttaagtcgacgtagttctcgccagacagaaaccggagcaccaccaatttgttgaaattgtcgaattcgccaacgactcgcccaagctgttactgatttagccatatcgcgcagtgatcctcccgtttcatgatcgatttcatcttccagagtataaccatcaatatttttggaaatgtactttgcgatataacctgtcgcgctactttag

SEQ ID NO: 1850 - DNA, 11844 bp, Xenorhabdus sp.; identical to SEQ ID NO: 1849
  CDS (3954)..(5732)

SEQ ID NO: 1851 - DNA, 11844 bp, Xenorhabdus sp.; identical to SEQ ID NO: 1849
  CDS (2375)..(3967)

SEQ ID NO: 1852 - DNA, 11844 bp, Xenorhabdus sp.; identical to SEQ ID NO: 1849
  CDS (1546)..(2310)

SEQ ID NO: 1853 - DNA, 11295 bp, Xenorhabdus sp.; identical to SEQ ID NO: 72
  CDS (3215)..(4972)

SEQ ID NO: 1854 - DNA, 11295 bp, Xenorhabdus sp.; identical to SEQ ID NO: 72
  CDS (5134)..(5418)

SEQ ID NO: 1855 - DNA, 11295 bp, Xenorhabdus sp.; identical to SEQ ID NO: 72
  CDS (6810)..(7037)

SEQ ID NO: 1856 - DNA, 11295 bp, Xenorhabdus sp.; identical to SEQ ID NO: 72
  CDS (7069)..(8811)

SEQ ID NO: 1857 - DNA, 11295 bp, Xenorhabdus sp.; identical to SEQ ID NO: 72
  CDS (9997)..(10122)

SEQ ID NO: 1858 - DNA, 11295 bp, Xenorhabdus sp.; identical to SEQ ID NO: 328
  CDS (11069)..(11290)

SEQ ID NO: 1859 - DNA, 11295 bp, Xenorhabdus sp.; identical to SEQ ID NO: 328
  CDS (8265)..(8972)

SEQ ID NO: 1860 - DNA, 11295 bp, Xenorhabdus sp.; identical to SEQ ID NO: 328
  CDS (4764)..(5771)

SEQ ID NO: 1861 - DNA, 11295 bp, Xenorhabdus sp.; identical to SEQ ID NO: 328
  CDS (1756)..(2094)

SEQ ID NO: 1862 - DNA, 11815 bp, Xenorhabdus sp.; identical to SEQ ID NO: 73
  CDS (872)..(1648)

SEQ ID NO: 1863 - DNA, 11815 bp, Xenorhabdus sp.; identical to SEQ ID NO: 73
  CDS (1680)..(2030)

SEQ ID NO: 1864 - DNA, 11815 bp, Xenorhabdus sp.; identical to SEQ ID NO: 73
  CDS (2240)..(2677)

SEQ ID NO: 1865 - DNA, 11815 bp, Xenorhabdus sp.; identical to SEQ ID NO: 73
  CDS (2768)..(3541)

SEQ ID NO: 1866 - DNA, 11815 bp, Xenorhabdus sp.; identical to SEQ ID NO: 73
  CDS (3734)..(4753)

SEQ ID NO: 1867 - DNA, 11815 bp, Xenorhabdus sp.; identical to SEQ ID NO: 73
  CDS (5169)..(6473)

SEQ ID NO: 1868 - DNA, 11815 bp, Xenorhabdus sp.; identical to SEQ ID NO: 73
  CDS (11340)..(11786)

SEQ ID NO: 1869 - DNA, 11841 bp, Xenorhabdus sp.
  CDS (6724)..(7047)
  unsure (1)..(11841): unsure at all n locations
aatatttgactcattatcagtctaacaagcaggagttaagtaatgtntatgtcgtgctctcgtctcaataacgaaaatcagcctgcatatgaggtaaattacgtattcctttcttctgattgcaaattttcgatcaactctgcttcagcagattatctggttgggctcaaatcccccatcccatccccatgctacagccccagtttaattgccctcgctcagagagtattgaaagaagtttaactataacacattaatttttattcattattttgggttaagtaaatcatattcaatcattaggctaatcaataagcctaacaagcaggagttaagtaatgcctatgtcgtgcaatcatatcaacaacgaagcccagccttcatatgagaatacttctgaatcttcctcttgcacattctcgctcagttctccgcaacaggttgtctggcttgatcaaatccttcgccctgataatacctgttacaatatcggttcagtgattcttattgagggagaattagatgaagcgctgttaattcaggcttttaaaaatgttgttgagcgtcatgatgcactccgtctacgattgattgatacgcaagaattacccctgcaaaaaattgataatactttacctgtttccgtaacagtgaatgatttttccgggcatgacaacccagaagagttggctgaacagcatttccacacaacctttttacgcccgttcgatttaaataatgagttattccgttttgagctgttccggctgggtaataaacgctggaactggcagttcttctgtcaccatcttatcggagatggaaccactttagggttgattaccgaagaaatagccaacacttacagtcaattggccagaggtgaagcaatcactgaaagcgcctcctcttatattgattttgtagatgaagatatcgcctatctggattcaaaacgctatatacaggatctgcaattctggctggaacgctatgaaaattttccctctgcattactcaaaccatcaaattcagataaagccacagaacaccagccccctgaacctttagtttatcaatttgaccggacgctttttcagcggatcgaagagctggttgcggcaaacgggttatccgtgctgcattttatgtatgccattctggcctgttattttttcaggacaacgcatttttcacgcactgacagctctgaggaaattgtttttggcatccccgtacacaaccgtaaaaacatcaaacaaaaacgtatggttgggatgtttacctcagtgatccccgtgggtattagcgtagacccacatgattcttttcttgatgttatgagaaaagtagcaaccgagttgcgacgttgttataagcgccaacgcttacccattgcagaattaaaccgacatttacaaacccgtcagaaaacaggccagaatcagttgttcgatatcatactgtcatatgagaagatcgaaatgagtgccagtctgccggaggcttcactcacatgtgtcaaaatgcagcgcggtaacccgtttcctctgattgttgcaatccatcattatgcctttacaacgaacagtgaagatatccgaaaaccggtgacactggagtttaattactctcccgattacctgagccatactgaggttacagcacttcaatcccgtttaatcaccctgatagaagccgcgatctctgctccggaaaccctgacccgatacttgccggtgctatcgccgactgaacagcaaaaaatattggtggattttaatgccactcagaagagctttacgcaacatgtcttaattcatcagctttttgagacccaggcagagctgtcccccgataacattgccgtcgagtttaacgggcaaaaattgagttatgacgaactcaatcgccgcgccaatcgtctggctcattatctgattgcacggggtgtaagaccagataaacgagtcgcgatttgtattgagcgcagtctggagatggttgtgggtttactggctattctgaaagcgggcggagcctatgtgccactcgatccggcttaccctaccgaacgactggcctatatgctggaagattcagagccagtgatcatactgacccggacaacactggctgacaaactgaccagctccgtgccaataattctgctcgataatatactcgacaccgatccttcatttctggcagaacaaccggctgacaatccggatgcacaggcattagggctgatgccacaccatctggcctatattatctacacctctggttcaaccggtcttcccaaaggcgtgatggttgaacataccaatatcactcgcctgctggcggcaacacactcgcgtttccggtttgataacaacgatgtctggacgctgtttcactcctttgctttcgatttttcagtgtgggaattgtggggagcgttggcttacgggggcaaactcattgttgttccacttgaatgtgcccgctcgccccagatgttctatgagctgctttgccggaagcaggtcactattctgaaccagactccaagtgccttccgtcagttgattgcggctcaggagatgatgccgcatgagcagcacacactgcgctgcatcatattcggcggcgaagcattagagttgcacacccttgccccgtgggttgaacgcaatcctactgaacagacccgtctggtgaatatgtatggcatcacggaaattaccgtacatgcgacctaccgtgaactgacggaagcggagatccatgcacggcatggcagcctgattgggcagcctctggaggatttacgcatctatatccttgatgcctatgttcagcctgttccaataggcgttgctggcgaactctatatttcaggtgctggcgttgcccgtggctatctgaaccgtcctgatctgactactgaacgtttcctgcccgatccgttcgccggtaatccggatgagcgcatgtataaaaccggggatgtagggcgctggttgcccgatggcaatattgaatatcttggtcgcaatgattttcagtacaagatacggggcttccgcattgagctgggggaaattgaagccagacttaagcaatgccacggtgtacgtgaggccgtggttatccttcgtgaagacgaaccagaaaataaacgtctaatcgcctacttactgccgcagaatggtgttgaactggttccggcggttctgcgccgccagctggcagaacatctgacagaatatatgctgcccagtgcgtttgtggtacttgccgcttttcctctcacaccgaatggcaaactggatcgccgtgccttgccgttgcctgaacactctgcggtagtcacgcatgagtatgaaacaccacaaggaaggatagaaacggctttagcgcaaatctggcagaatttattaggattagaacaggttggtcgccatgaccatttctttgaattgggtggtgactccctgctggctgtccagctggcggcccgtatacgtcggatcatgggacgagaactccctctgcaacagatttttagccgacctgttctgatggagttagctcaggttattactgaagcagcggtatccacgcaggctattatcccctcggctgatcgcagtcagccactaccgctgtcatttgcccagcagcgcttatggttcctgaaccagctcgattcggcggccagccgcgcctaccatattccggtggcactgcgtctggcaggtctactcaactatcataccctgaccagtacactcaattatctggttgcccgccatgaaagcctgcgcactcggtttattctggttgaaggccagccttatcagcatatcgatcctgctgataccggctttaccttgtcctgccatgagttacgcaacttagatccggcgcgacaagctgtacgaattgaagagattacagcacttgaagctcagacgacctttgattttatccacgggccactagttcgtggtcatctgctgcaactgaccgatgaagagcatctgttactgatcactttgcatcatataatcactgatggctggtctatcggtgtattcatgcgtgaactggatattatctatcatgcattgcttaacggtcatgatatatctttgtcacccttatccattcaatacgccgactatgctgtctggcagcgtgaatggttacaggaaaatatcttcacggcccaacaaaatttctggcgtatacagcttgagcatgcaccggcactcctgtcactcccgacagatcgtccacgtccggcaatccagtcctatatcggcagtcaggtaccttttcagcttgataacacggtgctggcatcacttcaggctctcggaaaacgccacgataccaccctttttatgacgcttctggctggctggagtatcgtgctgtcgcggctgagtggtcaggatgatgttgtcattggcacccccatcgccaatcgatcactctctgagcttgaaggattgatgggattttttgttaatacactggctcttcggatcaggctcaataatcatttctctgtcactgacctgttggctcaggtgcgggagcaggcactggctgcttacgctcatcaggatctgccttttgaacaagtcgttgaagccttacagcctgaacgtagtctcagctatagccctatctttcaggtcatgctggcgctggataatacgccggttcaggatcagacatcacatgagttgcaaatcacccggcttgagcaggcaggtcatagtgcccacttcgatttaatgctgatactggccgacagtgatacaggtctgactggcgggctggaatatgccgctgatctgtttgatgccgcaaccgctgaacgcatggtgggttatctcatcaatgtactgacagcaatggcagaagatgaaacacaagccattacgcacctgcctatgctgtccgcagcagaacggcagcagttgctggtggatttcaacgccacacaagacactttttcagaaataaacagcccacaacccgccctaatccatgaactgtttgaacaacaggtgacacaaactccggatgctatcgctgtcgttttcgaacaacaaaccctgagctatgacgcacttaaccgtcatgccaaccaactggctcattatctggttaagctgggaataaaaccggatgatcgaattgccatttgcatcgaacgcagccccgaaatgattgtgggcttactggctatcctgaaagcgggcggagcttatgtccctttcgatccggcttaccctgctgaacggctggcctatatgctggaagactcagccccgacagccattctgactcagacaacactggctggcacgctacacagctctgtaccaattgttctgctcgacaatatattcgatatcagctcctcccctctggcagaactgcccgatcacaaccttgacgcacagtcactggagctgacttcacgccatctggcctatgtcatctacacctccggttcaaccggtctgccgaaaggtgtggcaatcgaacacagcaataccgtcaacttcctgaactgggcgcggaaaacattcagccaacaagagctggcacacccccttttttccacgtcactgaattttgatctatctgtatacgaatgtttcacacctctgctttctggcggtacagtgcatcttgtccctgatgtgctatcgctgatcaatacaaggtctatcgctgcaaaacagaacctcagcctgatcaataccgtgccctcggctatcccacaactgattgaagccaatgcgatacctgcaaatatcgcaaccatcaatctaggcggtgaagcgctgaaaccacatatagttaaacagttatttgcacacaccaatatccggcatatatacgatctgtatggcccttcagaaacgaccgtttattcaacgtggacacgtatggagcggacaacgggttttcacaaccacatcggacgcccgatcgccaatacccggatttatatccttgattcatcagctcagcttgtccccataggcactgtcggtgaaatccacattgccggagcgggtgtagcgcggggatatctgaatcgtcctgaactgacaatggaacgtttccccgccgatcctttctcctcagaacccaatgcccgcatgtacaaaaccggtgatctcggtcgctggctgcctgatggtaatatcgaatacctcggacgtaatgattttcaggtcaaaattcgcggcttccgcattgaactgggagaaattgaagcacagctgatgcagtgtcacggtgtgagtgaagccgtggttatcgcccgtgaggatacttttaatcaacaggctattgaggaaaaaaccggtgaacagaaacggctgatcgcctatttacgtccacaggagggtgttgaactctcccctgcagaactgcgccagcaactcgctcaacaccttgctgaaatatatattgcccagtgctttatttgtgttggaaaccttcctgttaacccctagcggaaaaacttgatagtcaggcaatgcatgagcctgatgttttgacagtgataacccgcaggttatcaggctccctataggggagaaagaaaccgcactagcgcacatctggcaagagctgctgggattagagcaggtcagccgccatgatcacttctttgaactcggcggtcattcgctgatgattgtcagtctgattgaacgactgtacaaatttggctggaaactggatgttcgcagtgtgttctcagcgcctgtcctgatgataatggctcaggcgattgagggagatgccgatacttttgttgttccgcctaaccttatcccggatgattgcacagccattacaccggatatgctaccgctggtttcactttcacaggccgaaattgatgcgattgtcgaagtcactcccggcggagccagcaatatacaggatatgtatccactggcaccgttacaggaaggcgttctgtttcaccacatatatacaggaacagggtgatatttatttgctccattgtatgctcgctttcaatacccgcgcataccttgatgatttcctgtccggttttcagtatgttatcgaccgccacgatattctgcgtacagccgcctgctggcaggggctggtcaaaccggttcaggtggtctggcgtcaggcacggctgacgatcaatgagttcattccgtccacaacagatgatattcccgctcagctcagagcgctcaataatccgcgtgaacaccgtcttaagctaaaccatgcaccactatttttggtagatattgcttatgatctggtgcaggataactggctgctggcactgcactttcatcatatgaccgctgaccatatgacactggagctgattttcgacgaaattgccctgatacagcttattcagaaacaacaagaacaacctgaaacattacccgctgctcagccttatcgtaactttatcgctcagacgttaaacgtaccaacatcggtacacgaagcctatttccgtgaacaacttgctgatattgacacgcccaccgcaccttttggtgtgatctccctatcggatgatgaacctgttgctgaagcgcgcggtgactttcgatccggttctggcggagaatatccgccatcaggcccgtcgtctgggcgtcagcccgggagtactgtttcatgtcgcctgggcacaggtactggcacaaaccagcagttgtaatgatgttgtattcggctcagtgttattaggccgattgcagagtggcaaaggaacagcccgaacactgggtatgtttatcaataccctgccggtacgggtttccctgacagaccagagtgtgctggataccgtacaggctacctatcgcaatctgactaccttactcgagcacgaacaggcaccgctggcactggcacagcaatgcagcggcgtgacgcaaccaatgccactgtttagtactctacttaattatcgccatacccggctcaatgaagctgatatttttgagatgcctcagctgggtatgcgtattctcacggcggaggagcggacaaattacccaatcaccctatccgtggatgatacgggagcagggttccgtctgacagctctggcgggatcaggcattgatccggcacgcattaccacttatctggaaactgcccttcgtggcttgactgactcactggctcgcaatccgcagcagctgattcaggagttatccatcctgcccgccacagagcgacaacaaatactggtggattttaactcagctcaaacaaccttatcgccaacagaaggtgcccagccgggtttaatccaccaattatttgaagagcaggccgcacatcgccccgacaccatcgctatagtgtttgaaggtaattcctttagctatggcgaactgaatcaacgtgctaactatctggcgcatcatctgattgcgcaaggtgtacgccccgatgatcgtgtcgcgatttgcgttgagcgcagccctctgctgataattggcttgctcgccattcttaaggccggaggcgcatatttaccccttgatccggcttatccgacggaaagattgcagtatatgcttagggatgctgcccccgtagccatactgactcataccgctcatgcggataaattgtcggaaaaccacattccgaccgtattattggatgaacaggaaaccggcctgcccacacaacaggtcgataatcccacgatccacctgacatcaaaaaatctggcctatgtgatttacacctccggctcaaccggacaacccaaaggagtcatggttgagcatcgtagtgtgctccaccttattatcaataacagctttgcgaatatcggccctgatgaccgtgttgctcattgtgccaatatcgcgtttgatgcctcaacatgggaaatctggtcagtcctgctgaatggcggatgcttacatatcattccacaggctgtattgctggatccggtgcgtttcagtcatgcactcatcgaagggaaagtgaccgcactctggctgactgtcggtctgttcaatgcttaccttgatattcttatgccgctgttcaggcagctacgttacctgctggtcggtggtgatgttctcgaccccgttaagatccggcaggtattctcgtctgaatctcagcctgcctatctgattaacggctatggcccgacggaaaccaccacgtttgcagccacctatgtaataacatcccccattgatatcactcgttctattcctatcggccgcccattaaccaatacgcaaatctatattcttgatcccaaagggatgcctgttcctgttggtgttgccggagaaatttatattgccggagccggtgttgcccgtggttatttaaatctacctgagctgactactgaacgttttcttgagtgtcctttttcctcagagcctgatgcgcgcatgtataaaacaggggatctggggcgctggctggctgatggtaatatcgaatacctcggacgcaacgattttcaggtcaagatccgtggcttccgcattgaactgggggaaattgaagcacaactgatgcagtgtgacggtgtgcgtgaagctgtcgtgattgcccgtgaagacgaatcaaagcaaaaacagttggtcgcttatttacagccacacaatggcctatcgttaatacccgctgaactacgtcatcaactctcacaacaccttgctgactatatgctgcccagcgcttttgtcatgctggaaactttcccgctgacatccaatggtaaactggatcgtcaggcgcttccggtacctgatctgacagcaatagtgacacgtggttatgaagcaccgatcagtgaaacggaaaccgcactggctcagatttggcaaaaattactcggcgtacagcaggtcgggcgttatgaccatttctttgaactgggaggacattccctactggcagttcagtttgtcgcatacgttcgtcaggaactggcaaaaaaactgtcattaaaacaactctttgatcagccagttctggctgagttggcacaactgctcactgaaactacaactaccagccaaatcgggatccctgttgctgacagaaaccagccactgccactctcttttgcacaacaacggttatggtttctggcacaaatcgatcaggccgccagtctggcctatcatattcccgttgcattacatctcagcgggcaacttagtcaccacgcactgagtcaggcactgaataatctggtggctcgacaagaaagcctgcgcacctgctttatctctgtagcaggttatccctgccaatacattgatcaggctgatatcggtttcgcgctgtcttaccatgacctgcgcccgttagcgcctgaagaacgaactgaccgtattactgaactgaccgctcttgaaacccggacgccatttgatttcacacaggggccactggttcgtggtcacttgctgcaactggctgatgaagaacatatctttctgctcacccaacaccatatgatttccgatggctggtctgtcggtgtgctaatgcgtgagctgagcgttctctatcatgcggctcttgaaaatcaggccaacccgttactgccattacctattcagtatgccgattatgccgtctggcaacgtggctggttgcaggaatcggctctgactgcacaacgtgatttctggtcttcccggcttaaagatgctccggctttattaactctgccgactgacagaccccgcccgacggtgcagtcgttcgtcggcggtcgggttcctgtttattttgatgccgaactactggcttcactgaagaaactggggcagcgccataacaataccctgtttatgaccctactggcggcatggagtattgtcctcgcctggctgagtgggcaggatgatattgtcatcggtacaccggttgccaaccggcctcaccatacactggaaggattaatcggcttttttgtcaatacattagccctgcataccagaataagcgattccgacagcgttgctgacctgctggttcaaatccgtgaacagatgctggatgactatgccaatcaggatctgccttttgaacaggtggtggaagcgttacagccggaacgtgatctcagttacagcccgatatttcaggtgatgctggctttaaacaacacccctgctcaggcattaaacctgcccgatatccgctgtacgctaatagaacagcccccccccagcgcgcattttgatttaaccctgtctctgaccgaaaacgaaaacggtctgacaggtgaactgacttatgccgcagatttgttcgattccgcaaccattgagcgcatgactggctatttagtcaatgtgctcacagcaatggtcactgatgatacgcaatgtattgccactctgcctatgctacccgcatcggagcggcatcaattactggtagatttcaatgccatccggagtgattcaccacagcccggcttcacaccagatgcacttatccaccagctgtttgaaactcaggtatcgcagtgccctgatgctattgccgtggtttatgaaaaccagacgctgagttatcacgaactgaaccagcgagcaaatcagctggctcatcatttactggcgctgggagtacatccggatgatcgggttgccctttatgctgaacgcagcccggagatggtcatcggtctgattgccacactgaaagccggtggggcttatgttcccctcgatccggcttatccggcggaacggcttagctttatgctgcaaaatg

SEQ ID NO: 1870 - DNA, 11841 bp, Xenorhabdus sp.; identical to SEQ ID NO: 1869
  CDS (435)..(6542)
  unsure (1)..(11841): unsure at all n locations

SEQ ID NO: 1871 - DNA, 6354 bp, Xenorhabdus sp.; identical to SEQ ID NO: 75
  CDS (2595)..(3854)

SEQ ID NO: 1872 - DNA, 6354 bp, Xenorhabdus sp.; identical to SEQ ID NO: 75
  CDS (4338)..(5900)

SEQ ID NO: 1873 - DNA, 15052 bp, Xenorhabdus sp.
  CDS (5432)..(6247)
cgttaattgcgggcacttgttgcaccatgcaagttatgtacacagttaagtacacaaaatgacaaccgactcatgtacaccgctttaactcgacggaggatgttatcacccatatcattcagcaacaaataaaaagaacaacataggtattattattcaatggacataaattcttttagccaaaaaaacggcagttttcctgtaatttctcagtctccaagatttcctgacttcaaggtttgaaaagacttgaacgctaatcactcaacttatgcttagacaattctgcatttattttttttattctccccggtgatacacttaacgttaaaaaacagatccccagcaattctaaaataatcatcagaaatatcataactaccgtattcaggctactgatatcctgaccatccacatataatattttaaatgcaataaaaagcatcaaaacaaaaataacaacagacattaatttctcaatccaataattgaaaacataagaagtatcaatttttatttttgcaaaatccgaattcaccatgacatatttttttaatcttttaatatcgaatatataccctgcttcaatgcctaaactggtcaattgtatgactaagtgcctaagatcctttgatttaatcttagtcactttaaacataatctcagaagtaataatatctttaatatagactttatcttcctcactcaggtattcatcatatttctcaagataatcaatattgtttgtgagccttctattcctaaaaaaattcaggctgctatagacatttttaagcatgacccagatacctccgagaaatgctgtcaaagcagacaatattgatgctatagcagagtaattttttattacccagttcagcaagtcatcaaacatacattcaccatagttgtttacatagataactatagtatgaatgccatattcaaattttcctgtttgataccacttacatggctaatactgatgctgacgagataattctgtccttatgtaaaaaccaccaaaatgaaggtggtttaaagataataacctgcgttaatttatctatttttatctggttgaccattatggttgccaaaaacttgttcaggaggtgaatcccatccatcacttctggttttttgatattcttgattcagtggataccagattttgttttcaggtttacttttttctccgacaaccaataacctaacttcggatcctgtattatttattacagtatgacaaatccctgtgccagccggaaaaccaacggtatctcccggctctaatcgatacagttctccgttaatccacacatcaggtgttccctcaagcacatacacgaattcttcttcattcttttctgcgtgggggtaagacgttctacgaccgggtaaaaggcgctcgtggtggatacccagtttctttagtcccagagatttaccaagagcagagcctatagtgaaaatttcattactattggggtatcctgctctctcttcttcttcgttttgtgtccaatgctgaataaattcaggtcttctgttttctcgttttaatgacatgacacttcctttattattaaaaaattattagtagtaggataattacattgttctgaaaatatatttagataactatattgggatggacgaacgtagccaacaaagagcaactggagagacggagcgtatttgtaaaagaaagctattatgtcctcttgataactaatagaaaaaataataaatcacatattcaattcagtgtgacaaaaatcactctaaattaagataggcattcttcactttccataaataacgaggggcctgtggtgcgggatgattattctggacatactgataaaactcattcggtgtcattcggttaattttattaattgccaacttacgatctgaatcaaatgtccgcaataatgccccagcgccattaacataggcaactattgttgcataatataaagtttcagggttaataattccgcttagatgctgttttttcaaaatactaatataggcagtgccaagatcaatattcgtttcagggtctttcaattcacgcatagtgggctgccctgacttacctttcagtcgataggcatccttacctgctgtagaggctttaatctgcatcaatccaactgcattagatttgctgataacttctgggcgaaagccggattcaacctgaataattgccctgatcaaaatttcatccaccccataacgttttgcagcctgtgcaataaaattatcaaagggtgttgctcttctctgattattcaatttattctgcgacaccataataccatcgccgccgaatattcttttcgatgttgatttatggtcattttttacttgttgagactcctgatttgtacatcctgttagcaatatcatcaaaaaaatatgaacatgaataaactttaatctcacgaaaagttctcctaaactaaaattaaccttataaagcatatataattttatgaataaaatgaaaatatttttatatatctcatcaaaataaattgaggcagttatattcaatgaacttcaaaacactagacaacatgttgtttttttgttcgcatgatgattttagaaaccagaaaaattcaggataacctgcaaaattatcaatcatatcactgtatcaccttgactttataaagatgatattgataatcattatcaacaatcgcatgcataacaaataaggtttacaataatgaacaaaaaacgttctttttctattttcccgatactccgtataactattaccctcttcactattaccttattcagcctgcaagctcatgcagataaaaaattcagggttgtaactacatttaccattattcaggatatggctcaaaatgtcgcaggggatgctgctattgttgaatctattacaaaacccggcgcagaaattcacgattaccaacccacccccaaagatatcattaaggcgaagcgagctgatctaatcctctggaacgggttaaatttggaacgttggtttgaacgtttttttgaaaatatgcaggatattcctgtcgctgtaatcaccgaaggtattactccactcccgatccgcgaagggccttataatcagaaccctaatccccacgcttggatgtctccgaataacgctcttatttatatcgaaaatatccgtaaggctttagtcacaaacgatccacaaaatgcagatacttataaccgtaacgccaaaatttatgctgacaagatagccaaactggatgcgccattaagagagcgcctgtctcgtattcctgaaaatgaacgctggctggtaaccagtgaaggtgcatttagctatctcacacaagactatggtttcaaagaggtctatttatggccaattaatgccgaagcacaaggtacaccacagcaggtccgccgtgtcatcgatacgatgatagaacataaaatccctgttgttttcagtgaaagtactgtttcagataaacccgcaaaacaagtcagcaaagaaaccaaagcacgatatggcggcgtactttatgttgattccctctctacagtaaaaggccctgttcctacctatatcgatctgttgaatatgacagtagatactatcgcaaaaggatttaatcaatgaaaaacgcatcgtcattatttgaaaagccacatttattagtcgataacgctactgtcacttacaacaacggccatactgcaatttatgatgcgagctttgatatcacaggcggcaccatatgtgcattagtaggaatgaatggcagtgggaaatcgacattattcaaaactattatggggttagttactccatctcaaggaaaagttacccttaatgagcaatccataaaaacagcactgaaaaagaatatcattgcatacgttccacaaactgaagatgtagactggaactttccggttctggtttctgatgttgtgatgatggggcgctatggaaaaatgggcttccttcgcaggcccagtaagctagaccatcaaatcgtaaatcgctcactagagcgagtcgggctgattgaactgcgtgacagacaaatcggtgaactttctggtggacagaaaaaacgggcatttctggcacgcgcactggctcaggaaggaaaggttctacttttagatgaaccttttaccggggtagatgttaaaactgaaaatgccattattgatttgcttcgtgacctgcgtgatgaaggacacttaattttagtctccacacataacctcggcagtgttcccgaattttgtgaccatgttattttgattaatcgcaccgttctggccagtggcccaactgaaactacattcacgcagaagaatctggaaaccacatttggcggtgttttacgtcatatcaatctctccggccctgaactccatgacgatgacgatcctcgttccctgaccgtcattacagatgatgagcgcgctgccgtattttacggtcatgataatcatgttcctccacgacaaagtcaaaaacagaaggatgaacagttatgatggaactgttgctacaaccatttaattataactatatggtgaaagccatgtgggtaagtgccattgtcggcgctgtttgtgcttttttgtcagcctatttaatgctaaaaggctggtcactgatgggggatgccctctcccactctgtggtgcccggagttgccggtgcctatgccctcggtttaccttatgccggcggtgctttttttaccggtatgcttgcagcattatcgatgactctcgtacgtcacatcacacgattacgtgaagatgccgttattgggtttatattttccacttttttcgctgccgggttattgatcgtttctttaaatccaacatccgttaatgtacaaaccatcatcctcggcaatattctggggatcgctgatgaagatgttttacaggtagaaatcattattgctgtatcttttattgttctgatgctgctctggaaagatctgctggttgtgttcttcgatgaaaaccatgcccgatccatcgggttatccccattacgcctgaaaattattttcttcactttattaagcgcctgtactgttgcagccttacagacagttggcgctattttggttattgctatggtcgtgactccaggagcaactgcgtatctactgacagatcgttttaagaatctgcttatcatttcagttgccataggcgccttaaccagttgtataggtgcttatattagctacttccttaatggtgcaaccggaggagtcattgttaccttacagactctgattttcctgctggctttcttctttgcacctaagcacggtatgttggcctatcgccaacgagctaaaaaagaatctcaggcaattactcagggagagcactcatgaataccttgattgagttcatcacggaaccttttatgcatgattttatgcaacgtgccattgtggctgcgatcgtcgtgggaactgtctgcgcagtattatcgtgctatttagtgctgaagggttggtcattaatgggagatgccatttcccacgcagtattaccgggaattgttctggcatttgttgcaggaataccacttgcaataggtgctttcctttccggaatattttgcgcctttgccactggatatctgaaagagcatagccgggttaaggaagataccatcatgggtgttgtgttttctggcatgtttgcatttggtctggtcctttttacccgcatagatacagaacaacatttgacccatattttattcggcagtatcctcggtattacccaaaatgaactgatccagataatgtgcattgcagggttcactctggccgttgttcttctgaaacgtaaggatttcatgctatattgctttgaccctaatcaggctaaagttgttggtctgccagtaaaactgctgcactatggcttattatctcttttggctttaaccattgtagcctcattacaagctgttgggattattctggttattgcaatgttaatatctcccgggattattgcttttatcctatgtcggaattttgaacgtatgatgattgttgccataatagcatcagtcacatccagtgtgcttggtacaatagtcagcttccacattgatggtgaaaccggcgcatgcattgttatcattcaggctattttcttcgcatttgccgttatttatgaccaaataaaattagccagaaagaaaattcatagaaaacaggccagggatatattatccccatcagtgtgagtcttaagtaaaatcaaattagggggcctatatctaatttaaatatggcccgctaatcaggatttaaattctgttttaaactgttcaaccactgcatctgtatgtaatatgagcatagtaattgtcaacttaatgaggtgagtcatgtggcaaactgttagccgtctattaagtgaacattttgaagaggcagaaatccgcaacaaaacggaattatcaggaggagatattcaccgttcttggtctattgagtacggcgatcagcatatctttgttaagtccaatacgaaagaaatgttgcctatctttaaaacagaagcggaacaactggaattattagcccgtagcaacacgaccaaagtacctgaggtctatggcgttgggcatgatcgtaatcatagcttccttttactcgaatatcttcctatcaaaccatttgatgcccacaacgcatactgttttggtcagcaacttgcccggcttcaccaatggaatgaacaacccaaatttggttttgattttgacaacatgcttggaacgacaatccagcctaatggatggcaaaaacgctggaaccaattttatgcagaaaagcgtattggctggcaattacaacttgcatcagataatggcatggtattcggaaacatcgatgcaattgttgaaaaaatcagtaataaactgcactctcatcaacctgaaccatctttattgcatggtgatttatggccaacgaattgcgcatctttaaatcacaattgtgtcgttgcatttgatcctgcctgttattggggggatcgtgagtgtgatctcgctatgcttcctttttaccctgagctccctctacaggttcttgatggctatcaaagcgtttggccactaccgtcagatttcatcgaacggcagcctctctatcaactctattatttattgaatcgctgtaacctttttggcggagataattttatcactgcacaaagtatcatcgataatatattatccgaataaaaatccgatctgattcagaatagctacataatcagatttaaaatctaatcgaagagttaactagatcaatctaaatttgcttgtttattattttattaataaaaaatcaaaggaggtaagaaagctaaactataacaaaagattaattatattaatttctttttgtgaaatttatgaaacagacaaatatatacttaattaatttcaaactacgctgtagtggcaagaaaacgagtccactggagtagtgtttatgaaaatactgacagggaggagcaagcattgccaacaaagatgcaatctgaaaaacaacagatacgatgtagctgcggaactcagtatcccgcagctatgatattgcatcaccaacctaataattttgataaaaaataggcaattgcaccaataataataggtgatatatagagagtgaatatttgactgaataatgagtgacgtgggaattctaccttagcttccagctgttctttagtgacatcactttcttttgctttttcaaggatcacatgatcttcaatctgttccctaataaatttgaattgacggtatatccttaaaccagatgcgctcatcgccaaaccaacaaacatcaggaaatagatgactaaaaaactagcattcgctcctgtgagcgccaccacataatctggtgttggagaatgtctccagaaaaaatctaaaaacggtgtattgaacttaatcacgtcagccatcatttttaaaaaatcattcaagactgcgttaataccatcacctttaactccatgcaaccataccaaattgactactgaaactaaagttgacaaaaaagcgggtataaaaataatccaacccaatagccgcttcgtgatagctacataccttgcctgtgaatacgtcattgatactcctcatgcgcatatatccaaaatatttcaagttgtaacgcgaaagtaagtgaattaatcaccagaagcatatactcttcgcctttcaaatttcctttttattggctgggcaagttcatttttgactaatttactgctcccttgccgccacgatgcaatgtaaaatccattgagtatagatatatgttctgggcaagggccagttaaatattagtgttatatgttaataaataaaagatttttcttgtttaccccctgttcaaccaggataaaaccctctatactagcgcactgtatacataaacagcaatcagctccagtaatcaatacaacaaacaatctagtataaataattatgacagcagaaggacaccttctcttttcagttgccagccttgtattggctcaccagctagaaatcactccagaaatagcacagggggattggttccacatgattcccggtgtacttttggcttctttattaccagatattgatcatccacattcaactttaggtagactattccgttttatttccgttcctattgctcggctttgcgggcacagaggcttcactcatagcctactggctctgacagtcggtgttgttctgtttcagactgagattccccctgagtggcctataccaactgattttatccatgccatgctcatagggtatattagccacctaatcgcagatatgctgacacccgcagggattcctctcttatggccactgaaaatgcgttttagaattcctatcttgaggggaaaagaacgtaaaaaagcagagcgatttatagcagttttacttgtagtaattgctattcttattccacaacatatcaatctttcatttatggattatttagataaattgcaattcgataaactgcaacttgatcaattacacattgataaattacaaaatttgtacaaataattgagtttatttttagtcaaataatggtcctattttgataataggaccaatcaaaaacataaatattatttctttatttttacttatcaatttcactatttggtatctaacttctgagttacagcttgtcattgttaataaataaacttatatattaatcagataactcaaatgacttcatattctctgaggcaacctctctcacatattggctaacattgaacgaaagcaaaacaaatcccataaatacatataactaatagtgctatatagtgacaaataattatattatattctctaaaattataagaaagctaatacttatattgataccataattctttaataaaataatggtaaaacgtttcgctattactcaaagtgaatacataccatacaagaatattagacaaaatattggagactagggatgaatttactactcattatcaatgtgctggtttttacagcactactcgttatattagcaaaaacgagttcagatcaatggagtctatccaaaaaagttcttattgccttagttgttggtgtcttttttggattagtattaaatgttatttatggtgcacataacccgatagtgaaagaatcaattaaatggttcaacatcgtcggcaatggttatgtgcaattgttacaaatggtcattatgccattagtctttgcttctatactcagtgcagttgcacgtctgcataaggcatcctccttaggtaagatcagcttactgactattggtactttactgtttaccacagcgatttctgctttaatcagtgttgttatcgccaatatgtttggattgaccgctgctggattagttcaggggacacaagaaactgctcgtctgtcagcaattgagacaaactatattaatcgggtttcagacctgagtgtaccgcaactaatcctctcttttattcctaaaaatccatttgcagatcttaccggagcaaatccgacctcaattatcagcgtcgtcatttttgcaacatttttgggaattgcagctctgcaaatgctgaaagatgaccatgaacgcggtgaacgtgctcttatcgcaattgatactatgcaagcatgggcaatgaaactagtcaggctggttatgcgccttaccccatatggagtaatggcattaatgaccaaagtagttgccagttctaatattcatgatattgcccaattaggtaactttgttgttgcttcttacattgctataggtctaatgtttgttgtacacggtattcttttagctataacaggcatcaacccactaaaattcttgaaaaaggcaggccctgctctgacatttgcttttaccagccgctcaagtgctgcaagtattccgttaaatgtagaaacgcaaacacgtcgcattggtgttcctgagtctatagcgagcttttccgcctcattcggtgcgactatcggccaaaatggttgtgcaggaatttatcctgctatgttagcggctatgattgctccaacagttggtattgatccttttgaccctctatggattgcaactctagtggggattgtgactatcagctctgctggtgtggctggtgttggtggtggtgctacgtttgctgcacttattgttctgccagcaatggggttgcctgtcactttggtcgctttattaatctctgttgaaccactgattgacatggggcgtactgctctaaatgttaacggagctatgactgccggtacaattaccagtcagttaatgggtaaaactgataaaaagttatttgaccaggattaaataatctaatggtaaaaaagccgggatttatcataaatcccggcttttttcatttaactgtttagattctcatcttttaaatagatgcaagccaagcagtattacttaatatattcgccgctacgcaacgcttcaatacgtttatccaatggtgggtgagataagaataactcactaaaactcttcgatttaccattgatacaaaatgccatcatgctgccttcttcctgaggctcatagcttgttttgaggcgctgtaatgcagcaatcattttctcacgcccgacaagttttgctgaccccgcatctgcgtgaaattcacgataacgagagaaccacatggtaataatacttgccagaataccaaatacaatttccaaaaccatggaaaggatcatataaacaatagggttgccattactactgctttcgctctcatcgtcactgctggacaagaaacttgcagctgcctgtgcaatgatacgtgagataaagataacgaatgtgtttacaatcccttgtaacaacgtcattgttaccatgtcaccattagcgatgtggctaacctcatgagcaataacagcttcagcttcatcacggctcatattattcagcaagcctgtactaacagccactaaagatgcattacggcgtgctcctgtagcgaatgcgttaatatccggtgcatcataaatagcaacttgtggcatagtgataccgacttgatcggactgacggcgaacagtttccatcagccagaattccatttcgttagacggcttttcaataacctgcccaccaacagaacgtaatgccatccattttgacattaacaaagaaataaatgcaccaccaaaaccaaacaaaccagccataatcataaggccggcaacactacttctctgtactcccgtaagtgaaagtattatcccaaacacaaccatgacggcaaggttggtgagtaggaacagggcaattctcatcatataaatttgcttcctttaataatcaaacagttcaactaaaagtaaatcataagatggggactaagaccatattattcaatttctttaaggtgttaagcgatagaatcaacgtaactttacaattttacataagatgtagctaataatacaaaagtaaaaaaaccgactataaagtcggctttttatgcattgtgatatccaaaaccactactatttattctgggttatttcaactggctggtgagctaaatccagagcaatttgcactgactcgtctaagtaagggtctggccctttataatcttttgctaagtcatcaagtgacacaagtggttttttgccttctcgtttgaagcgctcattgatacgatttagtttaatcgcttcatactctttattttctttctctcgctctgcatagtttaatgaataaacaccattgcgagcttttagtaccttataataggcgatatcctggtcaatatatttaaattcaggatcattagcgatacgctggcgatgcagtttagttaatgatggcactaactctgaaatattctttgaagaagaataaattgctggctgaatactatcccaaggcaaagcattatcttccttactttcacctatatcagtaggctctgcccctgttggcataagaatatcaggtgtcacacctttaagctgagtactaccaccatttatccggtaaaacttctgaatggtatattgcactgaaccaattgctggccagtcaggactgagcatttgatcataaatgcgattcagggaacgatattgttgaacagtccctttaccaaaagtcggctcaccaacaattaacccacgaccgtaatcctgcatagcagccgcaaaaatttcagatgcagaagcacttaaattatcaactaaaacaaccaaagggcctttataatatatcgcttcatcagtatctgaatcttctttaatccgccctgtattatcccggatttgtacaaccggaccagttgtgatgaataaaccagaaagtgaaacagcttctgtcagcgcgccaccgccattaccacgcaaatcaataacaatggccgaaacattttgcttcgttagtttttgcagttgtacttttacatcattagtcaaaccaacataaaaactgggaatatcaagaactcccactttttctttaccaacagttttaactgacattttaactgcgttgtcttcaaggcgaatattttcacgagttaacgtaataatatgattttttgcccctttcgcacttggaataatttcaaggcggactttactgccttttggccccttgatcagagcaacaacatcttccaagcgccagccaacaacatctacaataggcttacctgccagccctaccccaataattttatctccgactttgagcaaattacttttggctgccggtccccctgctactagtgagcggacggttacgtattcatcatcatattgtaagacagcaccgatcccttcaagtgaaaggctcatctcggaattaaactgctctgtattacgaggtgaaagataactggtatgaggatctatttcacgagcaaaagccatcattatgatttgaaaaacatcttcacttttactctgagtcaaatgtttcagcaaagtcctataacgttttgtcagcgtttccttgatctctttgtcacttttccctgacagtttaagatttatccaatctgacttaatctttgcatcccaaagattatttaattcttcaacacttgtaggccacggtgctttattacgttcagtctctagcttatcatttccatctaagcggataggctgctctaacctggaaagagcatattgatagcgttcaaaacgacgtttttgctgtaagttaaataacgcatatggaaggtgtaaatcaccattctcaagctctttacccaaaagccctttttgtgtggcaaactgtgcgatatctgatgccaaaaaaatattatgcccgtaatcgagcatatttaagtaacgatcaaaaatcttgtctgagaaatcggcatcaagattgaaatggcggtagtgagaactgagaaaacgggaaacaacccgtttacttactgtcgcatgttggggttcccgtttttgatcgggtaactgaattatagtaaccagtagctgattattccccactgttgatccggcaacaggtaccaaagtattactacgagcagcaccatcattgacagtatctgcataccctgtaccaaaaaatgatagccttaaaacgaaagccaaagtaatgagtttgttcatgcccaagttggcctccgtatcagaactttaagtgttctgcgcgtacaatcaatgccagaccagtaggtaactgcactcttacaccatctttcgcaatttccagcacagaagcatccattaggcttttccctacattcactttgatcgtctgcccgactttcaaagaggatacatctgtaactgaggttaactcaggttgtgcaatttttttgctagttttatctgctggtttacgcgattgctgcggacgctcttgcgaacgagctggacgtttttcatcctttttacctgcttccggacggcgacgaggcgcatcctttttattcacaggacgttcgcttttcttgtcagatacgttttctgtttcacgttttttggcacgttgctcagcccgttgagcctgtacacgagctttagcttccgctaactgctggcgcgcatgttcaatatgttcagcttccagctcaccacatgcattaccgtcaaggtcaacacgttgagcaccttcttttacaccataaaggtaacgccaactggaagtatacaagcgcagagcagaacggagttgtgttttacttaaacactcttcgccctgaatacgttcaacgatatcctgaaagatcccgattttcaaaggacgtgcttcaccttttgcggcgaaacataacgggaaacgatcacccaaaaaagcattgacttctttactactgattaacccatgttgatcctccacgaaagctcctgattacaacggttttgccaaccagcgcacgcatgaacaggcga

SEQ ID NO: 1874 - DNA, 15052 bp, Xenorhabdus sp.; identical to SEQ ID NO: 1873
  CDS (6452)..(7309)

SEQ ID NO: 1875 - DNA, 15052 bp, Xenorhabdus sp.; identical to SEQ ID NO: 1873
  CDS (8576)..(9028)

SEQ ID NO: 1876 - DNA, 15052 bp, Xenorhabdus sp.; identical to SEQ ID NO: 202
  CDS (54)..(767)

SEQ ID NO: 1877 - DNA, 15052 bp, Xenorhabdus sp.; identical to SEQ ID NO: 202
  CDS (886)..(2886)

SEQ ID NO: 1878 - DNA, 15052 bp, Xenorhabdus sp.; identical to SEQ ID NO: 202
  CDS (3097)..(3981)

SEQ ID NO: 1879 - DNA, 15052 bp, Xenorhabdus sp.; identical to SEQ ID NO: 202
  CDS (6836)..(7375)

SEQ ID NO: 1880 - DNA, 15052 bp, Xenorhabdus sp.; identical to SEQ ID NO: 202
  CDS (13703)..(13990)

SEQ ID NO: 1881 - DNA, 15052 bp, Xenorhabdus sp.; identical to SEQ ID NO: 1873
  CDS (9603)..(10970)

SEQ ID NO: 1882 - DNA, 15052 bp, Xenorhabdus sp.; identical to SEQ ID NO: 1873
  CDS (4563)..(5435)

SEQ ID NO: 1883 - DNA, 15052 bp, Xenorhabdus sp.; identical to SEQ ID NO: 1873
  CDS (3682)..(4563)

SEQ ID NO: 1884 - DNA, 15052 bp, Xenorhabdus sp.; identical to SEQ ID NO: 1873
  CDS (2849)..(3667)

SEQ ID NO: 1885 - DNA, 9088 bp, Xenorhabdus sp.
  CDS (6149)..(6931)
ctaaagcagatctggtactggcatttctacccttggaaaaagcgttttatgatcggtttaatgtgccatgccagtttattgggcatacaatggctgatgccatgccgttgcaaacagacaaaatagccgccagaaaaggtttagatattccggaaaatgcccattgtctggctatcctgccgggcagccgccacgctgaagtagaaatgctcagcgccgactttttgagaaccgtgcagttactcaggaatgaacttcctgatctgcatgtattggttccattggtaaatgccaaacggcgtgagcagttccagcgtatcaaaaatgaagttgcgccggatttatccattcacctattagatggtcaggctcgtgcagctatgattgctagtgatgcaaccttattagcatccggtacggcagcactggaatgtatgctggctaaatgcccgatggtggtgggttatagaatgaagccttttacattctggctggcaaaacgtctggtaaaaaccccctatgtttccctgcctaatttgctggcaggtaaagaattagtcaaagagttactacaggatgaatgtgagcctcaggcactgtcggcggcattattgccgttgttgcgtggtggtgttgaggtggaagcgttgaaagaaaccttcctgcatttgcatgaaagtattcgctgtgatgctgatgaacaggcggcacaagcggtactggaattagcgagaaaataatgaattttgtttatccgcaggcgaatctgattgccggtgttgatgaagtcgggcgtggcccgctggtgggggccgtggtgactgcggcagttattcttgatccggccagaccgattactggcttgatggattctaaaaaactaacagaaaaacgtcgcgaggcgctttatctggagatcacagaaaaagcgttgtgctggagccttgggcgcgctgaaccggaagagattgaccgtatcaatattctccatgccaccatgcttgcaatgcagcgggctgttgaaggcttagcaattcagccagattatgtcctgattgacggaaaccgttgcccggtattgtcaatgtcagcgcaggcagtcgttaagggagatagtctggttgcagagatcagtgccgcttccattctggctaaagtgacgcgggacagagaaatggccgagctggataaacatttccctgaatatggttttgcaaagcataaaggttatcctaccgccctgcatttggagaaactgtctctgctgggtgcgacggaacaccatcgtaaaagttttgcgccagttaaacgcgcgctggctattggataagaatctggaataagtatctggacagactatgacagaaccacgtttcgtacacttacgtgttcacagcgattattcaatgattgatggcttagccaaaaccggctcactgataaaaaaagtcgccggattggggatgcctgcttttgcaatcactgattttaccaatctgtgtggccttgttaaattttatggtagtgcccatagttcaggagtcaaacccatcattggggccgatttctatatggaaagtgaacagttgggtgatgaatatgctcatctgaccgttctggcccgtaataatgaaggttatcaaaacctgactttactgatttctgaagcttatcagaaaggctatggcgcggtcggcccgactatcagacaagaatggctggctaaacacaaggcggggttgatattgctgtcaggcggacgcatgggggatgtcggcaagtttttgctgcgtggtaaccgcgtgttagtcgaccagtgtctggatttttatcaggaacatttcccggatagttactatctggaacttattcgcaccgggcgtcaggatgaagaatcttacctgcacgctgcggttgaactggcagcagaaaaaaacctgccggttgtggcgaccaatgatgtctgctttctggaaagcggtgattttgacgcccatgaaattcgcgttgctattcatgacggttatacactttccgatcctaaacgcccgaaaaattacagcccacagcaatatctgcgcagtgagcaggagatgtgtgagcttttttcagacatccctgaggcattagcaaatagcgtagaaattgcaaaacgctgtaatgtcacgattcggcttggcgaatatttcctgcctaaattcccgacaggggatatgagtaccgaagactatctggtcgaaaaatcaaaacagggcttagaagagcgtctggaattcctctatccggatccggcagtcagagctgaaaagcggctggaatatgatgaacgtctggatattgagttaaaagttatcaaccagatgggttttcccggttacttcctgatcgtgatggagtttatccagtggtcgaaggataacggcgtaccggtaggcccggggcgtggctccggtgcgggttctcttgtcgcttatgcgctgaaaatcactgatctagacccactggaatttgacctactgttcgaacgtttcctgaatcctgaacgtgtctccatgcctgactttgacatcgatttctgtatggaaaaacgtgatcaggtgattgaccatgttgctgatatatacggacgcgatgcggtatcacagatcattacctttggtacgatggcagcaaaagcggtcattcgtgatgttgggcgagtgctcgggcatccttatggctttgttgatcggatatctaagctggttcctcccgatccgggaatgacactggaaaaagcgtttgtcgcagagcctcagctacctgaaatttacgaagcggatgaagaggttaaagcgctgatagatatggcgcggaaactggaaggtgtcactcgtaacgcgggtaaacatgctggtggagtggttatcgctccgactaagatcactgattttgctcctatatattgcgatccggaaggattgaacccggttactcagttcgacaaaaacgatgtggaatacgccgggctggtgaagtttgactttcttggtctgagaaccctgaccatcatcaactgggcacttgagatggttaatgcccgccgtgtcgggaaaaatctggaaccgatagatattgccgccattccactggatgatcagaaaagtttcgatatgctgcaacgctccgaaacgaccgctgtattccagcttgaatcccgtggcatgaaggatttgatcaagcgtctgcgtcctgactgttttgaggatatgatcgcactggtggcattgttccgcccggggcctttgcaatcgggaatggtggataactttatcgaccgtaaacacggacgggaagagatttcgtatccggatgttgaatggcagcatgaaacgctgaaacctgtactggagccaacttacggcatcatcctgtatcaggaacaggtcatgcagattgcacaggttctggcaggttatacgcttggcggggcagatatgctccgtcgtgcgatgggtaagaaaaaaccggaggagatggctaagcagcgctcagtttttgaagaaggggctataagtcagggagttgatggcgaacttgcgatgaagatcttcgatttggtggagaaattcgcaggttatggcttcaataaatctcactctgctgcttacgcgctggtttcttaccagacattatggttaaaagcgcattatccggcagaatttatggctgcggtaatgacagcggatatggataatacagagaaagttgttggcctggtggatgagtgctggcgcatggggctgaaagtcctgccaccggatatcaatagcgggttataccatttccacgtcaatgatgaaggcgaaattgtttatggtattggcgcaatcaaaggtgtcggtgaagggccgattgaagccattatcgaagcacgccagaaaggcgggcattttaaagaactgttcgatctgtgtgcccgtgttgatactaaaaagctgaaccgtcgtgtgatggaaaagctgattatgtcagggtcattcgacagactggggccgcatcgtgctgctttgatgtcttcgctggaagatgctctgaaagcggcagatcaacatgctaaggcagaggccactgggcaggctgatatgttcggggtactggctgaggagcccgaacagattgaacgctcatatgccagtacacctaaatggccggatcaagtggtattggatggtgagcgcgagacgctgggattatatctgacaggccacccgatcaccggttatttaaaagaaattgaacgatatacgaatgggtcacgtctaaaggatgtgaacccaacaccccgtggtcaggtaaccactgtggtaggtttggtactggcatccaaaattgtgacgactaaacgaggtaatcggattggtatctgcacattggatgatcgttcaggacggctggaaattatgttgttctccgatgccctggaaagatatcaacatttgttagagcaggacaaaattttaatcgcaaccggacaagtcagctttgatgacttcagcggtgggcttccaatgacagcgcgagaattaatggatatcagtgaggcgcgtgaaaaatttgcacgcgggcttgctatctcgttatcagacaggcaaattgatgagcaattattgaaccgactccgtagtgcactggagccacatcgttcaggcacgataccggttcatctttattaccagcgggtagatgcccgtgcccgtttacgattcggggcaacatggcgggtaactccaacggatacccttttgacagatctgcgaactctgctgggtagcgagcaggtagaattagagtttgactaaaataggaacgttatgagtctgaattttctggattttgaacagccgattgctgagttggaagcgaaaatcgattcgctcactgcggttagccgtcaagatgaaaagctagatatcaatctggacgaagaagtccagcgtctgcgggaaaaaagtgtcgaactgactcgcaaaatattctctgatttgggagtgtggcaggtttctcaactggcacgtcatcctctccgtccctatacgctggattatattcagcgcattttcactgactttgaagagctggcgggtgatcgtgcctatgcagatgataaggctatcgtcggtggtctggcacgtattgaaggccgtccggtcatggttatcgggcatcagaaaggccgtgaaacaaaagaaaaaatccgtcgtaactttggtatgccatcgccggaaggttatcgcaaggctttgcgcctgatggaaatggctgagcgcttcaaactgccgattattacttttattgataccccgggcgcataccccggagtgggtgctgaggaacgaggtcagtccgaagccattgcccgcaacctgcgtgaaatgtcccgtctgtctgtgccggttatctgtactgttattggtgaaggtggctctggtggtgctctggcactgagtgtcggtgataaagtgaatatgttgcaatacagtactttttctaccatatctccggaaggttgtgcgtctatcttgtggaaaagcgcagaaaaagcgcctctggcagcagaagcgatgggaaataccgctcctcgcctgaaagaactgaacctgatcgataccgtgatccctgaaccattggggggggcacatcgcaactacgatatgatggcagaatcactgaaaacccaattgttggcagaccttgctgagctgagcgaactgaacagtgaagaattggttaaccgccgttatgagcgtctgatgcagtacggttactgctaatatcctttgtctttcaagttgcctctttgttggctgtactcactccggtcgcatagttatctatgcttccggggattaatgaaaggcttcggcctttcaccagacgtagcctttggctgagcaaattcgttccttgttcgccgtgatgccacttgaaacccattgggtatatatctgctgagcattctgttgtaggtggaagtattggagaataataattctccattatttccgcctattttattgagtatgggaaaaaatcagtaaaactatatctattgcagcacttaaaaaataacaaaccgggttttgctatggccaaatataaatatattatttatgcgttttcctgtgtgtttatctggagttttattccttctatatcgcgctttggtcagaaagagatggaccattttcaatttttattctggtcaaatgtactgtctgtgctggcggtttttttggttgcagtgatgatgggaagaaactggaaggatcttatatttgttcctttccctgtcatgattaaagtgttcatattaggtgctctggactgttttttttatctgctgctgtattatggttattccatcgaaaacggtgttgctgttttagttattcaatatagctggccgttgatgataatcgggttatcgtttttcctgtttaaagaaaaattgtctattaaacagatgataggcatggcgattggcttcatcgcagttgtgattacctttactcaggggaatattaccgaaatttccgtgcagcatccgcaagccctgcttctggtctttagcggagcattctgttttgctctgccgtctgttttatcaaaacagtttgccattgatccttatatcagtacgttttgggtattcgtaaactcaactgtcgtttctcttatcttcttattggcattcagcaaattcaactggccgatgggagattcactgatgccaacagtgctgaatggcatcatattaaatggaatatcctatattatctggttcaaggccatgagcagcccagactcgcctaaaatagcttcaatattatttttatcaccgatattgtcgatgatgtggctgattttgttctttggtgatgagtttgttccggcctacgtagtaggattagtgcttgtgatcatatccgggatactttgcatcagtgcaaaaaataaagctgatacacaaaataaactgccggacgatttaattgaggactgaattttcagtctgaaaaaagagtttatccacaatgaataatatctatgagcctctgatgctgaaattagctgatcagataggggcacataaaaaatttttagtcgggtttagcggtggattagattccaccgtcctgttgcatttactggctcgcctacgtcaacaagcttcgcaatcatgcattgataaacataacgcattcacattaagggcaatccatattcatcatggtttaaacgcaaaagcagatgaatgggttgctcactgtcgccagatttgtgccgattggcaggttgatctttgtattgaaaaagtgagcttggatagccgtaaaaaaggtattgaagccgccgcccgtgatgcccgctatcaggcttttaaacatgaactgcggcaaggggaaattctgttaacagcacagcatcttgacgatcaggctgaaacatttttgctggcattaaagcggggaagtggtccggctgggttatcttccatgcctgctgttatgccttttgctgagacaacattaattcgcccattactgaatattagccgggcagaattagaactctacgcgcaggaacacagcctgaaatgggttgaagatgatagcaatcaggatgatcgttatgatcgcaatttcctgcgtttgaatatcatgccgttactcaatcggcgttggtcacatttttctcaggctgtttcccgtagtgctgatttatgtggagagcaggagcaattgctggatgagttgcttgaggaatcgttaaatgcactgataaccccggaaggatcaatgtctattctgccactggagacattttctgaggcgaaacgtaatgctctattgcgtcgatggctcagccggtacggagtgagaatgccgtcacgtgaacagcttcagcgtatttggtcagaagtggctctttcccggcaggatgctgagccgcaattcagattaggtaagcttgatatccgtcgttatcggcagcaattatggctggttcctcagtaccagtcgctctctggtgttgttattcgatgggatataaaacaggaactgcgattaccagatgggctgggagtactttttctttctgaagataaggaagcggcagttaatatcaggtcaccgaggaatgatgaacgggttacgatccgctttggaattcaggcaaatatcagcatcgtcgggcggcaacattcccgccatagcaaaaaattatggcaggagtttggtattgctccctggctcagggaaaggacaccgttactctattatgatgacaaacttattgcagccctgaatgtttttgtaacgaaagaggggcaatgtctggcggatgatcggcaattttccgttttgtggcagaaaactgtgtctgctactcagtaattcaatccttgtagtttggtggagtaaggctttaggaggttacattagaaataatgcaacctttttatttggtaaattcaatgcactacattgattttttgttggtaatatataaagtttaaataatttaatgttgaaaacatgtgagaatgtactagattttaaaatataagttaaccccaattctggataagaaattgacgagaagcctgttcaaggagccgtgttttggtgcaagtcgaaacagctccggggaggaacaggctatgaacaacttagttgaaattttcatcgatgtcgatgacttttgtcgttttttcattccacaatgggaacagttttgtctcaataagggatatcgcctacgtcgtagaaaaggtcacatgtatcccagtgaaatcatgaccatcctgatcctctttcatctgtcgcattatcgtgattttaaaaatttttatctggagcatatttggcgatatcatcatcacgattttcccaccttgctcagttatactcgttttatcagtgtcacgccttccgttttagtgcctctgtgcagctatctgactcaattaaaaggaaaccctacggggatcgcctttattgactccacgcgtttgagcgtgtgccataatatccgtattccc

SEQ ID NO: 1886 - DNA, 9088 bp, Xenorhabdus sp.; identical to SEQ ID NO: 1885
  CDS (8714)..(9088)

SEQ ID NO: 1887 - DNA, 9088 bp, Xenorhabdus sp.; identical to SEQ ID NO: 1885
  CDS (7077)..(8441)

SEQ ID NO: 1888 - DNA, 9088 bp, Xenorhabdus sp.; identical to SEQ ID NO: 1885
  CDS (4854)..(5813)

SEQ ID NO: 1889 - DNA, 9088 bp, Xenorhabdus sp.; identical to SEQ ID NO: 1885
  CDS (1359)..(4841)

SEQ ID NO: 1890 - DNA, 9088 bp, Xenorhabdus sp.; identical to SEQ ID NO: 1885
  CDS (740)..(1330)

SEQ ID NO: 1891 - DNA, 9088 bp, Xenorhabdus sp.; identical to SEQ ID NO: 1885
  CDS (3)..(740)

SEQ ID NO: 1892 - DNA, 691 bp, Xenorhabdus sp.
  CDS (38)..(691)
  unsure (1)..(691): unsure at all n locations
nnnnnnnnnnnnnnnnnnnnnnnnnnnnnnnnnnnnntgggacgtcgtcgaaatccccgaggacatgaaggccaaggctgaagaatatcgcgaaaagctgatcgagaccgttgtcgagatcgacgaagaagcgatggaagcctacctcgaaggcaactatccggataacgacaagattcgcgaactcgttcgccgcggcaccatcgacgtgaagttccacccgatgttctgcggtaccgcgttcaagaacaagggcgttcagccgcttctcgacgccgttgtcgactacctgccttcgccgctggacattccggcgatcaagggcatcgacgccaagacggaagccgaaatcgagcgtcacgctgacgactccgagccgctttccatgcttgcgttcaagatcatgaacgaccccttcgtcggttcgctcaccttcgcacgcatctactcgggcaagctcgagaagggcacgtctgtcatgaacacggtcaaggacaagcgcgagcgcgtcggccgtatgctgcagatgcactccaacagccgtgaagacatcgaagaagcctatgcaggcgacatcgttgctctggccggtctgaaagaaaccacgacgggcgatacgctttgcgatccgctgaagccggttatcctcgagcgcatggaattccccgaacccggcatccagatcnnnnnn

SEQ ID NO: 1893 - DNA, 549 bp, Xenorhabdus sp.
  CDS (379)..(549)
actgatcgaacgcatcgaagcgatcgacaagcgttaccaggccgcccagcgcaagatgcgctccatcgaacaactcaccctcgttctcgtgtcctgcagcctcatgttcggcgggtgcttggcgcttgagagcgtcctgaaggaacgggcggttatcaatcaggaggtcagcgcgtggaaaagatagtcgatcaggacaggttccagcacatcagcggcattgccgggaagctaatcggcggccttcgacgggatcgcgtctgggacggctcgcaaatcaagctgggcgcggtctacagcggcgttccgattgaggcctaccacagcgataccgaactgtttgacggcttctctatctcaagctcaggccttcgcgccgtgctaaagcgtccgtccgaatattggggcttctcgccctacaatcccaatccgtttgaaaagccggagaaggatagcctggagttcggcaaggcggcccatatgctgttgctgggcgaagaaggcttcaaggagcgctatgtcctgcgcccggagaaatatcccgacgag

SEQ ID NO: 1894 - DNA, 12903 bp, Xenorhabdus sp.
  CDS (3)..(401)
gcgctctaaagtttacgggtcgtggttttatggtttggggagcccgtacttgtacggaggttaacaacatcagttggcgctacattcctgtccgtcgtctgttcaatgccgttgaacgtgatattcgtcaggcactgcgggctgtgttatttgaaaccaataatcaaccgacctggatgcgcgccaaagctgccgttgaccactatctttatgctctctggcaaaagaatgccctgatgggaaacacccctgaagaagcttattttgtccatatcggtcaggatatcaccatgtctgacgcggatatcaaacaaggcaaaatgatcatgaaagtgggtctggccccagtgcgaccggctgaatttatcgttctgcaatttacgcaggatattgttcagtaatctccgtaattaaacgcaaggcactgtattgacagtgcctatttcacccagttaaaggagatgatgatggaaagaattcaaccgggcgtaacattaacagaaagtatcattaccacagggcaacaggaaatacccagcgcagtgcctgtatttattggttataccagccgtaatcaacaacacgcaaaaaccgcagttcgtatcgacaatctggtggaatatacccggctctttggcgaccatcatttaatggcatttgcagtcaggcactatttcgataatggcgggcaacaggcttttgttttaccgctgcaagggaatatgccctcggaaaatatcacccaaacggaagcggaagccctgatggcagcactaagcagcaaagcggtgcaagaagccattagcgcagaaacacagattaccctgattttggcaccggatatcgcccgcctgaatgacaatgtgattgatgatcaacaaattttatccaatttgtggtctgaagtctggatggtattgctgcaattgagtcagacccgttctaatctctttgtgctgctggatgcaccggatgagatagagcaggcaaagcaatgtctgaaagatctctcatcaggatatcgtcaatggggtgctgcctattggcctcgtctggaaacgacatatcaggatatatccggctccaaaaatattgtgctctcgcctaccgccgctatcgcagcacttattcaacatacggatagtgaagtcggtgtatggaaagcgcccgccaatattgctctgtctcaggttatccggccggttaagtcgtatcttcaaggaagtgaactatttaacagtaatgggacttctctcaatgtgatccgcacttttcccggtaaaggtatacgcgtatggggatgtcgcactctggaaaacacagataacacgccgtggcgttatctgcaaacacgacgcttagtttcttatgtcatcgcgcatttggcgaaattggcccgtatgtacatctttgagcctaataacgaactgacatggatgaaatgcaaagggcaaagttataactggctgcgacaactatggttacagggaggcttgtacggctcacgggaagatgaagcatttactgtgttgttaggcgtaaatgaaacgatgaccgaagaggatattcgggcaggaaaaatgatcatgaaagtcgccttagctgtattgtctcccgccgaatttatcgaaatcagtttggtatttgatacccaaacgggcgcgcttttatcttaaaaaggaaagagcacaatgaccgattttttcactcctgtggtatcccatcgctttatggcgagttttattttcaacggtattcctgacccgctggatatccgctttcagcgtatttccggtttaagtcgggaactccaggtcacccagcacagtcagggtggtgaaaatgcccgtaataactatctggctgaaaagatccaacacggcctattaacgctggagcgtggggtgatgacagtttctcctttgaccctgatgtttgatcgtgtgttgcgtggagaaaatatcgcctatgcggatgtggtgatcatgctgttaaacgaaaattcattgcccttgtccagctggatattgagcaatgccttaccggtacgctggcagaccagcgattttgatgcgaacagtaatgccattttggtgaatacccttgaactgcgctatcaggatatttgctggctgggagtcaaagtatgacagtcgaaatcagagaattaattattcaggcaaaagtggtttcatcaatgccgccaaccggctcagagcaacagagctattcgttggttcaggaaagtctggatgaggcggctttagttgaaaaaattaaacgtgaagtgctggctgcattacgcgatgaggaaaggtggcgctcatgagtttaattgaacgtggtttagcaaagctgaccattaacgcttataaagacagagagggcaaaatacaggcaggtaccattcaggccatgtataaccctgattccctgcaactggattaccaaacggattaccaacaatctctggcaattaatagcgaaaaacagagcagcatttatgtacaggctaagcccgccgggttatcccttgagctgatttttgacggcacaatgccggacaataaaatccctgttgaagctcagttaatgcaactcaagcagttgtgcagcgtggatgccaccagttatgaaacacaattcctgcaaatcaaatggggaaaaatgcgctgggaaaaccgcggctattttgccggcagggcgaaaagtttgtctgtgaattataccttgtttgatcgtgatgccacacctttgcgggcacgggttatcctgacactggtggcggatgaaagtctggtcttacaggagacagaacaaaatcttaaatcaccggcgcaaatcgctttacgggtacaggatggcgtttcactggctatgatggcggccagcacggcatcgacgctgtctggaggtgttgattacctgacactggcttcgcaaaataatctggataatctcaacgggtttgcaccgggtgagatattgcaggccaccagaggaaatccctgatgaaccatcaactgaaaatcattgccgatggtcaggaattgtccttgctggctgtcgttgatgtcgataccaacttctgcgttaacagcatcccttctgcgacattgaagctcagtttaccggacaggccactttcttttttcagtcaggcagatgtacaggctgaattggctcattgtcagacagggaaaacactgcttctggaattgattgaagggggacaaaaatcagtactgtttaacggccagattacccgtaactcactaaagatcaaaaataagcaattattacttactttggtagtccggcatcgactacaactgatggcagatactcagcattcacagttgtttaaagccagtaacgaaaaaactattctgaataccttgctgagtcaggcgggtatcaaggcacgttttgatcagatagccgcattggatcaaaaacatgaacagatggtgcaatttcgttgttctgactggcattttttgttgtgtcggctactggcaacgggtgtatggctgttacccacgacagaaggtgctcagcttgttcagcctaataccctgaaatccaacccaactcatatcctgaaaagtcgtggagatgaggaaaaagatatcctcgtcaaagatgctagctggcaatttgataactatcttaaccccgcttcgttggaagtcagtggttgggatatcaataagcaacaagaattgtcaggcgggcgctacagcagtattgctgtgggcgaagcggcactctctcctgataggtcagcgtttttaaataaaacaagctgggacattcgctacagccgcccgttaaccacccaggagagtggtcatctggcacagggtttattgttgaatcagcgaatttctggtgttacaggcgagttcctgcttaaaggtaatgggcgttatcagctaggtgacaatattcaattaacggggttcggttctcaattggatggtactgcaagtattactgcggttcgccatcattttaaccgacaaattgattgggaaacgacgttaagcattggcttgcaaagggagtatctgccgatgcttcccgatgcgactgaactccatattgcgactgtcgcaaagtatcagcaggacaaagctgccctgaaccgcattcctattattctgccggtactgaatcgtccgaatgaatttttatgggcccgattggggaaaccttacgccagccacgaaagcggtttctgtttttatccagaacccggtgacgaagtcattgtcggttttttcgaacatgatccgcgttatccagtcattctgggggcaatgcacaacccgaaaaataaagcgccattagaacccagccaagataatcaggaaaaagcgctggtggtgaaaaaagaactcacgctgaaagggcagaccatgaatgctgaaatgaacaaatcactcaatatgtcaggcaagaacagtgttgagatcaaaggcaacaaaattaatcttacccagtgaaaggtgaacaatggaaaaccaaatactgacacacctctatggtcgtggttgggcttttcctcccgctttttcccttgaagaaggggtgaaaatggcagaaggagcagaagatgtgcgccagagtttgcacatcctgttcaaaactgaatcgggggaacgcttaatgcgcgaaaattatggctgcggattaaatgattttatgtttgaaaatatccgcaacgaattgtttgctgaaattgagtcccatattcatgatagcgtattgcgttatgaagcacgggcggatattaccgagattcaggttcgtcagtcgcccaataataaaagtaccttacaagtaaaagtgatgtatcgtctgcgtggaagtgatatccatcagcagattcagggaacactggtgttgagtaaaggccgagggatggaggtatcatgagtgaatctattgtaacagacggtgatattctacagtttgagcctcaatttgggcatagacaggtaaaagttaccatccccggcaagattaggggcactggtcatgcgcgggtcaacggtaaaaaagtttgtattttgggggatgagaaacgggttactgtttctgcaacttataccacaataacgcatatgacaccgggaattggcactctgaccatcagtatgttagatgccagacagctggctcttcaatgtaccagtggtgcggccttaattatcaaagggaaaaaattcatggcgatatttacgcctaaatttccggctataaataatacggtgatcccaccacaaccagatattatgacaccttcgttaggtacaggaagttttatcactcaacaaaattttgccaccgtaaattaagatattggctgaactcaatatatccaaaatacaaatggtatatacacaatggatttcaagatgcgtcgcggcggcaagcgagtaaattcccgggaacatagacaaccgtatgtttataaaaacggtgactggggtgaatgagctcagccaacaaagaggcaacttgaaagacgaagtgtatagaaagttaaatggtgtgaataattaatatattcacaaaagaatcgctgtgtcatacaggtgatatcatggaattaactgagttaaataaaaaactgtcagatttggtgccgatgagcgactttaaattagataatcgaaccagtttgcaattactccaatatattgaagaatacactaaaataattccttttaatgaaatctctgctaaatcttctaatgaagaaaataaacattggaatgattttttctttatggcagataatacgccagaaaaacttgccgaattatatcaagggaaaatggaagccaatggaaaattattacctcatcaaacttttctattggcaatattacgattattagaaacaccgatatctttatttaatgctttacctgcaactcaccgtaatctctattatcgggcattgctgggattatctcctcgtccggcacaacctgatcaagtcgccttatctgtggaactgaatagtacagtcacagaacaattgctcactcaaggcaccttatttgaagcaggacaagatgaacagggcaatcccctgcaatatgcgctggataccagtttgctggcgaatcgtggctatatcagtgaattgtactggttacgtaaaaaagataaaaatcagtgggtaacctctacgccatgggattcacagacacaatcatcatttccctctgatggaatacgattattcagcgaaactgattcggataaagctgtacagggtggtgtgtttatcacttcgaaacttctggcgatggaagaaggaacaagagagataacggttacctttgagaagaatattaatagtcaatatctagtggcacaaatcagcagtggaaaccaatggttggatttgactgccaagggaaaaggaacagagatcatactgactctttcagataaagaaccagcaaccagtgcgccagaagatttggataatcttgtttttaaggaaccggtgctcaggctacagggaaaaaacagcccaccattgccgacgataacagccctcaagatacaaggtatagctgaagccccattccagacatattacctcaccccgtttggctatggtcttgagactgaaccattggaagaacatcccacattataccttggtatcactggcatcgagccagggaaaaacgtatcgttatattggaaattaaaagcaccacagcaacccgaagacgtttcctggtattacctgaatcaaaagaatcaatggattgcattggatgcctgggttaatgatgaaacccaacatctgtatcaagatggcatctggcaagttgccctgccggcagatgcttccaagcaggccacccaaatgccagcggagcgctgttggttaaaagctgtcgtggcaatacccacgcctaaaggctcatgggggaaaaacccgtggttatacggtctgatctataacgcgatgacagcaacattagtgaacaccaatagcatcagtagcaaccatttcttagcaccattaccggcaggctcgattcaacgcccggttgcccccatcattacagtcgcttcagtcaaccagccttgggcctcatggaatggacgcgtaccggaatcctataacgccttttttgaacggggagcacaacacttgtcccaccgtaaccgggctttaacctggggcaatatggcaactctgctaaaagagcgttatgtcagcatttttgatgttaaatatcccggcaatgatgaactcacccgagtacccgcgttagagaagcaacagctgacgatcattccggctaaccgatacaacgacagcgatgatcctttgcgtccggtgctaaacctggcacgtctgcaaggaatggcaaagtggttacagcaaaaaggctctctctgggctgagattgagatcagtaatccgaaatacgttgatgtaaaaatcgattacaacgtgattttcaggccagaagttaacgaagattttggctatcgccagctacgacagaaactcagtgaaacatatatgccctggagcgtcgatgaacagcgccccgtgatgttgcataacagcattaattattaccagttgctggcgaccattcaacagcaaccgctggttgagcgaatcacgagtctaacgttgagtcggtcggatgcgactaaagacagtgataccaacacatcagtggaagctaaagataatgaagtgttgattttagtctgggaagcgggtgacaagctctaatactgaggaaataactatgagtaatcaagatgtactgtttcacaaagtgaaagacgatattcactttgataccttgctggaacaggctcatcaggtcattgagcaacaggcaggaaaactgtggagtgacacagcggaacacgatcccggaataacttttttggaagggttcagctatggtgtgtcagatctgtcttaccgtcatacacttcccttaacagacttactgacaccagcccctaataagcagcaacagcaaggcggaatttttcccgctgaatttggcccccacaatacactgacctgtggaccaatcaccagcgatgattatcgaaaagcattgctggatttacatagcagtgactgggtaaaagaaaagccagaatcagaacaggataaaggggattttctgttccgtaatgtgcaattagtccgtgaaccggaagcgcaacgctatacctattggtatgatgccaccaagagggaatatagctttgtcagtagtcaggatgcgaaaaagtttacgttgcggggaaattactggctttatctggaaccaacacgccgtactcaggaaaatttgaatagtgccatccaacaattaaccgattttttgaccaagaaccgcaatattggtgaatctgtcagtcagattatctggacaaaaccggctgatttcccgctattactggagattgaactggatgacgatgtgcaaaatgttgcgggtatttttgctgccgtctatagcgcagcagaacagtatctgatgcctgaagtgcagcgtttcagtacgctagcgctaaaagacgcgggaatgcgcaatgacgaaatctttgaagggccgcaattaaaacatggttgttgccctgaattgccgatagcccgtgattacactagaaaactcaacctcaatcttagccgactggttaataagctgcttgagattaagggcgttcagaatgtgaatcgtcttcgtctggatgacagctttgacaaaactttgattgagccgattaacaaagatagctggtcatggtcaatcaaaaaaggttattaccctcgtctatgggggcaaaatccgctccatcaattggcacaacatgatggccctttgcgggtgatcaccagaggcgggattagtgttacagccgatgaaaatcaaattcgggctaatttacccaatccttccctgatccaaaataagcctgtagtactgccttacgggcgacaccgcgatgtaggcagctattatcccgtcagtgatatgttgcccgcttgctatgaattacagcagcccttatctgaaagtgagaatattcaacgtcagcgcctgatatcacttcatcaatttatgctgccatttgaacagcttttggcttgtggctgtcagcaaattgccatgctgccaaaattactggcctttaagcgtgaaggatatgaagtctggggtgatcaatggccatttaagccggattctgccagtaatgatgctcatcaaaattatgccccggcattaaaggaactattaaaacaaattgctcatgatagcgatcatgaattggatattgttaattacctgctcggatactttggtacccagcgggcaccacgtacctttctcaccgacatcaatgattttcgcgctatgcaacaaggttatctggctcaacagccgatattaacttatcaccgtgccaatattcggattgatcaggtttcatcgctacaaaagcgcattgctgcccgtatcgggttaggtggtgagctgtttaaaccagaacctgacctgagtaaactgcctttttatctggtggagcatcgggcattgctgcccatcaaacccaacaatcagtttgataaagagcagaaaccagattcagtgacagaagagaatcaagctaaccagcattatttaatcattcagcaagcgggtattaagggcaaactgactcaagggcaagtgatcaatttagtcatctatgaaggcgagcagaatcaaaaccaatttacgatatatagtcaaatgatagccaaagtcggaggagatcagttttggctggatgtgggtaatagcactcaattggaatacaatctggagcgggtaatgactgctgccaaaacaaaaaaattgttctggcaaaatagcagggtctggatggaagatatgagttatcgtctggcctacgccagcgaacaatctcaaaatggaaacccgttacctgaaaaccagcggcgtctgtcccgcacagcacagactcctttcccatccctgattacggtagataatgaaattatcctgaccaaaaaattaggggcagacagtgtcacacagggatatgcggatatatcagaaaaattgtatgcaaaaattgtcagctttgaccgcatcaaaggcaccttagttattgaacgtcaggataattcgacattgaagtttcctgctccagaagaagcatgggaatacagttggcatttttcaggcgcgaaatatgaaacgacagaccgtttctcatttgttattagtgtcgtggtaaacagtgaattaattaaaatttccggcgttgatccctataaattggaggcgtggattaaagaaacgatgcttactgaatttcctgcacatatctccatgattattcactggatggatcaggaagcctttttaaatttcggtaatacttatcagcgttggcaaaataatggtgctccattaggcgatgctgcatattctattctggaaaaattaccgttaggtaaaatgcctccctctttaaaaggaatcggaacaatgcgtattgccacgccatatcagagagaagaagttgtcggtaaaaataatgatcagtggaatgccgataaaataatccagaacgaattattctatgttcctaaagagaacaagtaaaaatacctaccagtaaaaaatcatatttaatatattttatggagttaaccatgaaagaaattatttattccgcaaaaatacaagatcaacaaatatcatctaatgaaaaaagtattggccctgaaactgataaattgaaatataagtttaaggaaggcagcattcctttacaaattgatttcagccaattaattgatattgcggatattgggcgtaaagcctgtggtcaggcaccacaccaaaatggcccgggagcaggattaaagctgggtgatgacggtacgctgaatttaaaaatggggacttttgatcacagaaattcagcgccattagcattagaagaagatattttatctgttaaattgggacatggtctaactattaaaaatgctggaatatctgttggtgagggacatggtattaaagctaactctgaaagtattgcggtaaaagtggctgataataagggcttagttgttgatggcaatggcatcgccatcaaaccgggcagtgggataaaattaaattcagatggtgaattagaagcggcatcagcagattccagcatcacagttgatagctccggcataaaagtgaaggctgggaggggaattaaagttggtgatggcctggaagtacatcttcatacagatggcggcatcggtaatagttcgtcaggtatccgcgttaaaacgggtaatggtattaagatagatgatgaccgtattaccattgaccctaatactgtattgccaaaaggtatgattgtcatgttttcaggctcaggcatcccacaaggctgggcattatgtgatggtactaagggaacaccggatctacttgatagatttatacttggtggaacccttgaagatatcggtggaaaaagtgcaaagagtgcagcggggcaaaaaaattccaaattttttatcgtcaatagcaaagaaaatgaaacagaaaccatggatgttagggtaaatgaaacaaaattaagtttaaaacaaataccaaaacataggcacatacaaggtggtgggttcactcaaaatacaggtttaaggtatagtgcagtattaaataatgagctgaatgatgactttaataataaagatcttagcggctatcgaataatatataattctactgaagaaccatggataagaacggttaattatgatcattggtggccttacaccagtgcagcaggtagtacagaaggccatagtcatactgcatcgacgactcttcctagccatacacatcaagtcaatacagtatcaccttactatattttagcatttattatgaagctataaatatttaacaatgggcgttaatgtttttcgcccattaaaaatattcacgaaatgtaaagtggcgactattgtggaaaagaatcacaaaataaaattcaacaatgtgattgataaattatcaatttcacttgaaatagaaaaacaccatagcaataaaatacttaaaaagtgttctgatctatttaagttaaaacttcgttacttaattgatgaggaagtggggcaatggtcatcacaggataatgataattcattggaaaaaatagttttaaatcttggagaaattgctttcgaagattttgaacaacaatttatatggcgactggaaagagaattaaaaaacaaaaccaaagagttaaaaataaatgtaaagaacaatatagattgtgatttatttatttcaggaaaaattaactctgcaagtaaggatttatcaaaatctaaacctaagtttagtctatccaatacattatgttcagaaaaattcacactaaataacattgataactatttaaatcatggttactgggaatcatctattttatgtcaacaggtaaaaaatactgagttcagttattggttaattgaaaatattagcctgcatccacaacaatggctccctatgttagctaaacactgcttacaacctgcgggattaagccgattaattaaaatttgccaaccagatgatcttagtttactaataaaattattttctgaagcaataacatccgaatttattaactctcaaacacagataaccatagataaaaaggggacgccagaaaaattgaggttatctgcggaatattatctgaaacatcaggtaaaatatgaacataccgtaaaaaaagaatttattttacaaaccaaaaattaactga

SEQ ID NO: 1895 - DNA, 12903 bp, Xenorhabdus sp.; identical to SEQ ID NO: 1894
  CDS (468)..(1676)

SEQ ID NO: 1896 - DNA, 12903 bp, Xenorhabdus sp.; identical to SEQ ID NO: 1894
  CDS (1932)..(2150)

SEQ ID NO: 1897 - DNA, 12903 bp, Xenorhabdus sp.; identical to SEQ ID NO: 1894
  CDS (2147)..(2329)

SEQ ID NO: 1898 - DNA, 12903 bp, Xenorhabdus sp.; identical to SEQ ID NO: 1894
  CDS (2326)..(3012)

SEQ ID NO: 1899 - DNA, 12903 bp, Xenorhabdus sp.; identical to SEQ ID NO: 1894
  CDS (3336)..(4511)

SEQ ID NO: 1900 - DNA, 12903 bp, Xenorhabdus sp.; identical to SEQ ID NO: 1894
  CDS (4522)..(4944)

SEQ ID NO: 1901 - DNA, 12903 bp, Xenorhabdus sp.; identical to SEQ ID NO: 1894
  CDS (5133)..(5366)

SEQ ID NO: 1902 - DNA, 12903 bp, Xenorhabdus sp.; identical to SEQ ID NO: 1894
  CDS (5615)..(7795)

SEQ ID NO: 1903 - DNA, 12903 bp, Xenorhabdus sp.; identical to SEQ ID NO: 1894
  CDS (7842)..(10703)

SEQ ID NO: 1904 - DNA, 12903 bp, Xenorhabdus sp.; identical to SEQ ID NO: 1894
  CDS (10742)..(12019)

SEQ ID NO: 1905 - DNA, 10384 bp, Xenorhabdus sp.; identical to SEQ ID NO: 428
  CDS (9776)..(10378)

SEQ ID NO: 1906 - DNA, 10150 bp, Xenorhabdus sp.; identical to SEQ ID NO: 76
  CDS (538)..(996)

SEQ ID NO: 1907 - DNA, 10150 bp, Xenorhabdus sp.; identical to SEQ ID NO: 76
  CDS (1018)..(2526)

SEQ ID NO: 1908 - DNA, 10150 bp, Xenorhabdus sp.; identical to SEQ ID NO: 76
  CDS (2552)..(5332)

SEQ ID NO: 1909 - DNA, 10150 bp, Xenorhabdus sp.; identical to SEQ ID NO: 76
  CDS (5458)..(5868)

SEQ ID NO: 1910 - DNA, 10150 bp, Xenorhabdus sp.; identical to SEQ ID NO: 76
  CDS (5868)..(6827)

SEQ ID NO: 1911 - DNA, 10150 bp, Xenorhabdus sp.; identical to SEQ ID NO: 76
  CDS (6934)..(7221)

SEQ ID NO: 1912 - DNA, 10150 bp, Xenorhabdus sp.; identical to SEQ ID NO: 76
  CDS (7519)..(9660)

SEQ ID NO: 1913 - DNA, 11899 bp, Xenorhabdus sp.
  CDS (3)..(3491)
ggatttttcaggatgaactccacgcattacagtgtcaggaacatcagttgttctggaaaaacatgttcagcgggcttcccagaacgcaattaccggcctaccgattgtacgacagtgagccagaagatcggatcttcactaaaaaaacaatcatttccaaagagactgaagaaaagctgacgatattagtccagcgtgaacgtgtttcagttaaatcagtattctttgccgcccattgtttgactgtggctaaaattacggctcaggatgaaattgcaaccgggttagtcactcatggcagaccagatgcacagaattcagagcaaacactgggtttgtttctcaatacattacctgtccgtttttctgcgcagaataaaacatggaaagagtgtatccatgctgtatttagcgctgaacagcatcatgctccatatcgtaaatatccgcttaatgctatccggcaagtagcaggagaaggggcggaaataagttccgcgtttaattacattcattttcacgtattaaaggacgtttttgacactcctgatttatctctcattgcatttgatccgtgggaagagactaactttgaattactgctcaatgtcatgaccgatttcagtaccggccaacattatctgcgatgtgattttgatggcagggtgttctcacagattcaggctgatacctatatggatatctatatgtccatattgaacagaatggtcagtcatcgtgatcaaccggcaacgctgagccagccgcttacacaaagcaacaatgacatatattctcaggaatttatctctgtgctggcgatgatggccaaaaatgtacgggaacagccggatgcaattgcaatccgtcatcatgatctgcaatggagttatagaaaactctggtcggaatccgggaaaattgcttccgtattgattgctggtggcgttgtgcaaaatacacctgttgcgattgcgcttgaacgctctccgatactggttgcatcactgattggcgtaatgagagcgggcggagtttgtcttccgttggatttaagctatccggctcagcgtattgaagccatgatggaacaggctcagccagcacttgtcattgttgatgataaatccagtcagttatttaacgtgacaacaattccaaccgtgcgggctgacacgctgatacacagagatgtgcctttatcagaaacagaggaatcagagacagaaatagtgcctgaacaactggcttatttactgtttacctccggttcaacggggaaacccaaaggtgtggcaatgccgcatcgtagcctgtcaaatgtggttatttggcagaatgaaacccattccggtaaaaatatttgttctaccttacagtatgcaccactgagttttgacgtttcatttcaggagattttctctacgctgactgccggtggcgagctacatcttatcagtgaagatgaacgacgcgatcctttgcaattactgcgtactcttgataattaccggacagaaagaatttatctgccttatgttgcgcttcagcaattagctgaaacagccgttgcactggaaacctacccgaaaaacctgaaagttgttatttcatcaggagaacaacttcgggtgactgatgatattcgtttgcttatcggtcagattaataacggtattcttgagaaccagtacggcccgacggaaacccatgttatcacggcatttaccatgcagggtgatccggtagtttttccggcacttcctcccattggcaaaaatatcagcaacgcagatatcatcctgcttaataaccagttagaagaggttgccattggtgaacagggggaaatttatgcccgtggtttacctgtcgcacagggttattaccgccagccagaattaaccgcagaacgctttattactctgaaagtcagcggggagacactgtatcgaaccggtgatctgggtgtaaaactcagggatggcaatatcctaaggttaggccgtaaagatactcaggttaaagtacgtgggtatcgtatagaactggcagaaatagaattagcgatatcgagtacgcccggtgctgacaaggttctgcaagacgtcgcggttgtcgttcagcaacatggggaaaatgacagcctgctggtggcattcttgatcggagaaaagaatgaagcattaactgggcgtatacagcaacatttgtctgaaaaattgcctaaatacatggtgccttcccgaatagagtggctgagtactctgcccaaaacgctaagtggtaagcgtgatgatgctgcattacgtagtatgaaggtcatgcaatgccataacaacgcagaagatattgcgccacgagacaattatgaacaggttctgtgtgatttggccgctgatttgctgaaaattcctgccgtatctgttcaccagaatctgtttgatattggtgctacttcattaactgccatgagaatggtggtcttgattgagaagcatttcagtaccagtgttcccttgtctctttttatcagttatccgacggttgcccagttagctgcacatatcagggaagagggagggcatcccaaattcagtccgcttgtccccatgcgaacgacagggcataaacagccactgttctttgtccatcctatggggggaaatgtgttgtcctatttgcggttagtgaagtatttccctgacgatcagcctttctatgccttacaggcgcatggcgtagacgcaggatctataccgctgaacagcatacaagaacaggcggcaaattatctggaagcgatacgtgaaatacagccacatggcccatattcaatcggaggctggtcttatggcggatttgtcgcattcgagatggcccgacaattgaaagagcagggtgaaaatgtgacagacctctttattttagacacggtggctgttaacgcatcgcctcagacaacaataaatgaaggcgctttgctgcgatggttcttctgggaattattgtggctgaacgaaggcgccacactctcggaacagaccttaccggaacagattacctctttgcaggaacaattcgaatatatcaccgagcatgctatcgcgacaggtgcaattcctcagggcagttcccgcgcagtcatacagcggttattcgatgtgtataaagctaactggaaagcggctaccgaccatgccgcttataaagctgatatcaatatgactttattacatgcaacacggccgttacctgtcattctgcgctctatgcatgatgcggtacgaagtgagtatcgtgatccgaaaaatggctgggagaacaagacaagcggttatatcaatgtcattgatgtgcccggtgatcatctggaaatcatggaagaaccttatgtacaggaagtggcaaaggtcattcttcaggaaatgaaaaaatcgtctacaaaacaagtaatatcggattcggagaaaatatgtcccgtccattgaaagttattatagctggtgcaggtattggcggattaacgacggcggttgttttacagcggcttggttatgaggttgaagtttacgaacaagcaacgactttaccaacggcacgctctggtctgtctgtgataactaatgctgttgcggcgttatcctctattggggttaatctgaaactggaaaactttggtgctccggttaagaatttcgaaatcaggaacgttaaggatcagcttatacgcagaatgcctgtacctgaaatctcgtcttccaatggatttgatagtgtctgtttatcacgtaaggcactacaggaagccctgttacagcaattagatcagagtattatccatgtcgatgcgaaagtagatgaaattatcgaaagtgataatgcggttattgtccgttttgctgacggcagagaaacacagggtgacctgttgattggtgctgatggtatccactctgttgtccgggaatatctacaggggaatcagccgctccgctcttctgattatatctgctggttggcaattacccgctatcagcatccgcagattacccccggctatgttgtccattatttagggcagggaaaacgaatcggtttaatcgatataggcggaggcgaagtttattggtggggaactgcatacatgagtaatgagcaggcctgtctttgcgaaaggagtaatcaagatgttctggcctattttgagggttggccaacaattgtttccgacattatttcacaaacgccatcggaagatattatctccgtatctgcgcaggacaggcctttttccccgctttgggggaaaggaagaattactcttttaggtgatgcagctcaccctatgcttacgacactgggccaaggtgccgggatggcgattgaagatgctgctgttttggggcatatgttgaagcagcagccagatccagttgccgctctgcgccaatacgagaaagttcgtatcccaagaactgaattgtttgttaatgaatcaaagatacaaagtgaccttggacaggaagatggtatttttgattgtcagcagagggagttatctttacagtctttaccagagacggctctcagagaagactttgaaagatttttacactttccggtaggagatcttactctccagaccctataaggactcttttggttaaagtatttttgtcgtaaaaaatctgcaacgggctgtgtttaaagtaaaaatacagcccgttattattcaacaatgattactctgtgctcgtggagcaattcccatcgatatgctcacctgaaaaagctcgtttaacaaaaatggtagagtctggcaaagaacctttcattgtggccgaatggctcaaaccgggatagagatgccactcaatatggctgcctagtttgcacgcagcagtaacaagctgaacttgaccgtctttgggtgagtctacatcctgcccacctgttccccagaaaatagggatttctgtttttatggcggggtaatacctgacgctcatgatagcttgtataagcggtgatggatctttcttaaagctatttgcgccggttaagttatctgagaatatctgtttttctatatcacgcagacagtgagtttgtgaaaggcgaaaagccgggattgctttgtcactcaggtaatcctctggcgataatgatggtttgactaacggtacagtatttattgctaacagaaggtaagcaagcgtatgtctgacagtatcgtctcgttttactattttcttgatagcgtcaggaacactggttcccgttgtgacagcgccgacaatatcaagatcaggtgagtagctttttgcgtataaggtagcggcaaacgttgctcctccgccttgcgattgcccgatgaggattgttttctttgataaatgaaaattgccttgctgaactgcgcgaatactatcaagcaggctataagctgtagcccgatagtcagaatatgggtgtaatcccggtgttcccagcccttggtaatctgtagcaacaatggcatacccttgttttagccagtagttgaggtagccaatatcacgtttacttcggccagcaaacgatggagcacaaatattcgcgataccgacggtgccatgtgcccaggctagtaatggccatcccccttttggtggtgtgcctttcggtggtgtgcctttcggtaaaaatagtgcgccagaaaccgtaattggagagtggccatctatcccatcggttgaactatagaggatacgaatattttgcttggcatttgacaggctttgtgctgattttaatggttcgacgcgaagtaattgaccggcttgttctggtgttttccctgaccacttataaaatgtgggtagattacgttctccgatgctcattggagtcccggcaaaagtaagcacaggattgatgattaatacaaaaaataacatattaatcaatccattattccatgatgatattgctctcatgatttttcgccccgatttcttcaaatatcactcaccttagcaaactccacttatctgtagatgaaatgcttatctgtttaaatcacgtatctgtggatggcgacaaaggcgtttttgtcattaacctgaaataccttgcatatgaagtgcaaggtatttcagatttgctaaggggagttttagatattctgaagtcggagtaatattgatagagtattaactgataaactcaatatcgtttaagttactgttttggattggtgattttccattaaagaattgaataagaatatcagtcagtacatcaggccgttctatcatgacaagatggtctgatttttttattgtcgtaaatatagagttagggaaaatggaggcacaacgtttaataatttctggtggagtgatgatatcgtattcacccgttatgaacaaagtggctttgttaaagccgtttgctttctcatattctctttggtttaaaaggcgtttttggagatacttatatctttctgcatgatggcgtgttgattccagtaatgttttcttaacaagtttatatgttgtttctctgcctagtatgttgatatccgggtcaaggcaaagaatacttgcaatggtattttctgtaaattcttcataatttccttcggtcagcgcctttaatgctgtatccagcttatcttgaatatgaagtggctgggtgagtgcagtgccaataaatgctgttttattcactctctcaggccatttgtacgtaaactcaagtgctgtcgctccgccgtatgaaataccgatgagatttattgtttgtaaagacaaagtatctaaaaggtgtcgtgtgcattccgccagaaactcaaaattttgatttgggggaatatcgtcagcagaacccgtccctggcaggtcaacaaagatgagagggctgtcttctttgaggaggtattctaggtgaggtaaggagtacatatcctgaaaaccaccaacaataatacatgtggggactattttgggatcactgatgtcaccaataacccgaaaagcatattttactccgttccatgtgatttcccttctgtcatgaggcggaatgcgaaaactggaatcaataaaagcagagagtgattgaacattcctgaatcttagaacatcgctccagtctattttttttcctagcttgtcctcaataaagatttgtatttcaactaaagaaatagaatctgcgccaagactgaaaaaatcatcataaatatccattgattcaacatgtagcacttcacgacatatttccagtacatcatgttcagtcttatttagcttggttttttgcaatgactcagtcatatcttcctcctattgtcatctaaccaatattatatcctaattttcattctgtgaaatatagacactaaaatgtatcaactaaaaaataaatcatttattaatagtatccactgaaactaatgttagacttttttatattattaaaaatatcaatctaaatagtatttgtttgatattgcctctattaattttattgttctttttgagaaggaggatagaaataattatatgtttaatcgtctaatctggcatttttttatctatatacggtaaactgattcattatttttatatgagaataaaaaagagagagcttcatggaaaatgctttccagaaagcacgctggttacgagatctacaacgttttttacctttgaaaagtcagtttattttatctggtaatgtcagggatcttcaggcgtatgaaattgctccagaggttatgactccactggggctgggacaagtgttacaaaatacactatttgatatgggctatacccatatcatgacgtttaatcctctgtcaggatttacgttaatcaatcattcatcccggtctgaagatcagggaaaagtattattacaacgcatgggattaccgataaatacgaatagtattcctggtggaattgatttactaaatagtgtactggagaaatgggtagagtacccagatgaacccattgcattatgcgtggattttgcttcctgtctgatttctcagcgtgaaaatcttgctgctattgaacatcacttgtttacccgtgccttagttctttctcatcaggcaaaagcccgtccggcaggcctccagcgacagccattttttaatactattttctggatagttgaaaaggagactgatttaccggattggtttctgattaacaatcctcgaatacgccatattccggtcgccaaacctgacgggcaaatgcgccgagcgctagcaccgactttattacgttctttaccggattttgatcaaatatcgcataatgaatataccgttttattaagtgattttattgatgaaacagaaggtctgctactactcgatttaactgccatcatacaacttgcccggtttgagaaagttccggtcacacgtatcagcgatgcggtcaggcgttataaagtgggtattacagaagatccatggcagaagattgataaaaataaaatccgtaatgcatatgacatcatacaacggcgtgtaaaaggtcaacaccatgcagtcacacatttactggatattattaagcgtgcagtaactggtgttggtagtagcaaaagtgggcgccctcggggagtattgtttcttgcaggccctactggtgtcggtaaaactgagctggcaaaaatagtaactcagttattgtttggtgatgaaagtgcttatatccgttttgatatgtctgcattcagtgctgaacatgccgatcagcgccttatcggagctcctcctggttatgtgggatataacacgggcggtgaactgactaatgcgattcgggaaaaaccgttcagcgttgtactgttcgatgagattgaaaaagcacatccacaattaatggataaatttttacagattattgatgatggtgttctgacatcaggccgtggtgatcgtgtctatttttctgagtcattaattatattcacctcaaaccttggcatttatcggctgaataatgaaggggaacggattgctaacaccaccccagatgaaccgtttgacacagtacaacagaatataaaacgggaaatcgaacgtcacttcaaattggtactaaaccgcccagaattgctcaaccgtattggtgaaaatattattgtttttgattttatccggccggatgtggcagagcagatttttaaccaaatggtcagcaatattctgcgcgatctggaaaaacaagacttgttcatcacaattgcggataccgtaataaccacccttaaatcccgttgtctggcagatttatctaacggaggtagaggtattcgtaatcagcttgaaatccacctcataaacccattatcaagggcggtctttgacctaagtgaatgcgcggataaatctttttgtatcgaacagatagcattaggcgaaacaggtgaaataacaaccgtacaactggtaccggttaaggaatcagtctgatggagattagtttatcgcgcctgcattttcctgtgacctctctcggtccgggaaaacgtatcgggatctggacacagggatgtagcattcgttgtaagggatgtatgtctccggatacatggcgacctacgcaacaacgcatagcgattaacactctgatgacacagcttactccttggctgacaaaagcagatggcattaccatttccggtggtgaaccttttgatcagccagaggcactttatacgttattaaaatcgttacgccgtcacttttctggtgatgttctggttttcagtggctacgaataccgtatattaaaaacaaaattgcagactatggtcggcttaattgatgcgttggtttccggcccttatcggcaggaagcaacacaggctttgcgtttgcgtggcagtgacaatcaggaattacaccttttaacgccattaggccggcagctttatcactcttatcatctgccattagaaaaaacagataaagttttggatctcgctttggatgctcaaggccgggtatttattgccggcattccagaaaaaggagatatggaacgattcagagatctgcttatccaaggggatcatcaggtaacacagattaaaaaatagaataacaacaggtatgttatggtaatgatgcgtttttgcccccattgtaagacagagcgtcccctgaccgaaattttctgtgaaggatatttcagtacacagtcatgtggatgggacttatctactgaacctatccataaatcaggctggcgcccacaattaccagagtcaacagctatatccacgtccactgatgtaacaacaatacctactgaggtaaggcttcaggagcatgtttacgtttgtgtgaacggtcatccaatggaggaggatgatcttatttgcctgcaatgtggtggggatgcagcagaattctctgtggaagacaatactgatcagaacactctttttttatcagcagaagcatcaatagaatcagcatttacagaaccaacgtcaaataacctgatgtccgtcggaaactggctggtaggtgaacggataaataataagactaatctccgtgagcgttatcatgtaactcatcaggaaacgagtagacagggagttttaacactttatcagcagggagaagagccagacctttctgtctatgatgtgtaccggcttttaccaaataatcatgttccggagttactggaaaccggtcgccaatacgacaggtcatggcatgtaacagaatatattcccggtggttcgctggaagattttattgcgctgggaaatgaatggcaacaggaagaaatccctcaacttattatggaaatagggcaggcgctgaataccttttcggaacgtggtttacgccatcgtaatctgaagccatcccatcttatgatccgccagcattcgccattggatattgtagtgatagagtttggttcagcctgtttgtccgagttcgagcttgatactgtttcaccgttggatatcagccgatacagtgcaccggaaaccttagctggtggagtgtctgccgcttccgactggtggagtatgggtattattctactcgaacaaatcactcgtggacgctgttttgagcaggttcatactaatgcctttttaattcaagtaatggcacatgggatcactattcctgatgatctggatgaaaatatccgtattcttttgctcggattattagcccgcgatcgtacacaacgttggcaatggcctgaggtgtctgcatggctggatgatcggcctatggctgcccctgttgagataaatcagcaaataccgcagcacggacaacaaattattctggccggtcaggaatataatcagcctgctcagtttgctctgaaagcggcagaggtgatgcaatggaatgaggcattatccctattattacgtggagaactcatttcatggcttgctggaatgagtcattatgaatcaattcgtaaacagctgcgtcttttccttgatactcaggatattgatgataattttcgtctgacgttgactttaaaagtactaaatccggatataccgtttatttactgtggtgagataattacgccctcttggttattagaacatgcagatattggctacagattaattaatgatccgctgtcacagttgttacgccaaattgagcctgaacactggctggtacaacttaactatcgtcaacagcaggtttacggccgggcagagaagctggaaatcagcctgaatgaaaattcattgagagtttaactgcttactacctctcatagtcagctaattatccgctggcggacacactaccagttattccccgatacacaccacagtggtttacgaacctttagagcac

SEQ ID NO: 1914 - DNA, 11899 bp, Xenorhabdus sp.; identical to SEQ ID NO: 1913
  CDS (3545)..(4654)

SEQ ID NO: 1915 - DNA, 11899 bp, Xenorhabdus sp.; identical to SEQ ID NO: 1913
  CDS (7646)..(9499)

SEQ ID NO: 1916 - DNA, 11899 bp, Xenorhabdus sp.; identical to SEQ ID NO: 1913
  CDS (9532)..(10128)

SEQ ID NO: 1917 - DNA, 11899 bp, Xenorhabdus sp.; identical to SEQ ID NO: 1913
  CDS (10375)..(11799)

SEQ ID NO: 1918 - DNA, 11899 bp, Xenorhabdus sp.
  CDS (5988)..(7154)
gtgctctaaaggttcgtaaaccactgtggtgtgtatcggggaataactggtagtgtgtccgccagcggataattagctgactatgagaggtagtaagcagttaaactctcaatgaattttcattcaggctgatttccagcttctctgcccggccgtaaacctgctgttgacgatagttaagttgtaccagccagtgttcaggctcaatttggcgtaacaactgtgacagcggatcattaattaatctgtagccaatatctgcatgttctaataaccaagagggcgtaattatctcaccacagtaaataaacggtatatccggatttagtacttttaaagtcaacgtcagacgaaaattatcatcaatatcctgagtatcaaggaaaagacgcagctgtttacgaattgattcataatgactcattccagcaagccatgaaatgagttctccacgtaataatagggataatgcctcattccattgcatcacctctgccgctttcagagcaaactgagcaggctgattatattcctgaccggccagaataatttgttgtccgtgctgcggtatttgctgatttatctcaacaggggcagccataggccgatcatccagccatgcagacacctcaggccattgccaacgttgtgtacgatcgcgggctaataatccgagcaaaagaatacggatattttcatccagatcatcaggaatagtgatcccatgtgccattacttgaattaaaaaggcattagtatgaacctgctcaaaacagcgtccacgagtgatttgttcgagtagaataatacccatactccaccagtcggaagcggcagacactccaccagctaaggtttccggtgcactgtatcggctgatatccaacggtgaaacagtatcaagctcgaactcggacaaacaggctgaaccaaactctatcactacaatatccaatggcgaatgctggcggatcataagatgggatggcttcagattacgatggcgtaaaccacgttccgaaaaggtattcagcgcctgccctatttccataataagttgagggatttcttcctgttgccattcatttcccagcgcaataaaatcttccagcgaaccaccgggaatatattctgttacatgccatgacctgtcgtattggcgaccggtttccagtaactccggaacatgattatttggtaaaagccggtacacatcatagacagaaaggtctggctcttctccctgctgataaagtgttaaaactccctgtctactcgtttcctgatgagttacatgataacgctcacggagattagtcttattatttatccgttcacctaccagccagtttccgacggacatcaggttatttgacgttggttctgtaaatgctgattctattgatgcttctgctgataaaaaaagagtgttctgatcagtattgtcttccacagagaattctgctgcatccccaccacattgcaggcaaataagatcatcctcctccattggatgaccgttcacacaaacgtaaacatgctcctgaagccttacctcagtaggtattgttgttacatcagtggacgtggatatagctgttgactctggtaattgtgggcgccagcctgatttatggataggttcagtagataagtcccatccacatgactgtgtactgaaatatccttcacagaaaatttcggtcaggggacgctctgtcttacaatgggggcaaaaacgcatcattaccataacatacctgttgttattctattttttaatctgtgttacctgatgatccccttggataagcagatctctgaatcgttccatatctcctttttctggaatgccggcaataaatacccggccttgagcatccaaagcgagatccaaaactttatctgttttttctaatggcagatgataagagtgataaagctgccggcctaatggcgttaaaaggtgtaattcctgattgtcactgccacgcaaacgcaaagcctgtgttgcttcctgccgataagggccggaaaccaacgcatcaattaagccgaccatagtctgcaattttgtttttaatatacggtattcgtagccactgaaaaccagaacatcaccagaaaagtgacggcgtaacgattttaataacgtataaagtgcctctggctgatcaaaaggttcaccaccggaaatggtaatgccatctgcttttgtcagccaaggagtaagctgtgtcatcagagtgttaatcgctatgcgttgttgcgtaggtcgccatgtatccggagacatacatcccttacaacgaatgctacatccctgtgtccagatcccgatacgttttcccggaccgagagaggtcacaggaaaatgcaggcgcgataaactaatctccatcagactgattccttaaccggtaccagttgtacggttgttatttcacctgtttcgcctaatgctatctgttcgatacaaaaagatttatccgcgcattcacttaggtcaaagaccgcccttgataatgggtttatgaggtggatttcaagctgattacgaatacctctacctccgttagataaatctgccagacaacgggatttaagggtggttattacggtatccgcaattgtgatgaacaagtcttgtttttccagatcgcgcagaatattgctgaccatttggttaaaaatctgctctgccacatccggccggataaaatcaaaaacaataatattttcaccaatacggttgagcaattctgggcggtttagtaccaatttgaagtgacgttcgatttcccgttttatattctgttgtactgtgtcaaacggttcatctggggtggtgttagcaatccgttccccttcattattcagccgataaatgccaaggtttgaggtgaatataattaatgactcagaaaaatagacacgatcaccacggcctgatgtcagaacaccatcatcaataatctgtaaaaatttatccattaattgtggatgtgctttttcaatctcatcgaacagtacaacgctgaacggtttttcccgaatcgcattagtcagttcaccgcccgtgttatatcccacataaccaggaggagctccgataaggcgctgatcggcatgttcagcactgaatgcagacatatcaaaacggatataagcactttcatcaccaaacaataactgagttactatttttgccagctcagttttaccgacaccagtagggcctgcaagaaacaatactccccgagggcgcccacttttgctactaccaacaccagttactgcacgcttaataatatccagtaaatgtgtgactgcatggtgttgaccttttacacgccgttgtatgatgtcatatgcattacggattttatttttatcaatcttctgccatggatcttctgtaatacccactttataacgcctgaccgcatcgctgatacgtgtgaccggaactttctcaaaccgggcaagttgtatgatggcagttaaatcgagtagtagcagaccttctgtttcatcaataaaatcacttaataaaacggtatattcattatgcgatatttgatcaaaatccggtaaagaacgtaataaagtcggtgctagcgctcggcgcatttgcccgtcaggtttggcgaccggaatatggcgtattcgaggattgttaatcagaaaccaatccggtaaatcagtctccttttcaactatccagaaaatagtattaaaaaatggctgtcgctggaggcctgccggacgggcttttgcctgatgagaaagaactaaggcacgggtaaacaagtgatgttcaatagcagcaagattttcacgctgagaaatcagacaggaagcaaaatccacgcataatgcaatgggttcatctgggtactctacccatttctccagtacactatttagtaaatcaattccaccaggaatactattcgtatttatcggtaatcccatgcgttgtaataatacttttccctgatcttcagaccgggatgaatgattgattaacgtaaatcctgacagaggattaaacgtcatgatatgggtatagcccatatcaaatagtgtattttgtaacacttgtcccagccccagtggagtcataacctctggagcaatttcatacgcctgaagatccctgacattaccagataaaataaactgacttttcaaaggtaaaaaacgttgtagatctcgtaaccagcgtgctttctggaaagcattttccatgaagctctctcttttttattctcatataaaaataatgaatcagtttaccgtatatagataaaaaaatgccagattagacgattaaacatataattatttctatcctccttctcaaaaagaacaataaaattaatagaggcaatatcaaacaaatactatttagattgatatttttaataatataaaaaagtctaacattagtttcagtggatactattaataaatgatttattttttagttgatacattttagtgtctatatttcacagaatgaaaattaggatataatattggttagatgacaataggaggaagatatgactgagtcattgcaaaaaaccaagctaaataagactgaacatgatgtactggaaatatgtcgtgaagtgctacatgttgaatcaatggatatttatgatgattttttcagtcttggcgcagattctatttctttagttgaaatacaaatctttattgaggacaagctaggaaaaaaaatagactggagcgatgttctaagattcaggaatgttcaatcactctctgcttttattgattccagttttcgcattccgcctcatgacagaagggaaatcacatggaacggagtaaaatatgcttttcgggttattggtgacatcagtgatcccaaaatagtccccacatgtattattgttggtggttttcaggatatgtactccttacctcacctagaatacctcctcaaagaagacagccctctcatctttgttgacctgccagggacgggttctgctgacgatattcccccaaatcaaaattttgagtttctggcggaatgcacacgacaccttttagatactttgtctttacaaacaataaatctcatcggtatttcatacggcggagcgacagcacttgagtttacgtacaaatggcctgagagagtgaataaaacagcatttattggcactgcactcacccagccacttcatattcaagataagctggatacagcattaaaggcgctgaccgaaggaaattatgaagaatttacagaaaataccattgcaagtattctttgccttgacccggatatcaacatactaggcagagaaacaacatataaacttgttaagaaaacattactggaatcaacacgccatcatgcagaaagatataagtatctccaaaaacgccttttaaaccaaagagaatatgagaaagcaaacggctttaacaaagccactttgttcataacgggtgaatacgatatcatcactccaccagaaattattaaacgttgtgcctccattttccctaactctatatttacgacaataaaaaaatcagaccatcttgtcatgatagaacggcctgatgtactgactgatattcttattcaattctttaatggaaaatcaccaatccaaaacagtaacttaaacgatattgagtttatcagttaatactctatcaatattactccgacttcagaatatctaaaactccccttagcaaatctgaaataccttgcacttcatatgcaaggtatttcaggttaatgacaaaaacgcctttgtcgccatccacagatacgtgatttaaacagataagcatttcatctacagataagtggagtttgctaaggtgagtgatatttgaagaaatcggggcgaaaaatcatgagagcaatatcatcatggaataatggattgattaatatgttattttttgtattaatcatcaatcctgtgcttacttttgccgggactccaatgagcatcggagaacgtaatctacccacattttataagtggtcagggaaaacaccagaacaagccggtcaattacttcgcgtcgaaccattaaaatcagcacaaagcctgtcaaatgccaagcaaaatattcgtatcctctatagttcaaccgatgggatagatggccactctccaattacggtttctggcgcactatttttaccgaaaggcacaccaccgaaaggcacaccaccaaaagggggatggccattactagcctgggcacatggcaccgtcggtatcgcgaatatttgtgctccatcgtttgctggccgaagtaaacgtgatattggctacctcaactactggctaaaacaagggtatgccattgttgctacagattaccaagggctgggaacaccgggattacacccatattctgactatcgggctacagcttatagcctgcttgatagtattcgcgcagttcagcaaggcaattttcatttatcaaagaaaacaatcctcatcgggcaatcgcaaggcggaggagcaacgtttgccgctaccttatacgcaaaaagctactcacctgatcttgatattgtcggcgctgtcacaacgggaaccagtgttcctgacgctatcaagaaaatagtaaaacgagacgatactgtcagacatacgcttgcttaccttctgttagcaataaatactgtaccgttagtcaaaccatcattatcgccagaggattacctgagtgacaaagcaatcccggcttttcgcctttcacaaactcactgtctgcgtgatatagaaaaacagatattctcagataacttaaccggcgcaaatagctttaagaaagatccatcaccgcttatacaagctatcatgagcgtcaggtattaccccgccataaaaacagaaatccctattttctggggaacaggtgggcaggatgtagactcacccaaagacggtcaagttcagcttgttactgctgcgtgcaaactaggcagccatattgagtggcatctctatcccggtttgagccattcggccacaatgaaaggttctttgccagactctaccatttttgttaaacgagctttttcaggtgagcatatcgatgggaattgctccacgagcacagagtaatcattgttgaataataacgggctgtatttttactttaaacacagcccgttgcagattttttacgacaaaaatactttaaccaaaagagtccttatagggtctggagagtaagatctcctaccggaaagtgtaaaaatctttcaaagtcttctctgagagccgtctctggtaaagactgtaaagataactccctctgctgacaatcaaaaataccatcttcctgtccaaggtcactttgtatctttgattcattaacaaacaattcagttcttgggatacgaactttctcgtattggcgcagagcggcaactggatctggctgctgcttcaacatatgccccaaaacagcagcatcttcaatcgccatcccggcaccttggcccagtgtcgtaagcatagggtgagctgcatcacctaaaagagtaattcttcctttcccccaaagcggggaaaaaggcctgtcctgcgcagatacggagataatatcttccgatggcgtttgtgaaataatgtcggaaacaattgttggccaaccctcaaaataggccagaacatcttgattactcctttcgcaaagacaggcctgctcattactcatgtatgcagttccccaccaataaacttcgcctccgcctatatcgattaaaccgattcgttttccctgccctaaataatggacaacatagccgggggtaatctgcggatgctgatagcgggtaattgccaaccagcagatataatcagaagagcggagcggctgattcccctgtagatattcccggacaacagagtggataccatcagcaccaatcaacaggtcaccctgtgtttctctgccgtcagcaaaacggacaataaccgcattatcactttcgataatttcatctactttcgcatcgacatggataatactctgatctaattgctgtaacagggcttcctgtagtgccttacgtgataaacagacactatcaaatccattggaagacgagatttcaggtacaggcattctgcgtataagctgatccttaacgttcctgatttcgaaattcttaaccggagcaccaaagttttccagtttcagattaaccccaatagaggataacgccgcaacagcattagttatcacagacagaccagagcgtgccgttggtaaagtcgttgcttgttcgtaaacttcaacctcataaccaagccgctgtaaaacaaccgccgtcgttaatccgccaatacctgcaccagctataataactttcaatggacgggacatattttctccgaatccgatattacttgttttgtagacgattttttcatttcctgaagaatgacctttgccacttcctgtacataaggttcttccatgatttccagatgatcaccgggcacatcaatgacattgatataaccgcttgtcttgttctcccagccatttttcggatcacgatactcacttcgtaccgcatcatgcatagagcgcagaatgacaggtaacggccgtgttgcatgtaataaagtcatattgatatcagctttataagcggcatggtcggtagccgctttccagttagctttatacacatcgaataaccgctgtatgactgcgcgggaactgccctgaggaattgcacctgtcgcgatagcatgctcggtgatatattcgaattgttcctgcaaagaggtaatctgttccggtaaggtctgttccgagagtgtggcgccttcgttcagccacaataattcccagaagaaccatcgcagcaaagcgccttcatttattgttgtctgaggcgatgcgttaacagccaccgtgtctaaaataaagaggtctgtcacattttcaccctgctctttcaattgtcgggccatctcgaatgcgacaaatccgccataagaccagcctccgattgaatatgggccatgtggctgtatttcacgtatcgcttccagataatttgccgcctgttcttgtatgctgttcagcggtatagatcctgcgtctacgccatgcgcctgtaaggcatagaaaggctgatcgtcagggaaatacttcactaaccgcaaataggacaacacatttccccccataggatggacaaagaacagtggctgtttatgccctgtcgttcgcatggggacaagcggactgaatttgggatgccctccctcttccctgatatgtgcagctaactgggcaaccgtcggataactgataaaaagagacaagggaacactggtactgaaatgcttctcaatcaagaccaccattctcatggcagttaatgaagtagcaccaatatcaaacagattctggtgaacagatacggcaggaattttcagcaaatcagcggccaaatcacacagaacctgttcataattgtctcgtggcgcaatatcttctgcgttgttatggcattgcatgaccttcatactacgtaatgcagcatcatcacgcttaccacttagcgttttgggcagagtactcagccactctattcgggaaggcaccatgtatttaggcaatttttcagacaaatgttgctgtatacgcccagttaatgcttcattcttttctccgatcaagaatgccaccagcaggctgtcattttccccatgttgctgaacgacaaccgcgacgtcttgcagaaccttgtcagcaccgggcgtactcgatatcgctaattctatttctgccagttctatacgatacccacgtactttaacctgagtatctttacggcctaaccttaggatattgccatccctgagttttacacccagatcaccggttcgatacagtgtctccccgctgactttcagagtaataaagcgttctgcggttaattctggctggcggtaataaccctgtgcgacaggtaaaccacgggcataaatttccccctgttcaccaatggcaacctcttctaactggttattaagcaggatgatatctgcgttgctgatatttttgccaatgggaggaagtgccggaaaaactaccggatcaccctgcatggtaaatgccgtgataacatgggtttccgtcgggccgtactggttctcaagaataccgttattaatctgaccgataagcaaacgaatatcatcagtcacccgaagttgttctcctgatgaaataacaactttcaggtttttcgggtaggtttccagtgcaacggctgtttcagctaattgctgaagcgcaacataaggcagataaattctttctgtccggtaattatcaagagtacgcagtaattgcaaaggatcgcgtcgttcatcttcactgataagatgtagctcgccaccggcagtcagcgtagagaaaatctcctgaaatgaaacgtcaaaactcagtggtgcatactgtaaggtagaacaaatatttttaccggaatgggtttcattctgccaaataaccacatttgacaggctacgatgcggcattgccacacctttgggtttccccgttgaaccggaggtaaacagtaaataagccagttgttcaggcactatttctgtctctgattcctctgtttctgataaaggcacatctctgtgtatcagcgtgtcagcccgcacggttggaattgttgtcacgttaaataactgactggatttatcatcaacaatgacaagtgctggctgagcctgttccatcatggcttcaatacgctgagccggatagcttaaatccaacggaagacaaactccgcccgctctcattacgccaatcagtgatgcaaccagtatcggagagcgttcaagcgcaatcgcaacaggtgtattttgcacaacgccaccagcaatcaatacggaagcaattttcccggattccgaccagagttttctataactccattgcagatcatgatgacggattgcaattgcatccggctgttcccgtacatttttggccatcatcgccagcacagagataaattcctgagaatatatgtcattgttgctttgtgtaagcggctggctcagcgttgccggttgatcacgatgactgaccattctgttcaatatggacatatagatatccatataggtatcagcctgaatctgtgagaacaccctgccatcaaaatcacatcgcagataatgttggccggtactgaaatcggtcatgacattgagcagtaattcaaagttagtctcttcccacggatcaaatgcaatgagagataaatcaggagtgtcaaaaacgtcctttaatacgtgaaaatgaatgtaattaaacgcggaacttatttccgccccttctcctgctacttgccggatagcattaagcggatatttacgatatggagcatgatgctgttcagcgctaaatacagcatggatacactctttccatgttttattctgcgcagaaaaacggacaggtaatgtattgagaaacaaacccagtgtttgctctgaattctgtgcatctggtctgccatgagtgactaacccggttgcaatttcatcctgagccgtaattttagccacagtcaaacaatgggcggcaaagaatactgatttaactgaaacacgttcacgctggactaatatcgtcagcttttcttcagtctctttggaaatgattgtttttttagtgaagatccgatcttctggctcactgtcgtacaatcggtaggccggtaattgcgttctgggaagcccgctgaacatgtttttccagaacaactgatgttcctgacactgtaatgcgtggagttcatcctgaaaaatcc

SEQ ID NO: 1919 - DNA, 8840 bp, Xenorhabdus sp.
  CDS (363)..(1676)
aacaaaaacagtaattattctcgccgtggccatagtttatgcctattttactattttttatctcactgtatttaagaggttttttcaggtaaatccctgtaaagacattcgacaaaacgacattattagtgaactttgctgaatacttggtagtcataactgcaacgaaacaattatgcttgaaacctgttccgatgagtgtagtttctcagaaaaatgaaattcccttatgggttcggggctttaagtacgatcttccttttctggcttaggtaagtaagagaacgcattcaatgaaaagtaaaaacacattgctcagcgcattagcgatcagtattggtttatctttagcttcggtaccaatggtaagtaatgcggctttacccgctgctatggcctctcaggaattaccgagccttgctccaatgttagaaaaagtccttccttccgttgttaccgttcatgttgccggcactgaagttcaaacccaacaactccagctgccagaagatttccagttcttctttgggccgggttttccaccggtggaacaacaaagaagccgcccatttcaggggttaggttctggtgtcattattaatgccgataaaggatatgtactgactaacaatcacgtcatcaataacgcggataaaattaaagtccagctcaatgacgggcgtgaatactccgctaaactcatcggtcgtgatccgcagactgatatcgcacttttgcagcttaaagatgccaaaaacctgacagcaattaaatttgctaattctgatcagcttcgcgtcggtgattatgctgttgctatcggtaacccattcggactggggcagacagtgacttccgggatcatttcggcccttggccgtagcggcctgaatctggaaggtctggaaaactttatccagacagatgcctcaattaaccggggtaactctggtggtgccctgatcaaccttagaggggagttgatcggtattaataccgctattgttgcacctagtggcggcaacgtgggtattggttttgcgatcccaagtaacatggccagaaatctggcagaccagttaatagctcacggcgaagtaaaacgcggcctgcttggtatcaagggtactgaaatgtcagcggatatcgccaaagcactgaatgttgatgctcaacagggcgcatttgtcagtgaagtggtacctaaatctgctgcggctaaggctggtattaaacccggagatgtactgacctccattgatggtaagaaaattaatagctttgctgaactaagagcgaaaattggtacgactgcaccgggcaaagaaatcaaagtaggtctgttgcgtaaaggcaagcctatggaggtttctgttgttctggaaaatagcgaatctccatctaccaaagctgaaaaattaagcattgctctacagggtgcgaatctcagtactggcattgtgaacaatactcccggcgtgaaagttgacggcgtcgccaagaattctccagccgcaatggtcggtttgcagaagaatgatttgatcatcggggcgaataatgttcgggtcaagaatatcaatgagctacaaaaggtacttgaaggaaaaccatccgttattgcactgaatatcctgcgtggtggtgacaatatttacctgttattgaacaattaatcggtatgccattatttttctgattgcagtacattaagcagacacagcacaggctgtgtctgcttgcttctgtgctatgcttttttaacttattgattactgaacaatgttatgttgattaaattactgcgctccatattggcgggattacttattgcagcaattttattggttgccataccctctctacgtcccaataagttaaataatctcctgtacagcgataacacagaaaaaccatccagttacagtcagggtgttcgtcgggcagcacctgcggttgtgaatatatatagtaccagtataggtagtttctcccatgaaccccgggaactgcttccattgggttccggcgtcataatgagtgagcaaggttatatactcaccaataagcatgttatcaacaaagtaggatctattattgttgcgttacaggacgggcgtttctacgaagctttactggtcggctctgatggcccgacagatttggcagtactcaaaataaaggctgaaaatctgccggttatccctattaatctcaaaagggcacctcatgtaggggatatcgtgctggcaatcggcaatccttataacttagggcaaacaattactcaaggtattatcagtgcgaccggacgtgtcgggctgagtccgacacgacgccagaatttcctgcaaacagatgcttcaatcaatcagggcagctccggcggagcactggttaatacattaggtgaactggtcggcattaatacgctgtcgtttgataagtccgaatttggctctacgcctgaaggactgggatttgccattcccaccgctctggcaacaaaaattatgcagaaactgatccgtgatggtcgggtaatcagaggatatatcggcatttcaacaaaagagctgccgaatatccgctcgtcagatacccaaatccatcagattcagggagtgcgggtttttcagcttttaccgggaagcccagccaaaaaagccggaatacaagtgggcgatattatcatcagccttaatcaaaaaccggccctctcacctgccgaaataatggatcaagttgcagaaatccggcccggaaaagtcgttcctgttactgtcttacgtgatggtcaaacgcttaccttcaacgttatgattgaagaatttgatgaatactgaacccgagatatcgaaacaaaagtgtgactttgtgaaacttgatgatcaaataaacaaatgagataaagttacgcattttatcggaggttatcatggcaataacacgtttacgtcaacagggcggagctgtcgttatcacaattcctagtgatgttgccaccgtaatgggatggtctgtcggcatgactctggatatacaaccatcaggcgacaccataaacatcaaaccaacaggcagagttgcccgaggcagaaagtctctctctgagttattgcaggaaattgatgaaaccgaagtcagggctttcaacgaagtaactgctgatgatttaaattcgactcctgttggtaatgaggtgatttaatagaacgcaaagctacctattcggcacaggcggaacccagtattgttgatgaaatattagctaaagtcatagatattttagatccacaactgaattgattattcgaaaaaaaccgccactaaatacttcctatcaaagaagatattactaagtgacggtttaaatagaattcggtttacttaatacgttcgatattggctcccagaccacgcagcttatcttcgatatgctcatagccccggtcaatatgataaatgcgatcgacggttgttgttccttcggcaatgcagccagcaattaccaggctcgcggaagcacgcagatctgttgccatgacctgagcacctgataatttctcaacaccgtggcagagtacagagttactttcaatctctgcgtgtgcccccatgcgaatcaattcaggaatatgcataaaacggttttcaaaaatagtttcggtgatcatgcccgcaccttcagcaacaatattcagtaagctgaactgagcctgcatatctgtaggaaaacccggatgcggagctgtacggaatgttaccgcttttggccgcttgccatgcatatcaaggctaatccagtcatcgcctacctgaatatctgcaccagcttcacgtaatttagccagtacggcatccagtgtgtcaggcttggcctgacggcagacgatcttcccgcgtgaaacagccgcggcgataaggaaagtaccggtttcaatacggtcaggcaaaacacgataaacaccaccgcccaaacgttctacgccttcaatcacgatgcgatctgttcctgcacccgtaatttttgcacccaacgtattcaggaagttggctgtatcttcgatttcaggctcgcgggcggcattctcaataatgctcttgccttccgccagtgttgcagccgccatgatagtaaccgttgcaccaacactgactttatccatgacgatgctggcaccttttaaacgaccatctacggatgccttaacatagccctcatccagcactattttggcaccaagttgttccagcccggtaatatggagatcaacaggacgggcaccaatggcacatccaccgggtaaagaaacctgcccttgaccaaaacgggcaactaatggccccagtgcccagatagaagcacgcatggttttgaccagttcataaggagcacagtattcattaacagcgctggcatcaacaaagacagaaccattcttgcattccactttcgttcccagacgattcaatagcttgattgtggtatcaatatcttttaattcaggaacattttgtaattcaactggctcttccgccagcaacgctgcgaacaggattggtaatgcggcattttttgccccggaaatagtgacctcgcctgacaagcaggtcggccctttcacttgaaatttatccatctgtcataattctcttatttaattcaaagtgcgctgttcgcggcgaagcaaacaacctcagaaaccctggagcttgcggtcacgttgccattgcgctggtgtgtaggtcttaattgacagggcgtggatacgattatcagcaatgtattccatcagaggtgcataaactgtttgttgttgttttacccggctcagctcaccaaaaatttcacctacagcaattacctgaaaatggctgccgtcgccgctaacaataacttcatcaagtaccaatttttccatcagtacctgtttaatctcattagtatccatatcttgctcacattcgtcgttaaaaaataatagtagatgcctatcgtaatggaatccagacgactcttaaaccaagaaaaacgcccttataagacaatgactcataagggcgataattatatccacctttaaagtaacagagttatcaacaacaccctgaaatctgttaggtctagaatgaaaacattatatttattctggcgaatttcctttctcaggcgaattatcagcaaagagactttgtagactatagagcgcaatcagtgtgttcaatcgctcccctatgccagaaaatgtcagcaccttaccacgctgctgccagtcgccttttatgcggacaaataaggccattcctgtcgagtccacatgctcaagccctgaaacatcaatgttttcaatgtgagccaataagctgtccttttgctgccaaaacggcagcaggctatcgcgatccagagtacctttcaggaacagggtgcttcttgtctgttgccagctaagcggtgttttgtcagaggctttatccatcccccggtttttcatttcaccgttttccatatcactttttcttttctaaagtgattggagcctgtgcactgattttcagctgctctgtcaaaccatcaatacctttctggcgcagaatttctgaccactcattctgtttggtcgtaatcatgctcacaccttcagctatcatgtcgtaagcctgccaatatccggttttactgtttttacgccactgaaaatccagacggacaggaggctggccattcggatcggtaatggtgacacgaatagcgacgatattcttatctcccaatggctgctccggggcaatctgataattctgcccgtgatacattgccagagcctgaccataagcctgcgccagataatcctcaaatgctttaaaataagcatcacgctgctctggcgtcgcctgtttgtaataaggccccagaaccagcgcacctgcatattttacctgaacatatggcaatagctcctgacgcacaatctgaggtaacatttcaggattagcgcgaatctgcgcttgttcaactttcagacgtgagaaagttttttctgccgcgactttcatcaaagcatacggattagtctgatcaaccgcattggcaagtggtgcaaccaccaataaagcagccataagtaatcgcttaaacataattgctatttctcctaagcagtggattgctggttaatgtacctgtgcgggagcctcagatgatttttgctgatcaccacttccgcttttgtacaggaactgaccaattaaatcttcaagaaccattgcaggtttggtgtcctcaatgcgatctccatctttcagcatggtgatccccaaatcagcatcatcaaacccaacattcaacgcaacatattgttcacccaacagtcctgaagtccggatggacagcgaactggaacttggaatattgtcgtactgcgagaaaatatccagttcaacctgcggagtatacgttttcttatcgagccagattttccctacccgaccaatgaccacccctcctactttgacaggagaacgctcttttaacccacctatattgtcaaatgctgcgatgacatgataagtggtctgactgccaaaagatcggacattagcgaccttcaggcataagaaaatgattgcggccagtgcaattaagataaaacttccaacccaaatttcatttttcttgctttgcatcgaattagttcccaaacatcagtgccgtcagcacaaaatccaaacccaatactgccaacgatgcatgaaccactgtacgcgtcgttgccctgctgatcccttctgatgtcgggatagcatcatacccattaaacagcgcgatccatgtcaccgtgatggcaaaagctaaactcttaataaaacagttaagtatgtctttctgtaattccaccgctgactgcatggaagaccagaaaaaaccaccatcaatccctttccagtcgactccgaccatcgcaccgcccagaataccgacagccacaaagatcaatgacagtaaaggcatactgataaaaccagcccaaaaacgcggagcaattaccctacgcaacggatctactgccatcatctccagactggaaatttgctctgtcgctttcatcaggccgatctctgccgtcagggcagaacccgcacgaccggcaaataacagtgcagtcacgaccggccccaattcccgcagcagcgataacgccaccatcatgccaagactgccttcagcactgaaagtcctcagcaccagatagccctgcaacgccagaaccataccgataaacaagccggaaacgacaataatcagtagtgactgaacacctacactgtaaagctgctggcgcaataacagccactgctttgcaggctcgggcttaccaataatcgcgctgaataacataaaaccggcccgaccgaaagaagccacaacttcaatcgcacgcctgccaaatgttgccagcgcccgtgttaacatcaacattcaagtatcctaataacgatttctgttagttaataactcggttttataatcccccgcagggaaacgaaaaggcaccggcccgtcagcaataccatcaaggaactgacgtacccgctgatcctgattcattttcaattgttcaggcgtcccttctgcaatcactttctgctcagccacaatataggcataatcagcaatactcagtacttcaggaacatcgtgggaaaccacaacacaggtaacaccgagcgcatggttaagttcatcgatcaatttaaccaatactcccatagtaataggatcctgaccgacaaatggctcatcaaacatgattaaatcaggatcaagtgcaatcgcccgcgccagtgcagcccgccttgccatacctcccgatagctcagatggcatcagttttgccgcaccacgtaatcctaccgcttccagcttcatcatcactgtagtgtaaattaattcttcggggagtttagtatgctcacgtaagggaaaagcgacattgtcgaacacattcaaatccgtaaataatgcgcccgattgaaataacatactcatcttcttacgaacttcataaaggcgctggcgggacaatgccgggatattatctccatcaaaccaaatctcaccgcgctcagggcggatttgcccgcccatcagacgcagaagagtcgtttttccaataccggaaggccccataatggctgttattttcccttttggaaccgtcagattgatatcggaaaagatcgggcgctgaccacgggtaaaagacatgccgcagatctcaataagatttgctgttagttgactcattattgatagcccttaatcgttaataaacgaatttcttgctgtttctaaataattagtaatgcatactacaaaaaaattttccaatttgcgttagcaaagtgatagcaaattttactttttaactttcggccttcagaatatataaatctggctaaataaatatttttatccagaaatcaaccaacactggcattgtgctcacatgaattttctctaaggaacacaacatgtttctgactattttactgctcattaccgggttgattttactggtgtatggttctgatagattagtatatggtgcggcggtatttgcccgaacattaaaagtccccccttttgttattggtctggtgattatgagcatcggcacttctttgcctgagctgatggtttctgtaaccgcgagtctgaacggggttacccaacatggcagtgggtaatgcactccggctccaatattaccaatctgttactgattaccggcccagtggcccttgatccgccccataaaaatgcaatccaaaat

SEQ ID NO: 1920 - DNA, 8840 bp, Xenorhabdus sp.; identical to SEQ ID NO: 1919
  CDS (1857)..(2846)

SEQ ID NO: 1921 - DNA, 8840 bp, Xenorhabdus sp.; identical to SEQ ID NO: 1919
  CDS (2939)..(3211)

SEQ ID NO: 1922 - DNA, 8840 bp, Xenorhabdus sp.
  CDS (4198)..(5454)
attttggattgcatttttatggggcggatcaagggccactgggccggtaatcagtaacagattggtaatattggagccggagtgcattacccactgccatgttgggtaaccccgttcagactcgcggttacagaaaccatcagctcaggcaaagaagtgccgatgctcataatcaccagaccaataacaaaaggggggacttttaatgttcgggcaaataccgccgcaccatatactaatctatcagaaccatacaccagtaaaatcaacccggtaatgagcagtaaaatagtcagaaacatgttgtgttccttagagaaaattcatgtgagcacaatgccagtgttggttgatttctggataaaaatatttatttagccagatttatatattctgaaggccgaaagttaaaaagtaaaatttgctatcactttgctaacgcaaattggaaaatttttttgtagtatgcattactaattatttagaaacagcaagaaattcgtttattaacgattaagggctatcaataatgagtcaactaacagcaaatcttattgagatctgcggcatgtcttttacccgtggtcagcgcccgatcttttccgatatcaatctgacggttccaaaagggaaaataacagccattatggggccttccggtattggaaaaacgactcttctgcgtctgatgggcgggcaaatccgccctgagcgcggtgagatttggtttgatggagataatatcccggcattgtcccgccagcgcctttatgaagttcgtaagaagatgagtatgttatttcaatcgggcgcattatttacggatttgaatgtgttcgacaatgtcgcttttcccttacgtgagcatactaaactccccgaagaattaatttacactacagtgatgatgaagctggaagcggtaggattacgtggtgcggcaaaactgatgccatctgagctatcgggaggtatggcaaggcgggctgcactggcgcgggcgattgcacttgatcctgatttaatcatgtttgatgagccatttgtcggtcaggatcctattactatgggagtattggttaaattgatcgatgaacttaaccatgcgctcggtgttacctgtgttgtggtttcccacgatgttcctgaagtactgagtattgctgattatgcctatattgtggctgagcagaaagtgattgcagaagggacgcctgaacaattgaaaatgaatcaggatcagcgggtacgtcagttccttgatggtattgctgacgggccggtgccttttcgtttccctgcgggggattataaaaccgagttattaactaacagaaatcgttattaggatacttgaatgttgatgttaacacgggcgctggcaacatttggcaggcgtgcgattgaagttgtggcttctttcggtcgggccggttttatgttattcagcgcgattattggtaagcccgagcctgcaaagcagtggctgttattgcgccagcagctttacagtgtaggtgttcagtcactactgattattgtcgtttccggcttgtttatcggtatggttctggcgttgcagggctatctggtgctgaggactttcagtgctgaaggcagtcttggcatgatggtggcgttatcgctgctgcgggaattggggccggtcgtgactgcactgttatttgccggtcgtgcgggttctgccctgacggcagagatcggcctgatgaaagcgacagagcaaatttccagtctggagatgatggcagtagatccgttgcgtagggtaattgctccgcgtttttgggctggttttatcagtatgcctttactgtcattgatctttgtggctgtcggtattctgggcggtgcgatggtcggagtcgactggaaagggattgatggtggttttttctggtcttccatgcagtcagcggtggaattacagaaagacatacttaactgttttattaagagtttagcttttgccatcacggtgacatggatcgcgctgtttaatgggtatgatgctatcccgacatcagaagggatcagcagggcaacgacgcgtacagtggttcatgcatcgttggcagtattgggtttggattttgtgctgacggcactgatgtttgggaactaattcgatgcaaagcaagaaaaatgaaatttgggttggaagttttatcttaattgcactggccgcaatcattttcttatgcctgaaggtcgctaatgtccgatcttttggcagtcagaccacttatcatgtcatcgcagcatttgacaatataggtgggttaaaagagcgttctcctgtcaaagtaggaggggtggtcattggtcgggtagggaaaatctggctcgataagaaaacgtatactccgcaggttgaactggatattttctcgcagtacgacaatattccaagttccagttcgctgtccatccggacttcaggactgttgggtgaacaatatgttgcgttgaatgttgggtttgatgatgctgatttggggatcaccatgctgaaagatggagatcgcattgaggacaccaaacctgcaatggttcttgaagatttaattggtcagttcctgtacaaaagcggaagtggtgatcagcaaaaatcatctgaggctcccgcacaggtacattaaccagcaatccactgcttaggagaaatagcaattatgtttaagcgattacttatggctgctttattggtggttgcaccacttgccaatgcggttgatcagactaatccgtatgctttgatgaaagtcgcggcagaaaaaactttctcacgtctgaaagttgaacaagcgcagattcgcgctaatcctgaaatgttacctcagattgtgcgtcaggagctattgccatatgttcaggtaaaatatgcaggtgcgctggttctggggccttattacaaacaggcgacgccagagcagcgtgatgcttattttaaagcatttgaggattatctggcgcaggcttatggtcaggctctggcaatgtatcacgggcagaattatcagattgccccggagcagccattgggagataagaatatcgtcgctattcgtgtcaccattaccgatccgaatggccagcctcctgtccgtctggattttcagtggcgtaaaaacagtaaaaccggatattggcaggcttacgacatgatagctgaaggtgtgagcatgattacgaccaaacagaatgagtggtcagaaattctgcgccagaaaggtattgatggtttgacagagcagctgaaaatcagtgcacaggctccaatcactttagaaaagaaaaagtgatatggaaaacggtgaaatgaaaaaccgggggatggataaagcctctgacaaaacaccgcttagctggcaacagacaagaagcaccctgttcctgaaaggtactctggatcgcgatagcctgctgccgttttggcagcaaaaggacagcttattggctcacattgaaaacattgatgtttcagggcttgagcatgtggactcgacaggaatggccttatttgtccgcataaaaggcgactggcagcagcgtggtaaggtgctgacattttctggcataggggagcgattgaacacactgattgcgctctatagtctacaaagtctctttgctgataattcgcctgagaaaggaaattcgccagaataaatataatgttttcattctagacctaacagatttcagggtgttgttgataactctgttactttaaaggtggatataattatcgcccttatgagtcattgtcttataagggcgtttttcttggtttaagagtcgtctggattccattacgataggcatctactattattttttaacgacgaatgtgagcaagatatggatactaatgagattaaacaggtactgatggaaaaattggtacttgatgaagttattgttagcggcgacggcagccattttcaggtaattgctgtaggtgaaatttttggtgagctgagccgggtaaaacaacaacaaacagtttatgcacctctgatggaatacattgctgataatcgtatccacgccctgtcaattaagacctacacaccagcgcaatggcaacgtgaccgcaagctccagggtttctgaggttgtttgcttcgccgcgaacagcgcactttgaattaaataagagaattatgacagatggataaatttcaagtgaaagggccgacctgcttgtcaggcgaggtcactatttccggggcaaaaaatgccgcattaccaatcctgttcgcagcgttgctggcggaagagccagttgaattacaaaatgttcctgaattaaaagatattgataccacaatcaagctattgaatcgtctgggaacgaaagtggaatgcaagaatggttctgtctttgttgatgccagcgctgttaatgaatactgtgctccttatgaactggtcaaaaccatgcgtgcttctatctgggcactggggccattagttgcccgttttggtcaagggcaggtttctttacccggtggatgtgccattggtgcccgtcctgttgatctccatattaccgggctggaacaacttggtgccaaaatagtgctggatgagggctatgttaaggcatccgtagatggtcgtttaaaaggtgccagcatcgtcatggataaagtcagtgttggtgcaacggttactatcatggcggctgcaacactggcggaaggcaagagcattattgagaatgccgcccgcgagcctgaaatcgaagatacagccaacttcctgaatacgttgggtgcaaaaattacgggtgcaggaacagatcgcatcgtgattgaaggcgtagaacgtttgggcggtggtgtttatcgtgttttgcctgaccgtattgaaaccggtactttccttatcgccgcggctgtttcacgcgggaagatcgtctgccgtcaggccaagcctgacacactggatgccgtactggctaaattacgtgaagctggtgcagatattcaggtaggcgatgactggattagccttgatatgcatggcaagcggccaaaagcggtaacattccgtacagctccgcatccgggttttcctacagatatgcaggctcagttcagcttactgaatattgttgctgaaggtgcgggcatgatcaccgaaactatttttgaaaaccgttttatgcatattcctgaattgattcgcatgggggcacacgcagagattgaaagtaactctgtactctgccacggtgttgagaaattatcaggtgctcaggtcatggcaacagatctgcgtgcttccgcgagcctggtaattgctggctgcattgccgaaggaacaacaaccgtcgatcgcatttatcatattgaccggggctatgagcatatcgaagataagctgcgtggtctgggagccaatatcgaacgtattaagtaaaccgaattctatttaaaccgtcacttagtaatatcttctttgataggaagtatttagtggcggtttttttcgaataatcaattcagttgtggatctaaaatatctatgactttagctaatatttcatcaacaatactgggttccgcctgtgccgaataggtagctttgcgttctattaaatcacctcattaccaacaggagtcgaatttaaatcatcagcagttacttcgttgaaagccctgacttcggtttcatcaatttcctgcaataactcagagagagactttctgcctcgggcaactctgcctgttggtttgatgtttatggtgtcgcctgatggttgtatatccagagtcatgccgacagaccatcccattacggtggcaacatcactaggaattgtgataacgacagctccgccctgttgacgtaaacgtgttattgccatgataacctccgataaaatgcgtaactttatctcatttgtttatttgatcatcaagtttcacaaagtcacacttttgtttcgatatctcgggttcagtattcatcaaattcttcaatcataacgttgaaggtaagcgtttgaccatcacgtaagacagtaacaggaacgacttttccgggccggatttctgcaacttgatccattatttcggcaggtgagagggccggtttttgattaaggctgatgataatatcgcccacttgtattccggcttttttggctgggcttcccggtaaaagctgaaaaacccgcactccctgaatctgatggatttgggtatctgacgagcggatattcggcagctcttttgttgaaatgccgatatatcctctgattacccgaccatcacggatcagtttctgcataatttttgttgccagagcggtgggaatggcaaatcccagtccttcaggcgtagagccaaattcggacttatcaaacgacagcgtattaatgccgaccagttcacctaatgtattaaccagtgctccgccggagctgccctgattgattgaagcatctgtttgcaggaaattctggcgtcgtgtcggactcagcccgacacgtccggtcgcactgataataccttgagtaattgtttgccctaagttataaggattgccgattgccagcacgatatcccctacatgaggtgcccttttgagattaatagggataaccggcagattttcagcctttattttgagtactgccaaatctgtcgggccatcagagccgaccagtaaagcttcgtagaaacgcccgtcctgtaacgcaacaataatagatcctactttgttgataacatgcttattggtgagtatataaccttgctcactcattatgacgccggaacccaatggaagcagttcccggggttcatgggagaaactacctatactggtactatatatattcacaaccgcaggtgctgcccgacgaacaccctgactgtaactggatggtttttctgtgttatcgctgtacaggagattatttaacttattgggacgtagagagggtatggcaaccaataaaattgctgcaataagtaatcccgccaatatggagcgcagtaatttaatcaacataacattgttcagtaatcaataagttaaaaaagcatagcacagaagcaagcagacacagcctgtgctgtgtctgcttaatgtactgcaatcagaaaaataatggcataccgattaattgttcaataacaggtaaatattgtcaccaccacgcaggatattcagtgcaataacggatggttttccttcaagtaccttttgtagctcattgatattcttgacccgaacattattcgccccgatgatcaaatcattcttctgcaaaccgaccattgcggctggagaattcttggcgacgccgtcaactttcacgccgggagtattgttcacaatgccagtactgagattcgcaccctgtagagcaatgcttaatttttcagctttggtagatggagattcgctattttccagaacaacagaaacctccataggcttgcctttacgcaacagacctactttgatttctttgcccggtgcagtcgtaccaattttcgctcttagttcagcaaagctattaattttcttaccatcaatggaggtcagtacatctccgggtttaataccagccttagccgcagcagatttaggtaccacttcactgacaaatgcgccctgttgagcatcaacattcagtgctttggcgatatccgctgacatttcagtacccttgataccaagcaggccgcgttttacttcgccgtgagctattaactggtctgccagatttctggccatgttacttgggatcgcaaaaccaatacccacgttgccgccactaggtgcaacaatagcggtattaataccgatcaactcccctctaaggttgatcagggcaccaccagagttaccccggttaattgaggcatctgtctggataaagttttccagaccttccagattcaggccgctacggccaagggccgaaatgatcccggaagtcactgtctgccccagtccgaatgggttaccgatagcaacagcataatcaccgacgcgaagctgatcagaattagcaaatttaattgctgtcaggtttttggcatctttaagctgcaaaagtgcgatatcagtctgcggatcacgaccgatgagtttagcggagtattcacgcccgtcattgagctggactttaattttatccgcgttattgatgacgtgattgttagtcagtacatatcctttatcggcattaataatgacaccagaacctaacccctgaaatgggcggcttctttgttgttccaccggtggaaaacccggcccaaagaagaactggaaatcttctggcagctggagttgttgggtttgaacttcagtgccggcaacatgaacggtaacaacggaaggaaggactttttctaacattggagcaaggctcggtaattcctgagaggccatagcagcgggtaaagccgcattacttaccattggtaccgaagctaaagataaaccaatactgatcgctaatgcgctgagcaatgtgtttttacttttcattgaatgcgttctcttacttacctaagccagaaaaggaagatcgtacttaaagccccgaacccataagggaatttcatttttctgagaaactacactcatcggaacaggtttcaagcataattgtttcgttgcagttatgactaccaagtattcagcaaagttcactaataatgtcgttttgtcgaatgtctttacagggatttacctgaaaaaacctcttaaatacagtgagataaaaaatagtaaaataggcataaactatggccacggcgagaataattactgtttttgtt

SEQ ID NO: 1923 - DNA, 8840 bp, Xenorhabdus sp.; identical to SEQ ID NO: 1922
  CDS (3877)..(4140)

SEQ ID NO: 1924 - DNA, 8840 bp, Xenorhabdus sp.; identical to SEQ ID NO: 1922
  CDS (3358)..(3693)

SEQ ID NO: 1925 - DNA, 8840 bp, Xenorhabdus sp.; identical to SEQ ID NO: 1922
  CDS (2715)..(3326)

SEQ ID NO: 1926 - DNA, 8840 bp, Xenorhabdus sp.; identical to SEQ ID NO: 1922
  CDS (2151)..(2663)

SEQ ID NO: 1927 - DNA, 8840 bp, Xenorhabdus sp.; identical to SEQ ID NO: 1922
  CDS (1364)..(2146)

SEQ ID NO: 1928 - DNA, 8840 bp, Xenorhabdus sp.; identical to SEQ ID NO: 1922
  CDS (530)..(1348)

SEQ ID NO: 1929 - DNA, 8840 bp, Xenorhabdus sp.; identical to SEQ ID NO: 1919
  CDS (8754)..(8840)

SEQ ID NO: 1930 - DNA, 8093 bp, Xenorhabdus sp.; identical to SEQ ID NO: 203
  CDS (96)..(695)

SEQ ID NO: 1931 - DNA, 8093 bp, Xenorhabdus sp.; identical to SEQ ID NO: 203
  CDS (2192)..(2305)

SEQ ID NO: 1932 - DNA, 8093 bp, Xenorhabdus sp.; identical to SEQ ID NO: 203
  CDS (2315)..(2641)

SEQ ID NO: 1933 - DNA, 8093 bp, Xenorhabdus sp.; identical to SEQ ID NO: 203
  CDS (2718)..(3014)

SEQ ID NO: 1934 - DNA, 8093 bp, Xenorhabdus sp.; identical to SEQ ID NO: 203
  CDS (6435)..(7883)

SEQ ID NO: 1935 - DNA, 10577 bp, Xenorhabdus sp.
  CDS (838)..(2004)
aaagatgaagggcataccatttagaccgatgaataaacataatgtataagacatttcttttttgtctttggctgcctgcgtctggaaaaataaattttaccttaacctgacttaagttaaattttcaatttaatgcatgagttgtatttctatgttacgggtaataacaaaaataaaagtgcaatcaatgcgtattattaatcatatattttttataataatagaaatatatttcgcctgatgttgattaaatatattcattgactttaatttaatgagtttttatagattataaaaaaatcgatttattaaattgtgaataataaaaattaatataaagaatatattttttgtgctgcagcaaaaatagtctgtgatgatgatatttaaacgataaaaggttgttttttgattcatctcacacattagtgtaaattttttctaacctattttaattagtgtgcaccccttcacgaaaaacattgttttctttagttattataaatacgtgtaatgggatgaatacagcacacgaacgtaatatatcaatatagtacaacatgagattggagatttaattctcctgtttttttatttttcactttcattttttaatcttattgctggttcaatatggcaagttataaatattctaacgaggaaatttcattagaaataataatcaataatactggttctgtcattttttaaacgcgtcttttatgttcacgaaaatagtgacgggtttttattgccctgaatatattgcgcacagttcgtgataacgggacgtattacctaaaaattaatctttgtgggtgtcttattatgaaaagcatgaagccattggctgcattaattggattattggttatttctggcagcgctggtgccgttacggtttacaatgacaagggaaccaaagtcgatttgattgggcagtttcgtctgaaggcaaaaaccaccagtcaggatcgcgatatcaatattcgtgatgatggcagccgcattggtattggtggtagtcaccaattaaccagagatattcgcgtatttggtaaaatggaatggggttcagatactcaaagatcaaatagcgataattctaaaaccagttttgaaatgtataaccgtcttggttatatcggtgcatcccatcgtgattatggccagattcaattaggccggacttatattcctattgattgggtaaaaaaatccagctacggctatggcaacacaggtgtattttatttcagtgatgtgctgagccgtgcaacaggctacagcaatgacggagtaggtaaaaacaatttcgtgacccgcctgccacaaacgatttttatccagaccaacagttatgaaggctttaagcttgctgccacttacagtggtaaatccggttcagataaagatcgccagcatggtgatttgcgccacgcctattctgttgtgggtttctatgaatcaaagtttggcctgaaatttgatgctggttactccgcggcaacgggagaagcacaccgaaaaatagcgggtggcgagcgcaaagtttctgacgtctctccgcaagatagtttactggcttttggtatggaatattatttccccgggcgtgaattctctgttggtgtggattacggtcaggcacgttcccgcaattcaggcatgatttatcaggaaggtagaaataataaactcagctccaattccgtcaaaggaaactggaaggcaaacctgtatggtctgggtgcaaaatggcattgggataaaattgaaagcggcatgtatgcaggttattacctgcgtgacggtgattccaacacattcaactataaaaagcagacttacaccgttggtttagataaacgtttttcagtttctcagtacaatagcatacgtctgtttgttgaagcggcatacgatgatgcccgcagtgacaacccggtttacagagataagaaacagaccattctggaaaccggtgcacgtttgtttttttaattgaataaattctttctaagaaaaatgttatgggagaacttttaccggttctcctctctacaaaggggtataacatgttgaatcatgggttgaaaatttcatcactggcaatgttggtggcatttaatgtcaatgctgcgaccgttgatttacgggttatggaaacatcatatgttcatagcaacctgatggatttcgattactttaaggataaaccgactgaacagtttggtttggttcgtactgcaagcctgattaaagcagccaaatctgaagtgaccaatgccattctggttgataacggtgacctgattcagggtagcccgatggcagattatatggcggcaaaaggcctgaaacagggtgaagttcacccggctcatcagcttatgaacaccatgggttataccgtaggtaacttcggtaaccatgagttcaactttggtctggattatctgaaacaggcgatagcgggggctgagttcccttatgtcaatgccaatatcatggatgccaaaaccggtaaaaactactttaccccttatattattgtcgatactccggttaaagatcgggaaggcaaagagcatacgattaagatcggttatatcggttttgttccgccacagatcagtatctgggataaagcgaatctggatggcaaagtcgttgtcaacgatatcaccgaaacggcgaaaaaatttgtacctgaaatgaaaaaagcaggtgcagatctgattattgccattccgcactccggcttctcgcaggaaccttataaagcgatggcggaaaactcggtttactacctgagcgaagttcccggcatcagtgccatcatgttcggtcattctcacggcgttttcccaaataaagaatatgctggaattaaaggtgtcgatgttactaacggcactgtcaatggtattcctgctgtgatgccgggccagtggggagatcatctgggcgttgttgatatggttatcaataacgacggtggtgagtggaaagtggaatctgccaaagcagaagcgcgccctatctacgataaagcccataagaaagcactggttgagcgtgatgacaagctggcggctattatcgataaagctaatcagggaacccgcgattttgtcggtaagcacattggtaaagcttctgccaatatgtacagttacctagccctgatccagagtgatcctacggttcagatcgtcaatgatgcgcaggttgattacaccaaacgctttatcaaaggcgatcctgatctggctgatttaccggttctgggagctgctgcaccattcaaagcgggtggacgtaaaaatgctcccgctgatttcgttgaagtagaaaaaggtgatctgtcattccgtaatgccgccgacctgtatctctatccgaacacgctggttgtagtcaaagcgagtggtgctgatgttactgaatggctggaatgttcagtgggtatgtataaccagatcgatccgaactcgaccaagccacaggaattactgaactgggatggtttccgtacttataatttcgacaccattagtggcgtcaactataaggtggatttgactcaacccgcgaaatacgacacagattgccagctgatcaataaagatgctaaccgtatcaaggatgttacttatcagggtaaacctatcgatccaaaagccaccttcctgattgccaccaataactaccgtggttacggcggtaaatttgccggaaccggagaagatcacatcgcatttgcttcaccggatgaaaaccgttccgttctggcagcttatatttccagaacaaccaaagagcagggtgtggtatcaacacaggcggaaaataactggtcattcctgccaatcaaaacagataagcaactggatatccgttttgaaacatctccatcagaaaaagcagcgaaatttattaaagaacatgcccaatatccggtgaaatacctgaaaaatgatgatgtcgggtttgccatttatcaaattgatctgactgataaaaaataacgcttaattgtactacctataagtttcaggttgcagtgtttgggctgtaacctgaaagatgacggttacactttgatagctgatttaaagagataatgagatgaattataaatataaattacttccgattgtgattggcacagcattgctggcagggtgtgcaaccaagccagctaatgaatcatcaaatatcgtggatgtacgagttctgggtctgaatgattttcatggcgcgttgaaggcacctaaaaatcagtccggcggtattgaacatatggcaacgctgattaaagagctgaaacaggataacccaaataatatcgtggttgccgccggtgatttgattggtgccagcccgctgctttcctcaatgttccacgatgagcccagtattgaagctctgacccttgccggtctggaagccacttcggtggggaatcacgaatttgataaaggtaaaactgagctgttgcgtaaacagaatggtggctgccatccggtaacaggttgtcaggggccagcaccatttaaaggcgctgggtttcagtatctgtcggctaacgtcacagtcaatgaaacaggtaaaaccttattcccggaatatgtcattaaagaatttgaagggattcctgtggcctttattggcctgacactggaaggcacaccggcaattgtaacgcctcagggaacggctggtctgagcttttccaatgaagttaaaactatcaatgcactggtgccagaattgcagaaaaagggtgtaaaagccattggggtactgatccacgaaggtgcaatgcaaagacgtgacgctggtggtgttgatgttaatgcctgcaatggtataaccggaaaaatcatcgatatcgtcaatcagttggatcaagaagtggatttcgtgatcagcggccatacacatcaggcttataactgcgtgattaatggtaagtcggtcacttctgctcaggctaatggcgctttgctcactaagctggatctgaaactggataaaaccaccagagacgttgtcgatttcaaagcgaaaaatatttgggttgataactataaatatggcaaagacccgaaagtgacagagttattatcttcttacgaaaaaatagcgacgcctctggcaaatcgcgtgatcgggaaactggaaagtgatctgaataagaaaccgacatccggtggtgaatctgcgttgggtaaagtgatcgcagatgcacacctgtatgccacaacggcaaaagagagtggcggtgccgtgattgcttttgtaaataatggcggtatccgtgcgccaatggatgcaggggatgtcacttataacgcgatttacaccgtgcagccgttctctaatgtgatggtgactaagacactgaccggtgaacagatcaagcgtgcgttggaacaacagtgggatcgcacgcgcccaagtgtgatggcggtatcccatactcttgaatactcgtgggatagttcaaaaccggcaggccagcgagtgatcgccagctctatgaagattaatggcaagccagttgatatgaaagccaaataccgtgtagcggctaacgaatatctggcaaccggaggcagtaatttctccgtatttaaagaaggcaccgatccggtatacagtgttcctgatgtggatgcggtggtgaaatattttgccgagaaatcaccgattgcttacccgaaaaaagacaggatcacggatataagtagccaataatgtgatggtgattgtaaatacaaaaaattactgtagataaaatcaccatcaaacaggtactgtaacctttctgttgttttaaataataagtgcaatgctaattgttatgcattgcacttatatttttaatcttttcaaattaagtgaatatattacttataagtgtaatatttataacgtaataataattaaggtagtaataataaatgagacattgaataaataataaaaacagttatggagagcgctaatatgcaaaaaatgatggcgaggctaataaaaaataaaattgccagagtattaacctgttctataagtcttatactgggaagtgccacatattcttacgctgctgtagtccctgccggaacccaattagccgaaaagcaagaaatcacccgcaataatttttccgaacctgcttctttggatccacataaatctgatgggagtagtgaatttgatatcttagtggatctttttgaacgtttagtggataccgacaaagaagaaaaaattatccctgctttagccgaacgttgggaaactaaagataataaaacgtggtttttttatttaagaaaagaggctaagtggtcagatggttcgccggtaactgcccatgatgtggtgttcacttggcggcgattggtgacaccagatactgtttctccttatggtagttatctggttcaggctaatgttatcaatgcacaggctgtattatccggtaagaaaaaaccggaagaacttggcattaaggccctgaatgatacaaccttagaagtcacactggaaaagccaaaagcaggtcttttgcaaatgttggcacatccggtgatgtctccactcaatgaaaaggttgttacaaaacatggtaacaaatggacacagccacaattctttgttagtaacgggccttttacactttctgagtgggttgtgaatgagaaaattgttggtgtcagaaatcctcattattgggataataaaaataccataattaacaaagtcacttacttgccaatatctgattataaggcggatcttaatcgctatctggcaggagagcttgatatttctaatggtgggccaacagattttttttctaaattacaaaaagaactgggtgatcaattccatattaaaccgataatgagtgtttattattattattttaatacccaaaaaccgccatttaatgatgtgcgggtcaggcaggcattgaccttagccctagatagggatgtaattgctggaaaggtattaggacaaggacaaaggcccgcttactatgttgtgtctgagggtagtggaggaatggatttaaaacaacctgattatgcttcttggactcaggaacaacgcgttgaaaaagccaaagcgttattaaatgaagcgggttttaatgaagttaatccactgaaatttaaacttttatataatacctctgatggtcataagagaattgctattgctgccagttcgatgtggaaaaagaacctcggagttgatgctattctggaaaatcaggaaacgaaatcacagactgaatcgttgtatcagggaaactttgaagttggcagatatgcctggcaggcagattataatagtccatttacctttctggaaatattcatggcgggaaatacaaataatataactaaatatagcaatccgaaatttgatgagttagtgctaaaggcagatgaatctaatgatcaagagatttatcaaaaagcacttgatattattacccatgattcaccagccatcccagtttattattatgttcgtgttaagctagttaagccctatgtcggtggcctgtttatcagcccattgggacatattatgacaaaagatctttatattattaaacattgattttcaatggagatagcctgcttataacaggctatttctaaattaaagatctaattaaaatcgttaacgtaaagaaagtaaaaatataataatgggggtaaacaaacgatgcagaaaataatttctggaatgataaaaaacacaacatcgaaagtattaacctgctccatagcaatcgcgttaggctgtattagtctttctgctcaggcggcagttgtgccacccggcacagagttggcagaaaaacaggaaatcgtgcgtaataatggctcatttcctgcttcactggatgtacataaagtagaaagtaatactgagttagatatcattcatgatttgtttgatggtctggtttacaccgacaagaaaggtaatatcgaacccagattggcggagcgctgggaaacgaaggataaccagacatgggttttccatttaagaaaaggtattaaatggtctgatggcacaccgattaccgctcatgatgtggtattcagctggcggcgtttacttgagccgacaatgggttctccttatggtagttatcttgcaaccgctcatgtgacaaatgcgaatgatgtattactgggtaagaaaaaaggcgaagagcttggggtaaaagcgctggattattctacactggaagtgaaattggataagccagtcgcgtattttttacaaatgttaactcatccggttatggttcctatcagtgaaaaaacagtcaataaatatggtgataggtggacgcagccagaaacattcgttggtagcggtgcttttaaactgtctgagtggacagtgaatgagaaggtcgttggggtcagaaatcctcaatattgggatgataaaaacacagtcattaataaagtgacttatgtcaccatcgtatctgaaaaagccgatctgaaccgttaccttgcaggtgaaattgatataactaaaacaatcgcattagatgcttttgcatcattaaaaaaagaaatccccgatcagatgcatattacgcctatgctatccacttattattatgcttttaataacaagaaaccgccattcaatgatgtcagggtcaggttagcattaagtttagccattgacagagatgttattgccgataaggttttggggcaggggcaattaccggcttataatgtccttccgcctaatattggtggtttaaatataactctgcctgaatatgcaggatggacacaagaacagcggattaaaaaagccagagaattattaaatgaagccggattcaataaaaataatccactaaaaattgatttgctttataacacaagagaaactcataaaaaaatagctatagcagtcagttcaatgtggaaaaaaaatcttgatgtgaatgctgtactgcaaaatcaggaatggaaagtcatgctggataatatgcatcagggtaaatttgatatagtcaggtatgcatggacagcagattataatagcccgatgtcatttctggatattttcgtaacaggcaatagtaataatatccagctctatgaaaatagtgattttgatcaaatggtccttaaatcaggggaaactaacgacataaaacattatcaaaatgcaatggatatcataaccaatgacacacctgttattcctatttattattacgtgagtaataagatggtaaaaccttatattggtggttttcatccgactcccatggaatatatttcaacgaaagatctttatgtcataaaacattaataaacagatggggagtcttaataggctctcatcccatttgcaggattaaaataatgaaaataaaaaatattaaaaatagagctataaaacaattatcctgtctgtctgcaataatattagccggtgtagtcactgtatcccatgcagccattattccacccggaacacaattggcggaaaagcaggaagtggtacgtaataatggtagtgaacctgtttcattggatgtgcataaagttgaaagtgataccgattttaatattatttatgattttttcgataatctggtgtataccgacaaacaaggtaatattgctcccttattagcaactagctgggaaactcaggataatcaaaactgggtctttcgtttaagacaggatgctaaatggtctgatggttcttctatcactgcccatgatgtggtttttagctggcagcgtttacttgatccggcagtcggctcaccttatggaaactatcttattgatgctgcggtaatgaatgctaaagatgtgcttaaaggcacaaagagtgccaatgaattaggcataaaagcattggataattatacgttcgaagtgaagttagataaacctatcggggattttatacagagactggctcaccctgtcatggttcctgtcagcgaaaaagtggtcagaaaatatggtgataaatggatacagcctgaacactttgttagtagcggcgcattcaaattatctgaatggatagtcaatgagaaaatagttggcgttaaaaacccctattattgggataataaaaatgttgttattaataaagtaacgtaccttactttagagtcagcgaaatctgatttgaaccgttatctggcgggtgaaattgatatcacgctgacaattccacaggattcgtttgcatcattaaagcaaaaatatccggaacaggtgcatgtttctcccagactgggagcttattattatgaaattaataacggaaaagcaccgtttactgatattcgggtcaggcaggcattaaatctggcaatagacagagatattatcgctgataaagtgttagggcaggggcaaaagcctatttatactttcctgcctcccggtattggcggttttgattttaaacaaccggattttgctgattggacgcaagaacagcgggttgaaaaagcc

SEQ ID NO: 1936 - DNA, 10577 bp, Xenorhabdus sp.; identical to SEQ ID NO: 1935
  CDS (2079)..(4034)

SEQ ID NO: 1937 - DNA, 10577 bp, Xenorhabdus sp.; identical to SEQ ID NO: 1935
  CDS (4162)..(5769)

SEQ ID NO: 1938 - DNA, 10577 bp, Xenorhabdus sp.; identical to SEQ ID NO: 1935
  CDS (6040)..(7656)

SEQ ID NO: 1939 - DNA, 10577 bp, Xenorhabdus sp.; identical to SEQ ID NO: 1935
  CDS (7789)..(9402)

SEQ ID NO: 1940 - DNA, 10577 bp, Xenorhabdus sp.; identical to SEQ ID NO: 1935
  CDS (9591)..(10577)

SEQ ID NO: 1941 - DNA, 13505 bp, Xenorhabdus sp.
  CDS (7366)..(7872)
ttcaatcagctgacgatatgcatggttaagccacggataccaattcatgcatgtatttcctgtttttccagccaatattgcagagcctgacgaatgtcatcctgtactttttccaatggctgcgttgcatctatttttataatggatttatcctgtgcgaccaattcaagatatcttgtgcgggtacgatggaaaaaatctaatgattctttttcaatacgatccagttcaccgcgttcgcgggcacgttgtaggccaacctctggcggtaaatcaagataaatagtcagatcgggtgaaaaatcaccgagcgctgcttcacgtagtgaagccaataaatgttggtcaatgttacgtccgcctccctgatatgcctgagatgacatatcatggcgatccccaacaacccagcaaccttttgccagtgcaggcttgatgacattctccaccaactgaacccgggcagcataaagcatcagaacttctgctttatccgtcaatatttcaccttcgatcccttgcttgatcatctggcgtaatttttccgctaatggtgttccacccggctcacgggtaaaaacaagatcagaaatcccggattgtttcagtgtatcagacactgtctggatagccgtggtttttcctgctccttcaagcccttcaataacaataaatttgctgttcatttatcctgcttcaatctctggcgataaaggtttaccgctctattatgctctattaaatttgtggtaaaagtatggccgccattaccatctgcgacaaaatataaatagtttgttaccgccggatgagccgcagctttaattgatgcaagacccggcatggcaatcggtgtcggtggtagcccttcaatcatatatgtattgtatggcgtaaaagtgctcaggctgctgcggaaaatagttccggtgtatttatcccctaacccgtatatcactgtcggatcggtctgcaaccgcatttttaaacgcaggcgattgataaatacagaagccactttagcgcgttcagcatctacggcagtttccttttcgataatagaggccataattagcatctcataaggactcttatacggtaaattttcagcccggtttttccattcctgatcaacagccataaccattttttggtgggcccgcttgagtaagtctatatcacttgtacctgcggtatagagataagtatcaggatagaaccatccttccaatggactctctattttcatacccagcgattctgccagttcttgtggcgtcttatcttcagccgcatgttttaagtatggcgcattctgtaatatttttgaccagtcagaaagacgactgccttcaacaaagcgaatagtaaactggacctctttaccactggcaaacaattgcagaatttctcttactgacatatttttctgtagtcggtaagttcctgccttaaatttgattagctccggctctaaccggaaaagccacggtaataaaccgttatctttgattaaattatgctgaatcaacagcgtttctaagccaatacgccccattccgaccggtaaggtaaatatgagatcctgagccagattaaccttctgagcagaaaagttttctacttttttgataaaaaagaaaaatgctattgctgcaacaagaataatcaatacaggtagaataagaatgcgctttttaagtttcattcggttaccacttttatctgcctttcaacggctggctgaatcactacagtttaataacccacagaattacaggcttaaacattcagataataaatattcatataactctctggattggtatttccatgcaggctgatttttatgtgcctggatctggttaactgccataacaggcatcagtgaattacaaataattacctcatcagcgtgcgctaatgcttcaggataacgcatgacacacgacaaatggtaatcgctaccttccaatagctggataattttctgtcgcataattccttccacaccacactggctcaaatccggcgtatagatatttttacctctccgccagaagatattagcgctacaacattcaactaataaaccatcactatcaagtactagcgcttcatcgatcttttcctgatcaataaaccgttttatcagaacttgttccaaacggttcaaatgtttaatgcccgccaaatgagggttaatccccatagcaacaggactaagccctaatacaacacccgttttccgttgcttataatattgctctggataggggcttaataaaaggatctggtttggcccgttaataccatcactgctgtaaccgcgtccgcccgaacctctggataagagcactttcaaaacgccagattcatatcctgttaccacttgttgaatgtggctttccagttttacccagtccggtactggcataaacagtctttcaacgcctttttgtaatcgtttcatatgaaaaggcaaaaaagctgcctgaccctgctctactctgattgtggtaaagcagccatcgccatattgtaccgagcgatcattaaccgagatttgatcttgcggtttgccgttaatccaatacatcatcttactttctgattcttaaataaaaaggcgtgaaaacctcaggttataaggggcgctataatagtatatgagcggtagcagtgcaaaaagggacattcgtagtataaatcataaccacccgtataacgggtggtttgctcttgccctataagggcttgttaccgactgcgcctaaatgacgctgctttctcttcgttcaagctaagtgtctttgctgctttggcctaccccttgaaggggtctacatgctctttactactcaatttatccgagattaaatccgacttttcttgctctctgatatacttttgaattgtcgcttcatttagccctaccgtactgacatagaacccttccgcccaaaactttctgttgccaaatttatattttaaattggcgtgtctatcaaagatcatcaacgaacttttacccttcaaatatcccataaagcttgaaacgcttagctttggtggaatactcaccaacatatgaacatgatctggcatgagatgaccttcgattatttccacacctttatacttacaaaggtctctgaggatctctcccacacttgaacgaatattattaaaaatcactttccgtctatatttcgacgaaaagacgatatggtatttacacagccactttgtatgcgctgagctttgtgctttaatgcccataaacacctttccttatttgagttacgaatattagcttgtacatctatatcgtaacggaaaggtgtttttcttggtataacctttgaactccacccgcaaagcgggtggttttatgtttaagacgctaacgcgacttaaactggctaaagccataaatgaataagggaggcacatgcctcccttttttgtgcctgatttttgtggcagattttgtgtcagtttgtgggctggctctgaggtgggagcatcgggaatgtttaaaatccggatgtgattgagataagtaaaatgtggaggtatgtgatggaatatgaatttatgcaggatatcactggtcaggttacaacgcgtttttcaatggatcatgaagctattggtcattggcttaatgaggaggtgaaagacgatttgagcatattagataaaataaccgcagcgctgctagaaataaaaggcagtgcacgccagtggcagttgaatggtcatgaatacacactgttaatgaatgaagaagaaatcatgataagagccaatcaactccagtttgatactgaagagatggaagagggtatgagttactacgataacgaaagtctggcattttgcggtacagacgattttatcgatatgctggcaaattatagagattttgttttgcaaaaaaataaagggtaagtggttatgttcaatccatggccgctttctgccataatttctattccatcgctttcgtgttcatgtagataggttccaacaaaaaaaggtaggcttttatggaagagatcaatctgtccggtgagatagataaagcaacacattggctggtcaataatcaagaaatactgacccagtatgcaatgaatatcgtatttgccattttaattctgatagtcggtctgtctattgccaagctggcatgtaaggcagtgaaacgcgttatgtcgttacgtggtgttgatacgactatttctgactttttatcagccataattcgttatgccattatcgcgtttactatcattgccgttctcggaaggttagggatccagactgcatctgtcattgcggttattggtgccgccggtttggctgttggtctggcattacagggctcattatcaaattttgcggcaggtgtgctgctggttattttccgcccgcttcgtgttggtgagtatgtcatcattgggtcagtggaagggactgttgtacaagtgcagattttctctacaacattacgtacggcagatgatcgtatcattgttatccctaatggaaagattattacaaataatataatcaataccagccgtgaaccaaaccgccgtactcagattatggtcggagtggcatatgacgcagatattgatgaagttaaaaaagtattgggtgatgttattcaagcggataaccgtatccagcatgacaaaggtgtaactattcggttgcatgagatggcaccttcatcacttaattttattgtacgtgtatggacaaccaatggtgatgcctggagtgtttattgggatctgatggaaaacttcaagcgagctttagataaacataagattggtattcctttcccacaaatggatgtttatcttcatcagcagcagattgctttgcagaagaacacaaacaattaaccaaaacttttgatgtaagaaatacttggtgtgagaaatagatacactcacaccaagtcagagtttgcttaaacggcatttaaatttttaatcagagaagtaggtgttgcttacttcataggtacggcttcaaatacaagcatttccagcggttttagtgtcacggtgacagctttggtatagttttccggtacagtggagttattgccgtatacggggattagtctgaaatgcgaggtttctccccgcgggatttcaaagtcttttgccatatccagataatatgtttgttctttatctgacggattgcgaagaccgagaattgctttacgtttattccatgatgcccagccgtaaattttcagtgcatggggatcgccgcctatccagtggctatctatcagtacatctgaattgctccgtgaccacttagccgctttcgccagcgtatcccatttggccttattcagcatagacggtgtgatatatagctcttgtagctgtgagccggtggcgaagtagctccagacgtgatcggttaaaacaagatccgtttgtaccttctccagtccatcataggagcttttcgcgctgacgatgccgtggtacatcaatgaattaagtggtaataacggactctttttcacaatcgagcgataagtctgtgcatcacggtaagtgacccacttctgagctggggaacctttaccgtctaaattgatatcagaaccctgacgccagatagaatcggcgtagaacagccaggaagggctggcagtggtgccggttgtcaggttgatgaacagatccttgttagccgctcacatattattaatgagggcaatcgaggcatcgaaatcggaagcaaacgggctacctttaatatgcgaattggcattacccataccgtccagcttgaaggaagtaatgtgttcatttttgatgaggttaagaacttgggcgttaaagcttttgaaataatttgggccagagagagcgagccctccattagctgtttcaaaaccatattctttggcatgcgagacgcgggttttgcctgattcaccatagccaccccatggggaaagccacaaacctattgaactgtgcaggctggctgctttgtttctaatggtatcgaaatggctgaaggcagggctaaacagccatctgccagtgaggtcatcccagccatcatccagtagaaaggcatcaagcttcacaccacgtccggtaatgaattctttattccattcatctatccgtttcaatacatcttgttcggtgtaggcggagccaaagcctatatccatccagctattgtagtgtagatagggtttatatggacgtggtcgcagtgtgttgatcagttggttaacactgcggcgtagttgattggtttccggaaaggtgccaaggaagagagtatagctgagcggaattttaggctggatagccattttcagctcgacgttcaggctactgcttgcttcatggacattggtgttcacaaaaggttttttgggcagaatgacaaatgggttggcaatgattggtgagctgttgatttcgccatcaatataaggtgccggagattgctgcttagttgggaagaaggtgatgttagtaatttctctgggtttacctaccgcagtgatagtgtaattaatgctggcatatttctttttcagcatgctcagtacgacggtgacgttaaaatccttgtgggaataatcaatcttaattgcgttatcccgttgttctatatgtttgattttaaaatcagcggtatgaatcacatcttgatttggcagtgttagaaaaaagagttcctgtgatgtgatctggcggtggaacggtttatcctgaatcgtaacgacagacttaggctcttcaaacgagatcttaatattgtcgttggtcaggacataatttgcggcaaaagcgctattcgaaataagcaggctaattaatgaaacttttgtgatatttttcataggaggctctttatttttatttagaaaaggaaaacatttcggtaattgaaataagaataaaaagtgaaaaaaatgttttttagcttggcagctgcgttcatgttcaaataaaaataaaccgcgaggggaagagtatgtctctatccccccttatcaagggctatatgtagcatggtgtacttcaaccgtccgtcacatgcggaaggaaataatcaggcggactgtttacctgctcagtgctttattaattttattaatgatgaataagaataattaatttttactaatgaatgtgtttgcctaatatgcagatagacctcattttattgaataattattaggaatttctgcatgttttcgacgttaattcagggcttttttcttagtgctgcaatgatcatcccacttggaccccaaaatgtttttgtgatgcagcagggcaatttcatctgatgagtgccgcattatgtgccatcagtgacatgattctgattatggctgggatctttggtggaagtgctctacttgggcaatctacttttctgttacaggcggtgacatggggaggcgttgcattccttttatggtatggatggggggcttttcgggtcgcattatctgcggactttacactttctaataaagatgtggttgttcaaagccgctggcggattattgtgacattatttgcagtcacttggctgaatcctcatgtttatctggatacttttattgtattaggtagcattggaggtggattatcagctgagttgaggccgtggtttaccatcggtgcagtgacagcctctatcagttggtttttcgcattggcgatactcgccgcgtggttttctccaatccttaatcaaccgcgttctcaacgcatcattaatctgtttgtggggtgcgtaatgtggtatatcgcatggaatttattgaagcagggattacagatttttaattaactgcaacaattctttataatttaaacaattctttataaatagtgtgctaatgtttctgaaaattgcttgtcatactgtctattgggatcttctagcctattagactgttacaggttattagagtctgaccaaaatgcttatttatttgctgtatatccagtttgtttcgagttaacagtggcttgaaagagggtgggtatatccgaaaggaggttttagtgaaacgtaactcactgatatttgctgttatgctggctgtaggcagtatgtcagtttcagcggcggaattaccatctgtcccacatatatctacttctggtagtgcaacaatcaaagcagccccggatatggcaactctgatgattcatgtcaaagtgagccagaaaagcgcgaccgaggccaagcataaagttgatgcacgtgttgccaagtattttgattttttgaaggcgagtggtatcgataaaaaggatattaatgcggccaacatccggacacagccagaatatcaatatgatcagaaaaatggtaaatcgaccattatagggtatagcgcatctcgctcagttgaagtcaaagtacataaattggatcaactgaatccgttgctggatggagctttgaaagcaggactgaatgaaattaattctgtgcaattcagcgttgctgatcctcagctatatcgtagtgaagccagacagaaagcgatcgcaaatgcgattcaacaggcaactgaactggcaaaaggctttaacagtaagttaggtgctgtatatagtgtcacttatcgtccccctgaagctgtaccttatccaatgaacagactgcaattaaggacaactcagatggccgctgcaccagcaggggattcagcagatgaaacttatgaaccacaaagcatagagttttctgatcacgttgatgcagtttttgaattacagcgttaattaatctcatcttcctgacgtaacatctggcgcccaagttttaacagggcgtcagtgacttttctcatggcactgctttccggggcaaaccggtgccagtaaagcatacggcgctggtacagcccgggtgttaaatcaactaattcacctgcttttagttctctgtcaatttgtaaatgagggatcatacagcatgttgtgccttgttttgctaattgaacaaaggcttcagatgagttaacgatatggcagggcacactacccggcgataaatcaaagtactgctgtaaaaaggcctgatgcatatcatccagatggtcaaatgcaactgctggtgctttcaataatgcagagcgtgtcactccattagggaaaaagcgatcggcaaatttaggagaagcgacgaagagataatcgagagcgcctaatttatccaccagacagcttggcagtggttgtgactgaatactgatggctccgacaacttccccgcgtctcaggctttcctgtgtccgggtttcatcttccacctgaatattgagcctgatgggtaaatctgaaagtaccggatggagtgccggtaaaagccaggtagccagactatctgcattgaccgcaagagaaagtagcaggggagtttcattgccattctcatcaccgagccattgtgcttcgagtaattccacctgatgtaataacgccagcaatttctgtccctgctctgtaggacggggcggaacagtacgcactaagagtggttgaccaaataagttttctaattgcttgatgcgctgggatacggcggattgagtaatacaaagcttttgggctgcacgttcgaagccgcgttcgcggatcacggcgtctaacgcctgtaaggatcggtaatcaggacgtttcattgaaaatcaggctctccatttgtcattaactcttcgattattctggaatggtatttattctagaatgatattgtgtgcccaaaatatttttcggtctaggtagcactatgccatattttttcacagggtaagataaaatattgtttatactggcggctggatttttcttgtaattgattataggcagtgattgatatgacacaggatgaactgaaaaaagcggtaggctgggcagcgctggaatatgttaaaccgggaacagttgtgggagttggcaccggttcaacggcatctcattttattgatgcgctggggacaatgaaagatcaaatcgaaggtgcggtatccagctcagaagcatcaactgagaaattgaaaagtcttggcatccctgtgtttgactgtaatgaagttgactctttagacatttatgttgacggagctgacgaaattaatgctcaaatgcagatgattaaaggtggtggtgcggcactgaccagagagaagatcattgctgcggtagcaaagaaattcatttgtattattgatgaatccaaacaggttgacgtgttgggtaaattcccgttacctgtggaagttatcccgatggctcgatcttacgttgcccgtgagctgctaaaactcggaggaactccggtttatcgtcagaatgttatcactgataatggtaacgttattttagatgttcataatcttgccattctgaatcctatcgagttagaaaataaaattaatgcgattgcaggagtagtaacggtaggcctgtttgctaatcgtggcgcgaatgtcgtgctggttggcagttctaacggagtgaaaacgattacagagtaaccgcttgcgaagggcagaatattctgcccttaaaaaattttctgacttattcaaaaaataaaattcagatatatatattgtattattgattaaatcttcctcaaaatcctgattttaccttgtaacgaaaccctttactttgcgtaacaacttttttactgtttcttatgctgttttacaggcaaacgattatattgctgttaacgttttttttgttattttagtgaaatctatcggcattatgaaagttagtacaactagggcgggtaaatggttaaggtatctttagaaaaggaaaaaattaagtttctgctgctggaaggtgttcatcaaagcacagtcgacaatctgcgggcagcagggtacagcaatattgaatatcataaaggggcattagagccggaagagctgaaagaagctatccgtgatgctaaatttgttgggatccgttcccgtactcagttaactgaagaaatttttgcggcggctgaaaagctggtggcagtcggatgtttctgcatcggtactaatcaggttgatctgaacgcagcagcaaaacgcggtattcccgtattcaacgccccattctctaatacgcgctcagtggctgaaatggtattagggcagctattgctactgttgcgccgggttcctgaagctaatgcaaaggctcataaaggtatatggaataaacaggctgcgggctgctacgaagcacgtggtaaaaaactgggcattattggctacggtcatatcggctcacagctaagtgttttggctgaaagtatcggccttaatgtttatttctatgatttggaacacaaactaccactgggcaatgctcagcaggttcatcacttatctgaattgctaaatatgagtgatgttatcagtctgcatgtccctgaaactcattcaaccaaaaacatgattggggcggcagaattagaactgatgaaaccgggctcgattttgatcaatgcatcacgtggtactgtgatcgatattcctgcactgactgaagcgctggaaatcgggcacctttctggtgctgcgattgatgtcttccctgaagagccggcaacaaacagcgaaccttttgtctcaccgctaatcaaatttgacaacgtattgctgacgcctcatatcggtggttctacgcaagaagcacaacagaacatcggttatgaagttgcaggtaaactggttaaatattctgataatggttctacattatccgcagtaaacttcccggaagtttcattgcctctgcatgcgaaggataccaatcggttattgcatatccacgaaaatcgtccgggcatcttaaccagcattaaccaggttttcaccgatcaggaaatcaatattgaggcacaatatctgcgcactgaaggcgatatgggttatgttgttatcgatattatgacgaaaaatccggctcaggcggaattagtcctgcaacagctaaaagctttgcctggtactattcgttctcgtatgctttactaacttaaatgatataagggctattattatagcccttacgcattgaaatttaagaataaataattttcagcggttatacccagcgccatgttttttctggagtgattatttcaggtaaaggaatatcccaacttgcgctgggtaatgagtcaaccagttgaaaattatgtgctaacccaattggataaaagttttgctgttgccatttggcaagcgtcctgtcgtagaaccctccgcccatccctaagcgctgcccgctacgatcaaaagcaacgagcggaataaacataatatccagctcagaaacaggtaaaacctgccggatatccagtggtggttcttctatcctgaattgatttcggatgagaggagtgtcaggctgataacgaagaaacagcaaatgattccgactgaaagggtgtaataccggcaaatagacctgtttattttgctgccagagttgctgaatcaacgggcgtgtatctagttcaccatcaaaagaaagatacaaggcaattttttttgcttgcaggattttagggtgttccataacccgctcaacggcctgtagggcgaatcgcaattgttgttcaggggagaggtttttacgtagttgacgaatgtcttgtctgatgcttttccgaagagagaaaaaggaatctgattgcatagtacctgcctattaaagtagtgcagaaaaggatacaaaacagatagatagggttctccaagatgccgctgcaggtggtaacccttgaacccttggttcaaggtgaacatggtgtcgcccctattaggcttcttggactagccaagcatgctcacaagaaacggagcaccacattctatcagatatgaaatatcggctcaggggacatccccgctcacgaacacctcagagaaattttttattactttaaactaattagccaggaatctacaatcagaacctacccatttagtcttaagtaatatcatgtagcctattgtatggaactaaatggagaaagcaactgcttatgttcatctatcgtgactactgcctgatttctaaacaaggataagtctactgacgatataaagctggttaatttcggacttttgtaactttgccctaacttttgttaccttgctctaacagtgcctgctcaatcgtctgctgaagcattttaattttttgttccatattataggcgtaatcacgggttttcattttttcctgtgccaactcgtgacagatattcagcgccacaataaaaaccagttgctcagtgttagtcactctggtgcgttctttgaggttatgcaaacgctgatcaagttcatccgcagcagcctgcaatgcttctatctgctctggtggacaattgacacgtaatgaccgcccaaaaactttagagca

SEQ ID NO: 1942 - DNA, 13505 bp, Xenorhabdus sp.; identical to SEQ ID NO: 397
  CDS (1)..(288)

SEQ ID NO: 1943 - DNA, 13505 bp, Xenorhabdus sp.; identical to SEQ ID NO: 397
  CDS (781)..(1329)

SEQ ID NO: 1944 - DNA, 13505 bp, Xenorhabdus sp.; identical to SEQ ID NO: 397
  CDS (3767)..(4672)

SEQ ID NO: 1945 - DNA, 13505 bp, Xenorhabdus sp.; identical to SEQ ID NO: 397
  CDS (7067)..(7756)

SEQ ID NO: 1946 - DNA, 13505 bp, Xenorhabdus sp.; identical to SEQ ID NO: 397
  CDS (7967)..(8467)

SEQ ID NO: 1947 - DNA, 13505 bp, Xenorhabdus sp.; identical to SEQ ID NO: 397
  CDS (10904)..(11731)

SEQ ID NO: 1948 - DNA, 13505 bp, Xenorhabdus sp.; identical to SEQ ID NO: 397
  CDS (11903)..(12823)

SEQ ID NO: 1949 - DNA, 13505 bp, Xenorhabdus sp.; identical to SEQ ID NO: 397
  CDS (12820)..(13461)

SEQ ID NO: 1950 - DNA, 13505 bp, Xenorhabdus sp.; identical to SEQ ID NO: 1941
  CDS (10865)..(12106)

SEQ ID NO: 1951 - DNA, 13505 bp, Xenorhabdus sp.; identical to SEQ ID NO: 1941
  CDS (9935)..(10594)

SEQ ID NO: 1952 - DNA, 13505 bp, Xenorhabdus sp.; identical to SEQ ID NO: 1941
  CDS (8109)..(8837)

SEQ ID NO: 1953 - DNA, 13505 bp, Xenorhabdus sp.; identical to SEQ ID NO: 1941
  CDS (4056)..(4928)

SEQ ID NO: 1954 - DNA, 13505 bp, Xenorhabdus sp.; identical to SEQ ID NO: 1941
  CDS (3580)..(3957)

SEQ ID NO: 1955 - DNA, 10836 bp, Xenorhabdus sp.
  CDS (491)..(3322)
tacccactaaaataactttgtttacgcctctgctggccattcggaatactcctgatgaaatgattttttgctaaaaacggacttctgtaattataagcaacgtagtttatcatgcgaggcttaactttaaataaaaacccgttatcttaattctttgcgaagcgcatcgtactttattccctccatctttcaagcaacttcttgaattagattggttgcgctcacttccctcagtcacattcgatgcctatgttcatcccttttctatcgcttatcagactgaaattaaaagggcatatacccttgagaatttttttaaaccattacttggtccttcaaaacggtctatatagcaatcgaaattgcttgatatacactgtaatggttacgcataaatcctgttaaatactgtatatccattcagcagggtttgtgcaataataccgcgtttatttgttgagcacgatcaatataatctgggtaatggtaaatggataacatcgaagttcggggcgcccgcacccataatctcaagaatatcaatctggtaatcccccgtgacaagctgatagtcatcacagggttgtctggctccggtaagtcttctctggctttcgatacactgtatgcggaaggtcagcgtcgctatgtagagtctctctctgcatatgcccgccagtttttatcactgatggaaaaaccggatgtcgaccacattgaaggcctgtctcctgccatttccattgaacagaaatcaacttcccataacccgcgttcaactgtcggtacaattaccgaaattcacgattatctccgtctgctgtttgcccgcgtcggtgagcctcgctgtcctgaacatgatattccgctggctgcacaaacaatcagccagatggtcgataatgtcctgatgctgccggaagggcaacgcctgatgttacttgcccccgtggttaaagagcgtaaaggggaacattccaagctgttggataatcttgcagcacaaggttatatccgtgcccgtattgatggtgaagtgtgtgacctttccgatcctcccaaactggaattacagaaaaaacacacgattgaagttgtcatcgaccgttttaaagtgcgccctgatttagttcagcgtctggctgaatcgttcgagacagcattagagctttctggcggtacggcggttgttgccaatatggatgatgagaaggctgaagaacttatcttctccgccaatttcgcttgcccaatgtgtggctacagcatgagcgaactggaaccacgtctgttttctttcaacaaccctgccggagcctgttcgacttgtgatggtttaggtgtccagcaattcttcgatcctgatcgtgttgtacaaaatggcggtatttccctcgccggtggagcaatccgtggatgggaccgtcgtaatttttattactttcaaatgctgaaatcgctggcagatcattacaaatttgatatagaaacaccgtttgatgaattaagtgcttccattaaaaaggccgttttatatggctcaggaaaagaaaccatcgagttcagatataccaatgaccgtggcgatatcactgtccgcaagcacccgtttgaaggtgttctgcataatatggagcgccgctataaagaaaccgaatcttctgctgtacgggaagagttagccaaatatatcagtaatcgctcctgtatttcatgtgaaggcacccggctacgcaaagaagcgcgttttgtctttattgaaaatacaaccctgccacagatctctgatttcagcatcggccatgcgatggagtttttccagaacatcaagttaagtggccagcgtgcaaagattgccgagaaagtgctgaaagagatcggtgatcgcctgaaatttctggtcaatgttggcctgaattatctgactctttcccgctcagctgaaactctttccggtggtgaagctcagcgtatccgtctggcaagtcagattggtgccggtctggttggtgtgatgtatgtgctggatgagccttcgattggcctccaccagcgtgataatgagcgcttactggagacgttgctgcatctgcgtaatctgggtaatagcgttattgtcgttgagcatgatgaagatgccatccgtgccgccgatcatatcattgatatcgggccgggagcgggtgtacatggcggtgaggttgttgctgaaggttctatcgataacattatggcaagtaaggaatctctcacaggaaaattcctgagtggtgagcgtaagattgccatcccggaacagcgtatcgcagctgaccctgacaaaatgctaaaattgattggcgcaaaaggcaataatctgaaaaaagtgacattaaacctgcccgttggcttgtttacatgtgtcactggggtttcaggctccggtaaatcgacattaatcaacgatacgttattcccaattgcacaacgccagttaaacggtgctaccaacatcaatccagcaccttatgtggatattcaggggctggaacatttcgacaaagtcattgatattgaccaaagccctatcggcagaacaccccgctcaaacccggccacttataccggggtattcactccagtaagagaattgtttgccggtgtgcctgaatcccgtactcgtggctatactccggggcgttttagtttcaatatcaaaggtgggcgctgtgaggcctgtcagggtgacggggtcattaaggttgaaatgcatttcctgcctgatatttatgttccctgtgatcattgtaaagggaagcgctataaccgtgaaacactggaaattaaatacaagggcaagaatattaatgaagtgctgaatatgactatcgaagaagcacgtgagtttttcgatgcagtcccagcccttgcccgtaaattacaaacactgatagatgtcggtctctcctatatccggcttgggcaatccgctactaccctttcaggtggtgaagcccagcgggttaaattagcacgcgaattatccaaacggggtacaggccagacactctatattcttgatgaaccaacaaccggattacactttgccgatattcaacagttactggctgtcctgcatcaactacgggatcagggaaataccattgttgttatcgagcataatctggatgtgattaaaacttcggactggattgtcgaccttggcccggaaggcggcagcggtggtggtgaaatattagtagcaggaactccagaagaagttgctaagtgtaaaaactctcatactgcacgtttcctgaaaggaatacttaataataattaatattatattcaaaatgacaaccaataaaaaacctctcctctgtgggaggttttttttaagttaatattttctaatacctcagataccttgatctatgtatttagaataataataaacttaattatatcagtgaactattcttacattgacttcatcattgcatttaacagatatgagtaatcatattagatgtgcaattattccataatgatataacatattctatgaacttataatggagattaaatatgtatatgtttttaccatttttgattgcgctagttattattatcactgtcgtggctggcaagaaaaaactcacttatgcactttggtttgccttattaatcatcacggtattttggtttaaatatcatgctactgatgcactgaatctttctttttaaccggaggccgtaatgagtaattctatgtcagcatctcgcaacctcaatccagctattaccttgaatattcttggtttgtttggcatcagtgtcattttaattgtcgctttttattatcagctggcacgttttgaacttccttgcccattatgtctgttacaacgtgcaggcatcattatgatcggctttggctttctatttaatatttatttcggtgtcaaaaacgctcactacagcttctctctaataggctgtatcgtaaccggctttgttgccatgcgtcaggtttctttgcatatcctaccgggagatacaggatatggttccactttccttgggttgcacttctatacttgggcagcggttatgtccattcttactattatcgctattgctgtcattatgcctttgaaagcaggtaaccatgatccggtaaaatcttcaccgcatatactcggcaaacttgctatgggattatttgctcttttaatcgccgcgaatctggtttctaccattctggaatgcggtagcgggcaatgtgatgataacccgacattttatcagttattacagaaataactgtttgttatcgttatagaaaaaagaaggctgatacacttagccttctcctattctaccaaagggaactcagcaacaacttatcccgatattgataatccattgataaaataacaaacttcatgtgcttcttcaggagtaggtacttccagcttggaaagcattctgtccatcactttatccggaacgacatattggcgatggttattttgctgccgccactgtttatacccctgttcgatataaacaatcttaactctcgcgttgtaactgacaaataacttgataagttgctgacgtatttgcactgttagattagtcgcattccagataaagtcctgctggttacgcaatttttctctggcctgttttttcgcctgttgcacaacccaaccagtagcatttttatcttccggacttatttgatgctgacggcgaatattatccagactaatgacagctctgtctggataatattggcggataaaatgatcctttcccatgcccggcaatccacataatagaatgacctgactgccataattatcgtaaggctggtaatccggctgttcactctctgtagaaaaataatgaaaacgggcttctgacgaaggtaattgccgtgcattacgccaacaattctgctcacgacaataaagttcaaacagatctatgcgttccagcagctccttcgcatcatggcattctcgacctaaaacatccgcttttgccaacaaagctaatagataagtatcaatacgcagtgacgctgccagtagggctttctgtggctcaggtttttccatcagccataatggcaagccatgaaaacgaaccaaagcagccacttgttcacgtatcgcaaatggtgtcgctacttgctggaacaaaatctgcctgacagttaattcacctttacgggcatggccgggggaaataattcgcccatcccaatccatccgcgtagtacttcgcttttccacatcatgcagtaaagctgacacccagagaatttcctgctcttctttctccagtgcctgatattcaggcagttgcaccagtgcagacaataccatttgtgtatgagtggcaacatcaccttcggcatgatgaataggatcctgctgaacgccactcatatccgcgataaaagagaatgtgtcagataaataatgccatgttttattttcactgaataaccagttcattatctctctccattcatatattcaaagtagagaggtgcccgttgccagtgtcgcttccagtgaatatcggttttcacatgatttttacgtacatatttaaagacattgtgtgaaaaatcagtaactgaatattcacctgcattacggctgacgatcccttccattgagcaaggctgttttgtttttgtatcccatgaagagaaataactttcttgttttgctgtttgaataatattgtcaataaatgcaggttcattccgtgtttcaggaataactatttccggaatagtgggaaaatcaaataaatcagcgtaaaactttacttcttcccaactcagccacatatctttcatacgcacagcaaaaacaaagaaatattcttcaagatgccgatactcaatagaatgaatcgcatacagattctcgccaaaaatctcgatattaccgagatcgcccttcattaattgccaacgctgacggatttgttgtgtccatgcagattgcgttggcgcagcatgagaacgagcaaagacaccgtgctgattcagacagttattttcaccatctaacttttcggtgtgaataagatgagtaatgttgtgtatatcctgccaccagtcatgattaatacgatcatcactggttgtacccggagaaaacggataatgaaacgttctaccgtactttcttgattgcatatccataatgctttagctcttttaaattatcccaataaaagcgaattacgcttttacagattaatatttatctcaatctttactgaaagagttcaagagttagcattacattttctttattcccggcagatgaatatcttaaattaaaagaccagatataatattcagatatatttaatagaagtgaataaaaaacatcagaatgcccgctactatatagaaagtgattataaattaatacaataattaatttataatcataaaataacagataaaaatctattattatcattttaattagtgatatctattacatcagaaaaaatcccttattcaataccagaacaagggactatcgggtatagtgaatgcctaacgactcacagccacaaatgcttcaacaacacgttgtacattatgatgattcacacctgccatacaaacccggccggattcaatcagataaacagcaaattcttcacgcagacgaacaacctgttcagtgctaaatccggtataactgaacatgccacgctgtttaagcaaatgatcaaagtttttctccggtaatgcttctttcaatgcagataccagcacagtgcgcatttcccgaatacgcaaacgcatctgttcaacttctctcagccactgttccctcagtaatggatcagctaatactctcgccacaacctgaccgccaaaattaggcggactggaataaatacgacgtacgcaggcttttagctgccccaagacacattctttcgtttctttatcgtcgcaaataaccgataagccaccaacgcgctcgccatataaggaaaatatttttgagaatgaattactgacaaagcaaggtagttcagcactcgccatcgccctaattgcataaacatcttcttcaatgccttcagcaaacccctgataagcgatatcaagaaatggaattaacttttgctctttaactacctgaatgacctgatcccattggtcattagtcagatcagaacccgttggattatggcaacaagggtgcatcaggataatactttttgctggtaattgccggaacgttgccagcatttcatcaaattttacccctttggttttatcatcaaagtaagggtaataatttacttttatccctgccccagagaatattgaagcatggttttcccatgtaggatcactgcaccacacttcagaatcagggaaataacgatgtaaaaagtcagcaccgactttcagtgctcctgatccgccgactgtctggatagttgcaatgcgattttgctgcaacattaaatgatctttaccgaataataattcctgaactacctgccggtaagccattaaaccttccattggaagataaagagaagcagactgtggcagagtacttatttgttcttctgcggttgcaacagcctgcaattggggagttataccctgctcatcgtaataaagcccaatgctcaagttaaccttttctggacggggatcttttttaaactcttccgacaacgaaagaataggatcacctgcgtaagcatcaacattctggaacactatgttatacctctattacctaaatgatattaaagacacggtaacagacaatataactgaacccgattattcgtccagatattccatcgcaacacgtgaagttaattttgtgatgagttcataggcactaatccctgtatattcagctactttttccactggcaggactttaccccagaggataacatcatcacccactttatcctgacaatccggtcctaaatctaccgtgatcatatccatggatacccgcccaacaagggagactttacgtccattaataaataccggtgtgcccgataatgcactacggggataaccatcaccatatccgatagctacaacacctaaataggtatcacgttcactgacccaagtaccgccgtaacctaccgcttcacctgctttgtgtttacgtacagcgattaaactggatttcaatgtcattgcgggcattaagctgaaatcatccgcggtcttatccgccatcggtgatgcaccatacatcataataccgggacgaacccagtccagatgggcctgtggccacaacagaattccgcctgatgctgaaatggatttttcacccgccttatctgcaacaaataacttaaattgctcaatttgctgataagtagtatccaccagaggttcatctgcctgactaaagtggctaataatattcacaggctgttcaatattacggcaacggctcaaacgttggtaaaaatcttctgcttcatcaatacgaacgccaagacggtgcatacccgtatccaatttcatccatactttaattgggtgaggtaaatcagcttgttctagtgcttccagctgttcaatactgtgcactacggtttcaatatgattgacaaccaaaataggtaagtcagatgcccccaaaaaaccttccagtagtagaatgggtttgataaccccaccactgcgcaaagccagagcttcccctattcgtgcaacaccaaaacaatctgcgctttccatcgtatacgcagtttccaataaaccatgtccataggcgtttgctttcacaactgcaataattttactgcccggagctttcacccgaacctgttgcaggttgtgtcgcagagcgcggcggtcgataacagcagttgccgctttcattttttccccttttttatactttcttccaatcaattggtttggataaatagacttatttttgaactgggttattcatcgctatagcttggcccagcatagttatcaaatcgcgaccattgaccgttgaatgtcagtcttaccgtaccaattgggccgttacgctgcttaccaaggataatttccgctacaccttttagttcactgttatcgtgatatacctcatcacgatagataaacatgattaagtcagcatcttgctcgatagagcctgattcacgcaggtcagagttcaccggacgcttatcagcacgctgctccagactacggttaagctgagaaagggccacaaccggcacctgtaattctttcgccaatgctttgagggaacgggatatttctgcaatttccaatgttcggttatcggagagggacggcactcgcattaactgcaggtaatcgatcatgatcatgctaagcccgccatgttcgcggaaaactcttcttgcgcgggagcgcacttcagtaggagtcagaccggatgaatcatcaatatacatattgcgtttttccagcaaaatccccatggtgctggaaattcgggcccagtcctcatcatcaagctgacccgttcgaatacgcgtctgatctacacgggaaagcgacgctagcatacgcatcatgatctgattaccgggcatctccagactgaaaatcagaaccggtttatcctgcatcatcgctgcgttttcacacaagttcatcgcaaaggttgttttacccatcgaaggacgtgcagcaacgatgatcaagtctgatttttgcagacccgccgttttcttatccagatcctgatagcccgtggaaactcctgttacaccatcatgtggacgctgataaagctgctcaatgcgttcaacggtttcttcaaggatttgttcaatgcctttcgggccttcatctttacttgcccgggtttctgctatctggaatacacgagattcagccaaatccagcaattcctcactggttcggccttgtgggtcatatcctgcatcggcgatttcattagcaactgcaatcatatcgcgaacaacagcacgttcacggacaatatctgcataagcattgatatttgcggcacttggcgtattttttgacaattctgccagatagccaaaaccaccgacattatccagctccccattcaactccagagattctgataatgtaatcaagtcaataggtttgcctgtttcaagcaaacgctgcatttcagaaaaaatgcgccgatgtgggcggctgaaaaaatcattgctggtaacacgctcggatacgttatcccaacgttcattatccagcatcaaaccgcccaacacggattgctctgcttccaaagagtgtggtggaagcttcagcccttccacttggcgatcttttggttcagccatactgttgttagttggttttcttccagccatgtagtacatcaatccactaaacaagaacgaaatagcgcatcagtatacgccatgaaaacaaccttgagtaattatatatagtctatactcgtaatttaaacacaactgattgatattgaataaataaacctcattttttaacacgcttgttcttgtttgtttatataattgtttatacatagaacactgaacaaatctataaacaaagcataagataaaaacaaggcaaaagaaaagaaagaatgagagtgaatgcatgatcagtaaaacgtggtcagtacgtttaacgttccaagctatgagggttatgtgtattcagttgaaaactattaaagtgataattgcaaatgttactgatagagagaagataccccgttacggctatcttcccgatgacttttaaatggaactgattatctttagagcgca

SEQ ID NO: 1956 - DNA, 10836 bp, Xenorhabdus sp.; identical to SEQ ID NO: 1955
  CDS (4006)..(4308)

SEQ ID NO: 1957 - DNA, 10836 bp, Xenorhabdus sp.
  CDS (5390)..(6448)
tgcgctctaaagataatcagttccatttaaaagtcatcgggaagatagccgtaacggggtatcttctctctatcagtaacatttgcaattatcactttaatagttttcaactgaatacacataaccctcatagcttggaacgttaaacgtactgaccacgttttactgatcatgcattcactctcattctttcttttcttttgccttgtttttatcttatgctttgtttatagatttgttcagtgttctatgtataaacaattatataaacaaacaagaacaagcgtgttaaaaaatgaggtttatttattcaatatcaatcagttgtgtttaaattacgagtatagactatatataattactcaaggttgttttcatggcgtatactgatgcgctatttcgttcttgtttagtggattgatgtactacatggctggaagaaaaccaactaacaacagtatggctgaaccaaaagatcgccaagtggaagggctgaagcttccaccacactctttggaagcagagcaatccgtgttgggcggtttgatgctggataatgaacgttgggataacgtatccgagcgtgttaccagcaatgattttttcagccgcccacatcggcgcattttttctgaaatgcagcgtttgcttgaaacaggcaaacctattgacttgattacattatcagaatctctggagttgaatggggagctggataatgtcggtggttttggctatctggcagaattgtcaaaaaatacgccaagtgccgcaaatatcaatgcttatgcagatattgtccgtgaacgtgctgttgttcgcgatatgattgcagttgctaatgaaatcgccgatgcaggatatgacccacaaggccgaaccagtgaggaattgctggatttggctgaatctcgtgtattccagatagcagaaacccgggcaagtaaagatgaaggcccgaaaggcattgaacaaatccttgaagaaaccgttgaacgcattgagcagctttatcagcgtccacatgatggtgtaacaggagtttccacgggctatcaggatctggataagaaaacggcgggtctgcaaaaatcagacttgatcatcgttgctgcacgtccttcgatgggtaaaacaacctttgcgatgaacttgtgtgaaaacgcagcgatgatgcaggataaaccggttctgattttcagtctggagatgcccggtaatcagatcatgatgcgtatgctagcgtcgctttcccgtgtagatcagacgcgtattcgaacgggtcagcttgatgatgaggactgggcccgaatttccagcaccatggggattttgctggaaaaacgcaatatgtatattgatgattcatccggtctgactcctactgaagtgcgctcccgcgcaagaagagttttccgcgaacatggcgggcttagcatgatcatgatcgattacctgcagttaatgcgagtgccgtccctctccgataaccgaacattggaaattgcagaaatatcccgttccctcaaagcattggcgaaagaattacaggtgccggttgtggccctttctcagcttaaccgtagtctggagcagcgtgctgataagcgtccggtgaactctgacctgcgtgaatcaggctctatcgagcaagatgctgacttaatcatgtttatctatcgtgatgaggtatatcacgataacagtgaactaaaaggtgtagcggaaattatccttggtaagcagcgtaacggcccaattggtacggtaagactgacattcaacggtcaatggtcgcgatttgataactatgctgggccaagctatagcgatgaataacccagttcaaaaataagtctatttatccaaaccaattgattggaagaaagtataaaaaaggggaaaaaatgaaagcggcaactgctgttatcgaccgccgcgctctgcgacacaacctgcaacaggttcgggtgaaagctccgggcagtaaaattattgcagttgtgaaagcaaacgcctatggacatggtttattggaaactgcgtatacgatggaaagcgcagattgttttggtgttgcacgaataggggaagctctggctttgcgcagtggtggggttatcaaacccattctactactggaaggttttttgggggcatctgacttacctattttggttgtcaatcatattgaaaccgtagtgcacagtattgaacagctggaagcactagaacaagctgatttacctcacccaattaaagtatggatgaaattggatacgggtatgcaccgtcttggcgttcgtattgatgaagcagaagatttttaccaacgtttgagccgttgccgtaatattgaacagcctgtgaatattattagccactttagtcaggcagatgaacctctggtggatactacttatcagcaaattgagcaatttaagttatttgttgcagataaggcgggtgaaaaatccatttcagcatcaggcggaattctgttgtggccacaggcccatctggactgggttcgtcccggtattatgatgtatggtgcatcaccgatggcggataagaccgcggatgatttcagcttaatgcccgcaatgacattgaaatccagtttaatcgctgtacgtaaacacaaagcaggtgaagcggtaggttacggcggtacttgggtcagtgaacgtgatacctatttaggtgttgtagctatcggatatggtgatggttatccccgtagtgcattatcgggcacaccggtatttattaatggacgtaaagtctcccttgttgggcgggtatccatggatatgatcacggtagatttaggaccggattgtcaggataaagtgggtgatgatgttatcctctggggtaaagtcctgccagtggaaaaagtagctgaatatacagggattagtgcctatgaactcatcacaaaattaacttcacgtgttgcgatggaatatctggacgaataatcgggttcagttatattgtctgttaccgtgtctttaatatcatttaggtaatagaggtataacatagtgttccagaatgttgatgcttacgcaggtgatcctattctttcgttgtcggaagagtttaaaaaagatccccgtccagaaaaggttaacttgagcattgggctttattacgatgagcagggtataactccccaattgcaggctgttgcaaccgcagaagaacaaataagtactctgccacagtctgcttctctttatcttccaatggaaggtttaatggcttaccggcaggtagttcaggaattattattcggtaaagatcatttaatgttgcagcaaaatcgcattgcaactatccagacagtcggcggatcaggagcactgaaagtcggtgctgactttttacatcgttatttccctgattctgaagtgtggtgcagtgatcctacatgggaaaaccatgcttcaatattctctggggcagggataaaagtaaattattacccttactttgatgataaaaccaaaggggtaaaatttgatgaaatgctggcaacgttccggcaattaccagcaaaaagtattatcctgatgcacccttgttgccataatccaacgggttctgatctgactaatgaccaatgggatcaggtcattcaggtagttaaagagcaaaagttaattccatttcttgatatcgcttatcaggggtttgctgaaggcattgaagaagatgtttatgcaattagggcgatggcgagtgctgaactaccttgctttgtcagtaattcattctcaaaaatattttccttatatggcgagcgcgttggtggcttatcggttatttgcgacgataaagaaacgaaagaatgtgtcttggggcagctaaaagcctgcgtacgtcgtatttattccagtccgcctaattttggcggtcaggttgtggcgagagtattagctgatccattactgagggaacagtggctgagagaagttgaacagatgcgtttgcgtattcgggaaatgcgcactgtgctggtatctgcattgaaagaagcattaccggagaaaaactttgatcatttgcttaaacagcgtggcatgttcagttataccggatttagcactgaacaggttgttcgtctgcgtgaagaatttgctgtttatctgattgaatccggccgggtttgtatggcaggtgtgaatcatcataatgtacaacgtgttgttgaagcatttgtggctgtgagtcgttaggcattcactatacccgatagtcccttgttctggtattgaataagggattttttctgatgtaatagatatcactaattaaaatgataataatagatttttatctgttattttatgattataaattaattattgtattaatttataatcactttctatatagtagcgggcattctgatgttttttattcacttctattaaatatatctgaatattatatctggtcttttaatttaagatattcatctgccgggaataaagaaaatgtaatgctaactcttgaactctttcagtaaagattgagataaatattaatctgtaaaagcgtaattcgcttttattgggataatttaaaagagctaaagcattatggatatgcaatcaagaaagtacggtagaacgtttcattatccgttttctccgggtacaaccagtgatgatcgtattaatcatgactggtggcaggatatacacaacattactcatcttattcacaccgaaaagttagatggtgaaaataactgtctgaatcagcacggtgtctttgctcgttctcatgctgcgccaacgcaatctgcatggacacaacaaatccgtcagcgttggcaattaatgaagggcgatctcggtaatatcgagatttttggcgagaatctgtatgcgattcattctattgagtatcggcatcttgaagaatatttctttgtttttgctgtgcgtatgaaagatatgtggctgagttgggaagaagtaaagttttacgctgatttatttgattttcccactattccggaaatagttattcctgaaacacggaatgaacctgcatttattgacaatattattcaaacagcaaaacaagaaagttatttctcttcatgggatacaaaaacaaaacagccttgctcaatggaagggatcgtcagccgtaatgcaggtgaatattcagttactgatttttcacacaatgtctttaaatatgtacgtaaaaatcatgtgaaaaccgatattcactggaagcgacactggcaacgggcacctctctactttgaatatatgaatggagagagataatgaactggttattcagtgaaaataaaacatggcattatttatctgacacattctcttttatcgcggatatgagtggcgttcagcaggatcctattcatcatgccgaaggtgatgttgccactcatacacaaatggtattgtctgcactggtgcaactgcctgaatatcaggcactggagaaagaagagcaggaaattctctgggtgtcagctttactgcatgatgtggaaaagcgaagtactacgcggatggattgggatgggcgaattatttcccccggccatgcccgtaaaggtgaattaactgtcaggcagattttgttccagcaagtagcgacaccatttgcgatacgtgaacaagtggctgctttggttcgttttcatggcttgccattatggctgatggaaaaacctgagccacagaaagccctactggcagcgtcactgcgtattgatacttatctattagctttgttggcaaaagcggatgttttaggtcgagaatgccatgatgcgaaggagctgctggaacgcatagatctgtttgaactttattgtcgtgagcagaattgttggcgtaatgcacggcaattaccttcgtcagaagcccgttttcattatttttctacagagagtgaacagccggattaccagccttacgataattatggcagtcaggtcattctattatgtggattgccgggcatgggaaaggatcattttatccgccaatattatccagacagagctgtcattagtctggataatattcgccgtcagcatcaaataagtccggaagataaaaatgctactggttgggttgtgcaacaggcgaaaaaacaggccagagaaaaattgcgtaaccagcaggactttatctggaatgcgactaatctaacagtgcaaatacgtcagcaacttatcaagttatttgtcagttacaacgcgagagttaagattgtttatatcgaacaggggtataaacagtggcggcagcaaaataaccatcgccaatatgtcgttccggataaagtgatggacagaatgctttccaagctggaagtacctactcctgaagaagcacatgaagtttgttattttatcaatggattatcaatatcgggataagttgttgctgagttccctttggtagaataggagaaggctaagtgtatcagccttcttttttctataacgataacaaacagttatttctgtaataactgataaaatgtcgggttatcatcacattgcccgctaccgcattccagaatggtagaaaccagattcgcggcgattaaaagagcaaataatcccatagcaagtttgccgagtatatgcggtgaagattttaccggatcatggttacctgctttcaaaggcataatgacagcaatagcgataatagtaagaatggacataaccgctgcccaagtatagaagtgcaacccaaggaaagtggaaccatatcctgtatctcccggtaggatatgcaaagaaacctgacgcatggcaacaaagccggttacgatacagcctattagagagaagctgtagtgagcgtttttgacaccgaaataaatattaaatagaaagccaaagccgatcataatgatgcctgcacgttgtaacagacataatgggcaaggaagttcaaaacgtgccagctgataataaaaagcgacaattaaaatgacactgatgccaaacaaaccaagaatattcaaggtaatagctggattgaggttgcgagatgctgacatagaattactcattacggcctccggttaaaaagaaagattcagtgcatcagtagcatgatatttaaaccaaaataccgtgatgattaataaggcaaaccaaagtgcataagtgagttttttcttgccagccacgacagtgataataataactagcgcaatcaaaaatggtaaaaacatatacatatttaatctccattataagttcatagaatatgttatatcattatggaataattgcacatctaatatgattactcatatctgttaaatgcaatgatgaagtcaatgtaagaatagttcactgatataattaagtttattattattctaaatacatagatcaaggtatctgaggtattagaaaatattaacttaaaaaaaacctcccacagaggagaggttttttattggttgtcattttgaatataatattaattattattaagtattcctttcaggaaacgtgcagtatgagagtttttacacttagcaacttcttctggagttcctgctactaatatttcaccaccaccgctgccgccttccgggccaaggtcgacaatccagtccgaagttttaatcacatccagattatgctcgataacaacaatggtatttccctgatcccgtagttgatgcaggacagccagtaactgttgaatatcggcaaagtgtaatccggttgttggttcatcaagaatatagagtgtctggcctgtaccccgtttggataattcgcgtgctaatttaacccgctgggcttcaccacctgaaagggtagtagcggattgcccaagccggatataggagagaccgacatctatcagtgtttgtaatttacgggcaagggctgggactgcatcgaaaaactcacgtgcttcttcgatagtcatattcagcacttcattaatattcttgcccttgtatttaatttccagtgtttcacggttatagcgcttccctttacaatgatcacagggaacataaatatcaggcaggaaatgcatttcaaccttaatgaccccgtcaccctgacaggcctcacagcgcccacctttgatattgaaactaaaacgccccggagtatagccacgagtacgggattcaggcacaccggcaaacaattctcttactggagtgaataccccggtataagtggccgggtttgagcggggtgttctgccgatagggctttggtcaatatcaatgactttgtcgaaatgttccagcccctgaatatccacataaggtgctggattgatgttggtagcaccgtttaactggcgttgtgcaattgggaataacgtatcgttgattaatgtcgatttaccggagcctgaaaccccagtgacacatgtaaacaagccaacgggcaggtttaatgtcacttttttcagattattgccttttgcgccaatcaattttagcattttgtcagggtcagctgcgatacgctgttccgggatggcaatcttacgctcaccactcaggaattttcctgtgagagattccttacttgccataatgttatcgatagaaccttcagcaacaacctcaccgccatgtacacccgctcccggcccgatatcaatgatatgatcggcggcacggatggcatcttcatcatgctcaacgacaataacgctattacccagattacgcagatgcagcaacgtctccagtaagcgctcattatcacgctggtggaggccaatcgaaggctcatccagcacatacatcacaccaaccagaccggcaccaatctgacttgccagacggatacgctgagcttcaccaccggaaagagtttcagctgagcgggaaagagtcagataattcaggccaacattgaccagaaatttcaggcgatcaccgatctctttcagcactttctcggcaatctttgcacgctggccacttaacttgatgttctggaaaaactccatcgcatggccgatgctgaaatcagagatctgtggcagggttgtattttcaataaagacaaaacgcgcttctttgcgtagccgggtgccttcacatgaaatacaggagcgattactgatatatttggctaactcttcccgtacagcagaagattcggtttctttatagcggcgctccatattatgcagaacaccttcaaacgggtgcttgcggacagtgatatcgccacggtcattggtatatctgaactcgatggtttcttttcctgagccatataaaacggcctttttaatggaagcacttaattcatcaaacggtgtttctatatcaaatttgtaatgatctgccagcgatttcagcatttgaaagtaataaaaattacgacggtcccatccacggattgctccaccggcgagggaaataccgccattttgtacaacacgatcaggatcgaagaattgctggacacctaaaccatcacaagtcgaacaggctccggcagggttgttgaaagaaaacagacgtggttccagttcgctcatgctgtagccacacattgggcaagcgaaattggcggagaagataagttcttcagccttctcatcatccatattggcaacaaccgccgtaccgccagaaagctctaatgctgtctcgaacgattcagccagacgctgaactaaatcagggcgcactttaaaacggtcgatgacaacttcaatcgtgtgttttttctgtaattccagtttgggaggatcggaaaggtcacacacttcaccatcaatacgggcacggatataaccttgtgctgcaagattatccaacagcttggaatgttcccctttacgctctttaaccacgggggcaagtaacatcaggcgttgcccttccggcagcatcaggacattatcgaccatctggctgattgtttgtgcagccagcggaatatcatgttcaggacagcgaggctcaccgacgcgggcaaacagcagacggagataatcgtgaatttcggtaattgtaccgacagttgaacgcgggttatgggaagttgatttctgttcaatggaaatggcaggagacaggccttcaatgtggtcgacatccggtttttccatcagtgataaaaactggcgggcatatgcagagagagactctacatagcgacgctgaccttccgcatacagtgtatcgaaagccagagaagacttaccggagccagacaaccctgtgatgactatcagcttgtcacgggggattaccagattgatattcttgagattatgggtgcgggcgccccgaacttcgatgttatccatttaccattacccagattatattgatcgtgctcaacaaataaacgcggtattattgcacaaaccctgctgaatggatatacagtatttaacaggatttatgcgtaaccattacagtgtatatcaagcaatttcgattgctatatagaccgttttgaaggaccaagtaatggtttaaaaaaattctcaagggtatatgcccttttaatttcagtctgataagcgatagaaaagggatgaacataggcatcgaatgtgactgagggaagtgagcgcaaccaatctaattcaagaagttgcttgaaagatggagggaataaagtacgatgcgcttcgcaaagaattaagataacgggtttttatttaaagttaagcctcgcatgataaactacgttgcttataattacagaagtccgtttttagcaaaaaatcatttcatcaggagtattccgaatggccagcagaggcgtaaacaaagttattttagtgggta

SEQ ID NO: 1958 - DNA, 10836 bp, Xenorhabdus sp.; identical to SEQ ID NO: 1957
  CDS (4962)..(5321)

SEQ ID NO: 1959 - DNA, 10836 bp, Xenorhabdus sp.; identical to SEQ ID NO: 1957
  CDS (3054)..(4250)

SEQ ID NO: 1960 - DNA, 10836 bp, Xenorhabdus sp.; identical to SEQ ID NO: 1957
  CDS (1908)..(2987)

SEQ ID NO: 1961 - DNA, 10836 bp, Xenorhabdus sp.; identical to SEQ ID NO: 1957
  CDS (430)..(1839)

SEQ ID NO: 1962 - DNA, 13535 bp, Xenorhabdus sp.; identical to SEQ ID NO: 206
  CDS (8081)..(8398)

SEQ ID NO: 1963 - DNA, 13535 bp, Xenorhabdus sp.; identical to SEQ ID NO: 206
  CDS (7464)..(7982)

SEQ ID NO: 1964 - DNA, 13535 bp, Xenorhabdus sp.; identical to SEQ ID NO: 206
  CDS (6277)..(7452)

SEQ ID NO: 1965 - DNA, 13535 bp, Xenorhabdus sp.; identical to SEQ ID NO: 206
  CDS (5539)..(5820)

SEQ ID NO: 1966 - DNA, 624 bp, Xenorhabdus sp.
  CDS (391)..(624)
tctaaaggttcttttagtgtgtggcattggctcatcgtgctggtgattgttctcgtccttttcggacgcggcaagatcccggaactgatgggcgatgtcgcgaagggcatcaagagcttcaagaagggcatggctgacgaagaccagacgccgccgccggccgatgccaacacgaagaccgtcgaccacaaggctgacgagatcaagtaagcggcctttgccgcttggtgtgagactgactggcgttagggtctcgggagcatattgatgtttgatatcggctggagcgagcttctggtgattgcggtcgtgctgatcgtggtcgtcggaccaaaagacttgccgcccatgatccgcgccttcggcaagacgatggccggccttcgcaagatggcgggggacttccgcacccagttcgatgaggccttgaaagaggccgatatggacgatgtgcgccagacgatttccgatgtccgcaatctcaaccccaccaattcgctgcgcgatgcgatgaacccgcttcgccagcttggcaacgagatcaagtccgatctccagaaggcgaccactccgccggaaggcctttcgtccacaccggcaccggcggcaagcgagccggtcgcg

SEQ ID NO: 1967 - DNA, 12559 bp, Xenorhabdus sp.
  CDS (10780)..(10929)
taagttcttaacaatgcggtttgcagagcgacgctgttcagtgacaatatcagtgacattcccgccttcatccataataaaccggtaatcagggcgatctttaaataccagagcgtgctgttggcgccagttattacggcgttcacacatctctttcagcagtgtgatttgttcagtgacagcatctgaacccggtttccagccttccttgccttccagccaatcagaaatttcgtcataaaccagcttgaatttcgattcgacccaagcggcaaagaattgaatgtcatcacctaattgcccgtcttccagaatggaaacctgacaaaccagagcagggcggcgggcattcggacgaagagaacacaaatcatcagaaagttcgcggggcagcattggaatattgaagcccggcagatagttggtaaagctgcgttgataagcgattgtgtccagatcgctgccagtcttgatataggcagtcggatcggcaatagcaatggatagtttcaggctgccatcatcatttttgacaatatgcagtgcgtcatccatatcttcagttgttgcactatcgattgtgacgaaattaagggaggtcaggtcgatacgctcaagagaaccatcatccaactggcaatctgccattgatggggcttcacgttccagactgtggcgagtaagagtaacccaccacggagcgaagtgatcatcaccacgggtaatatagccggttatttcagcatggaaaccgcgatcacctttcagtggatgacggcgcatttcagcaactgcccagtcaccttgttcaaaattatgagttacctgactggacggtcggcatggaatagagtcttttaacaatggatggtcaggaataatccacagtcggttgtcgttttcttttctctgaacccgaccaacaaaacgggtcaggaaaggttcaatcagttcttctggttcagcgacttctttttctttatcggtatgaatagcagcactgactcgatcgccgtgcatcactttcttcatataaggaggaggaataaagtaacttttttgaccatcgacttccagaaagccgaagcccttttctgttcctttgactaaaccttctacacgcaaggtttgagaatgtagttgctgttttagctgagcaagcagcggattgttttgaaacataataatcaggagagttgtggagttattatcgataatttaggtaatagttttacgcgaatcgagggtatcgggcaagtaacatcttatcaaaacacgaaaaagtacctagtgagagtgatatttatacagctaacagatgatcatgcagtaacaataataatataagataaggtgctgaatattcactcagaggttagctctggatttaatatctgatgaatatagttgtttatttaaatattttattggatttaattaaatattgttaattaaacatttataaacgttatttgactagaatatgttgttgtgtaaattcatggctgataataaacgaacgtgttttttcttcttcatcagaaccgaagtcctttttatcattcctgatttaattatctttttgatttttatgtttgtttttctattttctctggttttaactaacttgtttttctttaggtatatatgctcgataaacttcaagttacaacgggcaatatgaggtgagtccttatatctccccgcggcgtggggggatataacacgcatcttgaagttgaataggtataagagggtaatggcgatatttacgctattaaaataaatatagtatttaaattgctgactattaaaaaagagacaggcatggataattttcaattttattatcagtgggaattggattacctacagcaaattgaaaaattagccagtaaagaaaaaccacatttagcagaaaattttaatggatgtgatcctgatattgagcggctgaatcagggtttttctgtgttaatggctcgtttacatcaaaaagtagatgatgcttttcctgaaattactttacctctgctacaacaattaaaagcattacctgttaaaggaattccagcaaccagtgttgttcagtttagtgtaatggaaggaattaaattcgccgatatattacggcgtggatcagaaatttcatcaaatacaggggcaacttttgttacaggcagagagtgtaatattgagcctctgatgctggtcgctcgtgagatgagttgtcaggaggaaaccagtagtattactctgactttccaatatacaggcggggatgattactggcccatcagccccattaatctgtttctcagccctgatgagacagtagccgatgctttgatgcttgctctatgccgcaacttacggggtgcgatactaaaccataacggattgaattattcggctgaacccttttggtttgaacctctgtcgggaatttcacgcctgattttaccagctcccgcgttaacagcagggaactgggcacctcagatgttaatagagtcactttacctgccacatgttcaccattttctgacgttatcgctacccacagccatgcgtaatcggttgtccatgaccgaaagccgacaattcagcatcatattaaagctcaatgaagcattgtttcttactgaagcccaactggccgatgcttttcatctccattgtgtacctgtcgtaaatctagaacgtgaattgaaaatcacccttccttttacgccggataccgctcgttacccattgcctttgccatcagagcaggggattttacgcatcactgagcttcagttaaaagatgagccaggtaaggagcggggaaaacgagttcaatttttacctataagccagttcacgcatttctttcgcggcgcagatgaaaaaacctggttttatgcgttggatgttacccgtgatgcgttcgaacgtctggaatatgcactggtgttttatgacagcaatgctcgcctgatggaacagccgccagagcaggaattcacctgtcgcttaacgacgtttaataccgctttgccgaggttggtggcaggggatatttgtttaacagaagaggatattcctgacgggttgcaggccagaaatctgacgccggcttcttgcgcctatcctcccgtgacagattgttcccgttactggggaatattgtcacaccatgctgccaacgggttctggctgaattcggtatctgctcttaaacaactgctgttggattatgatttttatgctgatttggatcgcaatacgcaccgcaatattcgacgaatgacggcaggtattgtggagatccagtctacgcccggtgactggcttatccggggtgtgcctcatcgttgtgtccacgttgaactaatactggatgaatcagcttatatcagtcagggagaactgttccggttttccaacgctctctaccagttcttaccattttgccttagcgaagatatgcgtatacgtatgacgattatctggcagagctctaatattcgatggctgctatcgccttgcccgctgcaaggatatcgtccaattatgtaaggagatgcaaatggatgggttagtttttacttgccagataggtgcgttatcggggacgacctttcaggttgtgaatttcagcttacaggaagggctgtcacagctttaccacttgtcactgacggtagtcagttcccttaataatattgttcttaatgaccaactgggaacttatgcttctttaacagtgactcgcgatggtaaagtggagcgtaaagttaacggtattgtggcaggtgctatacagggcaatactgacggaagacaaacctattatatttttactatccggccagaaatgtggcgtatgactcttcatcaggatagccgcctttttcagcgccagtcagtgccggatatcctcaaaaaattgttgaaagaacaccgcgtcaaatctgatagcaaattctatgaagacagtaatcttcaccctgtacgggaatacaccacacagaaacgtgaatctgcctatgatttttggtgccggttggcggctgaagaaggtattgcgttttggtttgaggaggagcaactctttttcagcgattcccatttaggtatgacagcagatctgagcctgacttataacaatcagcccaataccgataataaagatactacagcctggcagtggcaatatggagaatacctctgcccggatgaatatattcataaagattacaattggttgcgaccttctcagcccttgcagattcaggctgatttaccgcaaggcgggcgtcacccaatatttgaaagttccggtcgtttcccgtggagtaaagaaggtaaaccgctgggtgaaatacgcctgagccaacttaatagcgaaagtaaactgggttcggcccagacaaactgtgttcagttacgtcccggtaaaatttttactttggaatcccatccgattgcagccatgaataaccgctggcaaatcgttactgttaaccattacggttctcagccacaagcggcaggtattgcgggagaaggcacaaccctgaccaataacgtcacttttattccgggaaaaaacgactggcgaccaccataccgttataagccgctggcagatggtgatgaactggcaacggtagtagggccaccgggtgaggaaatttttgttaatgaacacggtgctattaaagtacattttcattggaaccgccacgatgaagcaggagatagttcctcctgttgggttcgtgtagtacagggctggaatggtaatggattcggttttatggcgatcccccgcatcggtcaggaagtgattatttcttaccttaatggtgatattgatcgccccatcgtgacaggctgtaactacaacggtcgcaatcgctccccacttaatttgcctgctgagaaaacccgcaccaccttcaaaacccacactcacaaaggagaagggtttaatgaactgcgttttgatgacgcgaaaggtagcgaagaggtgtttattcatgcccaaaaagatatgaacaccaaggtactaaataaccgcaccactcaggtacaaggtaatcacactgaggcagttgatggaaaacaagctgttgtcgtgaaaaagaatagacaggaaatggtacagcttcgtagtactgaaatggttggactcaccaaaatattgagagtaggggcaagctataggattaatgttggtgccagtatgaatacttcagtttctgttagtcagaaagaaacggtgggtatgcagaaaaggatttctgtggggcaaactttatctattagtgccggtaaggtgattgagctgaaatgcggtaagagcacattgagaatggacaaagatggcaaaattaccatcaaaggtaaagagttcaggttcgaagccagcggccctgtgcaaatcagtggcaaagacatcgatttgaactaaggagaccggacgatggaattcaaaaatctcacttctttttcggtgatgaactaccggatgctggatactgaagatcaggaatacgatgttattgccatgaaagtgggctatcagctattgcctgcgggtaaaggcgaatatctggctgaattgcttccggtaatgaccctgtgtatacaggatcaatatcggagaggattaaatgtctcgcaggtattgcaggaaagtgatctggctccttttaaacctaaatgtgatgtaattattaatggtacagcttatgcaccagaaggtaagccttgtgcctcttttcctatccgtctgtcagtgacagaggctaatggcaacactctgcttgataagacactgaatatatccggagagcgggaatttttcctcacggataacggacaatggcaactctctgatcctaagccgtttgcaagcatacctcttgattaccgttacgcctttggcggggaatgccggattgaagctgatgatgacaaagcggtcgatgtgctggcagaagaagataaactcacatctgaacagctcagccaacaccccgatggcgatcaagcgccggtagctcatgccgtttgggaatataaccccatcggaatgggatttgttctgccttggtatgcccgcgccaaaaaccaacctcgctatccagctccgcgtattacccatccggatgcgccagtcactgcacagcactttgcccaaatgctggcaagccagctttcagcgacagaactggccagccagccacaagggatggggattatcggtcgggcatggttaccgcgccgtacgttagccggtacctatgaccagacatggctggaacagcgccatccttatctgccacaggattttgatttcggttactggaattgtgctccgcaagatcagcaaattgactggccttctaccgatatttcactgcaattaactaatttgacaccggatggctctttgcaaactcaactgccggggcatcgtccttttatcttattccgtatggatgatggtgctctttttccggttctgatgaacttcgacaccctgattattgataccgatgccatgacgctggagctgactttccggttgtatttcagcattgacctgcctatcagagtggctgcagcccgctttgaaataaacccgaaagcacctttgatcacatttgcacctgaacaggagcagcatcatggcggataactatattgcccgaaaagatacccaatggttgattatcagtctggttcccgatgtttgtaaaaccccgatagggcctgccacaccaccgatcccttatccggttattgccaaactggaagactcctctgcgccggtctcatcggttcgggcaaacgggcagccagtcgtagtattcgggcaaagttttgtcccacagacattgggggacgaagctggaacggcgacgggcgtgaaaagtggcacggtgggaggaaaatgccatccgaaagagcatacgcaaacagtacgggcggatggcaaactgacgttgcgccatgcggataaattctggatgaatggatcataaggaaagggctatggcgaaaggagcaaagaatgatagtccaacgggtacaggaaatacggtggggactgttgttggtcaaccaaagcaagccaaaaaaagtccgtcagaggcaaatcctcctgttaaatcggaaacaatgcaagaatcacaatctcagaaccattctaggagtaagagaggggtaggtgacgtactcacttcgcaaggttttgagcaaggagctaaacaagagctcttaaatactgtgttgattgctcctcctcctcccggctttgagccttttcctgtggaacctggacaagaagaaaatgcaggatatggtcaattggctgtaagtggtttgaaaatgctctttggggggggggactattagcattaagtgttttcgttcctgtaacagccccattagcggccccggttggtagctttctattatttggaggactgaaaacggctgggaaacgggtattagaagaggtagcaaaacctacaattcataaagaacctacagttactaaagaaccggcaaagccgaaagacggtactaagattaagaatcaaggagatgaaagttctactaaaaccaatcagccagagaaaaacaaaaaagaaaatgattccgctaaccaatctgatcaagagcacccctctgaatgtaaaggcggtagttgcggaaaaggcgagcctgtcgatatcacctcaggcgattatttacagagtttttcagttattgccatacccggcctgttgccgattaccttaaaccgaacctatcgttccaccgccagcctgagcggattattagggcgaaaatgggctgatgactggtcacgtcagttagtgataaatggcaaaacagtccatttcaccgatgctgacgggcaggtttatgatttctcaacaccgggaaatcagattttagttcgcaaccgtcatattctgcattgtttactgacaggagagcttgatggtgaattacgtctggtaaataaacagagtcagcaaactttccactttaatcatattgacggtaatcggcgtcggttatctgctatcactgatcgccatcagaatcatatacagtttatctataacgaccagcatcagttaattgaagtcatacgaaatgacggttttcggttaacccttcattatcaggatcaccaattacgggcagtggattatcactttcaacagatacagcaacgtcttgccacctgtcgttatgaccagcacggttatctggcagaatgtgatgcttttcagcaaaatcacctgtggcatgaatacacagcacaaggatttatgactcgctggcatgactcggataaaacagatttttatattcactatgatgagcgcgggcgtgttgtttccacccattctacggaaggttattgggcagattgctttatctatgacgatgatgctcgtgttactacctatcttgatgccgaaggcggaaaaaccctttcttattacaaccagaataatcaggtgatccgtgaagttgatccattagggcgtgaaacacggactcaatggcgttacaaccagaaagtttgggaaattgacccgctgggaggatataccacttttgaatacaaccatgatggtgctctgaccaacattgtactaccaacgggagaagctttttattatgactacgatgaacatggtcaacttatcgaagccactttacctaccggagatatttggcagttccaccatgatgagcaaggcagtctgaccgctgttaccaatccacaaggatatagagaaaaatatcagttcggtactcacggcgaattgcggcaacgcctgctgccggatggtcggcaatggcattatgcctatgatgaacatcagcggctggctgcaattatgacacctgatggtcagacaacgggtctggaactggatgaactggggcgtctgcgtcgtacgacagatgcacttaaacaggaaacccgttaccgctacagcactgctcatgccagtgtgagtaatggtagtttgacagaaattgaattgccggatggtgttacccggcattttgaatatgacagtgaacggcgtgttattgcggtaactgatggggaaggtcgcatcactcgttatagttatggtgcttttgacctgctgacacacgttacccgcccggatggaacgacattacactttggttatgaccgacttacccgtttttgttcagttacggcttctacaggagaaacttatcgctatgaacgggatgcagccgggcaggttattcgtgaaatcgactttaccggtcgcacgattgattatcagtatgatgcgttagggcgtcgtgttcaggttagttatccagataaccactttctgcgctggcattactcttcggctggtttattgacccgacaggaagcgtggtatcagtcgggagagaaggaagaactgaaatcggtttccacttatgaatataacgcccgtcgtcagcttacccgtgcagtcaatgatgatgcggtggttgaatatgaatacaacgcggttggcctgcctgtttgtgagcgtattaatggacgggaagtgacccgtgagtggaacgatctcgagcaaataaccgctgaaactatcggtgggcatacgttgcaatttggctataacttgatgggagcggttaaccacttccagtttaaccagcatacacctctgactttgagccatgatgctttaggacgagaaacagtacgggaaagtgcagaggggtttattcttgccagccgctataccactacgggactgctggcataccaatcagccggacgggcaacagcattcttccgtgaaacgctggcacaaaatgatccccattttccgccacaggccaccgcagttaaccgcagttggcaatatgaccgcgcctacggtgtcagcatgatcgatgacggtatctgggggcagactcgttatcgttataaccagaatgaccagatcatcagtgctacatttaacggccgattgccctatgaagaacaatttggttatgaccccaatggtaacttgaatttgcatgtgctggtggatgtaaaaggagtaattgaacaggttgaacaacatcagcaggcaggtcgggttgttaagcgtgacaatgtcacttatcgttacgatgataacggcaggcaagtggaaaaaaccgaacatcatgatggtttccggccacagatatggcgttatcgttgggatacccaaaaccagcttacacactgtgaaacacccgatggttcacgttggctctatcgttatgatgcgttcgggcggcgtatccgcaaattaaaagtgcatgatggcaaactgaccgctgcgaacctgcaacgctggttgaatggtaagccagatttaacagcaaaacccgacgtcatcaccggctatgattacttgtggagcggtgatcggatggttgaggaagttccgctttatgcggatggcacacctgcctatgagcgaagtatttgctggttatatcaaccgggtgtgttaacgccttcagcccgctatgaaaaaggcaaactgcattatatcgtcagcgatcatcagggaacgccacgggaaatactgagtgaaaatggcaaactagtatgggcaagccgattaaggacatggggaaaagctgaacggatgccattattggcagcaaatgatgaagattatcacgttagctgtaatctgcgttttgttggacagtatgaggatgaagaaaacggggttatattataatcgatttcggtattatgatggagatataggacagtatattactcctgaccccattgggttggatggaggaattaacccttatggatatgtgcataatcccataaattggattgactcactgggattagttcccaagccaatacctactgtcttcagatattttaaaaaatccaagttctttatggggtaaaagcgctgatgatatacggaatcacctaattaatggaggtcttcctgaagacactattaaaatagaatttagcaagttaaaaggtggggtaactgagggcggtagagaacaaggtttgggggagtttgtgagaataggaaaacaacgtatacaattcgttgaggtgcatcctggaggagggacgcatgggggggcatattataaaattgcgacagcgaacgaaggtaatatgaaagtaatagatcctagtacatacaaatagttaggccaagaaaaaaggatgacttactatgatcactccgatgggaagcaagtgacatttcagaatggaaattgggggaaaaactgtgagtaatattgtacttttttgttatacgtcaaagagaattgaattagggtgttttaaatatcgtgtcaaaaataccgtatattaatatatcccgcctgatctggcgggaaggatttataactccgttttatccccaaactcacacagatcttcaataatacaagatccacagcgtggtttacgggcaatgcaagtatagcggccgtgtaaaatcagccagtgatgacagtcaaccttgaactcatcggggacgactttcagcagtttcttttccacttcatcaacgttttcccccggtgcaaactgcgtccggttgctgacgcggaaaatatgggtatcaaccgcaatagtcggccagccaaacgcagtattcagcacaacgttggctgttttacggcccacgcccggtaatgcctccagtgctgcgcgatcttccggcacttcgccttgatgcttttccagcagaatccggcaggttttaatcacgttctcagctttggtgttatatagcccgatggtttttatatactcttttaagccatcaacgcctaaatcaagaatagtttgtggcgtattggcaaccggatacaattttgctgttgccttattcacgctgacatcagtcgcctgagcggacagcaataccgaaatcaacaattcaaacggtgaattgaaaaccagttcagtggttggtgttgggttgttatcccgtaagcgggtcagaatttcgacccgtttttgtctattcatgcctgattacacctttagccttttgtgatattgctgccacaacctttatccatttcatagtgacgtgttttgctctctgaacggtttctgaggcgttcatcaataatgtatttacccgccagcattaatcctaatccgataaaggctcccggtggcaggatagcgagcaggaatggggaatccatatgaataatttcaatccgcagcactttagcccagcttcctaataacaaatctgctccatcaaacagggtgccattgcccagaatttcacgcatcgcacccagtacgaacagggcaaacgttgctccgagtcccatagcaatgccatcaatcgctgagtgatagatagaattttttgatgcgtaggcttctgcacggccgataacgatgcagttagtcacgatcagcggaataaaaatgcccagtgattcatataacccgaatgcaaaggcattgattaacatc

SEQ ID NO: 1968 - DNA, 12559 bp, Xenorhabdus sp.; identical to SEQ ID NO: 1967
  CDS (1978)..(3564)

SEQ ID NO: 1969 - DNA, 12559 bp, Xenorhabdus sp.; identical to SEQ ID NO: 1967
  CDS (3581)..(5464)

SEQ ID NO: 1970 - DNA, 12559 bp, Xenorhabdus sp.; identical to SEQ ID NO: 1967
  CDS (5510)..(6697)

SEQ ID NO: 1971 - DNA, 12559 bp, Xenorhabdus sp.; identical to SEQ ID NO: 1967
  CDS (6687)..(7043)

SEQ ID NO: 1972 - DNA, 12559 bp, Xenorhabdus sp.; identical to SEQ ID NO: 1967
  CDS (7180)..(7416)

SEQ ID NO: 1973 - DNA, 12559 bp, Xenorhabdus sp.; identical to SEQ ID NO: 1967
  CDS (8349)..(10802)

SEQ ID NO: 1974 - DNA, 12559 bp, Xenorhabdus sp.
  CDS (11378)..(12559)
gatgttaatcaatgcctttgcattcgggttatatgaatcactgggcatttttattccgctgatcgtgactaactgcatcgttatcggccgtgcagaagcctacgcatcaaaaaattctatctatcactcagcgattgatggcattgctatgggactcggagcaacgtttgccctgttcgtactgggtgcgatgcgtgaaattctgggcaatggcaccctgtttgatggagcagatttgttattaggaagctgggctaaagtgctgcggattgaaattattcatatggattccccattcctgctcgctatcctgccaccgggagcctttatcggattaggattaatgctggcgggtaaatacattattgatgaacgcctcagaaaccgttcagagagcaaaacacgtcactatgaaatggataaaggttgtggcagcaatatcacaaaaggctaaaggtgtaatcaggcatgaatagacaaaaacgggtcgaaattctgacccgcttacgggataacaacccaacaccaaccactgaactggttttcaattcaccgtttgaattgttgatttcggtattgctgtccgctcaggcgactgatgtcagcgtgaataaggcaacagcaaaattgtatccggttgccaatacgccacaaactattcttgatttaggcgttgatggcttaaaagagtatataaaaaccatcgggctatataacaccaaagctgagaacgtgattaaaacctgccggattctgctggaaaagcatcaaggcgaagtgccggaagatcgcgcagcactggaggcattaccgggcgtgggccgtaaaacagccaacgttgtgctgaatactgcgtttggctggccgactattgcggttgatacccatattttccgcgtcagcaaccggacgcagtttgcaccgggggaaaacgttgatgaagtggaaaagaaactgctgaaagtcgtccccgatgagttcaaggttgactgtcatcactggctgattttacacggccgctatacttgcattgcccgtaaaccacgctgtggatcttgtattattgaagatctgtgtgagtttggggataaaacggagttataaatccttcccgccagatcaggcgggatatattaatatacggtatttttgacacgatatttaaaacaccctaattcaattctctttgacgtataacaaaaaagtacaatattactcacagtttttcccccaatttccattctgaaatgtcacttgcttcccatcggagtgatcatagtaagtcatccttttttcttggcctaactatttgtatgtactaggatctattactttcatattaccttcgttcgctgtcgcaattttataatatgcccccccatgcgtccctcctccaggatgcacctcaacgaattgtatacgttgttttcctattctcacaaactcccccaaaccttgttctctaccgccctcagttaccccaccttttaacttgctaaattctattttaatagtgtcttcaggaagacctccattaattaggtgattccgtatatcatcagcgcttttaccccataaagaacttggattttttaaaatatctgaagacagtaggtattggcttgggaactaatcccagtgagtcaatccaatttatgggattatgcacatatccataagggttaattcctccatccaacccaatggggtcaggagtaatatactgtcctatatctccatcataataccgaaatcgattataatataaccccgttttcttcatcctcatactgtccaacaaaacgcagattacagctaacgtgataatcttcatcatttgctgccaataatggcatccgttcagcttttccccatgtccttaatcggcttgcccatactagtttgccattttcactcagtatttcccgtggcgttccctgatgatcgctgacgatataatgcagtttgcctttttcatagcgggctgaaggcgttaacacacccggttgatataaccagcaaatacttcgctcataggcaggtgtgccatccgcataaagcggaacttcctcaaccatccgatcaccgctccacaagtaatcatagccggtgatgacgtcgggttttgctgttaaatctggcttaccattcaaccagcgttgcaggttcgcagcggtcagtttgccatcatgcacttttaatttgcggatacgccgcccgaacgcatcataacgatagagccaacgtgaaccatcgggtgtttcacagtgtgtaagctggttttgggtatcccaacgataacgccatatctgtggccggaaaccatcatgatgttcggttttttccacttgcctgccgttatcatcgtaacgataagtgacattgtcacgcttaacaacccgacctgcctgctgatgttgttcaacctgttcaattactccttttacatccaccagcacatgcaaattcaagttaccattggggtcataaccaaattgttcttcatagggcaatcggccgttaaatgtagcactgatgatctggtcattctggttataacgataacgagtctgcccccagataccgtcatcgatcatgctgacaccgtaggcgcggtcatattgccaactgcggttaactgcggtggcctgtggcggaaaatggggatcattttgtgccagcgtttcacggaagaatgctgttgcccgtccggctgattggtatgccagcagtcccgtagtggtatagcggctggcaagaataaacccctctgcactttcccgtactgtttctcgtcctaaagcatcatggctcaaagtcagaggtgtatgctggttaaactggaagtggttaaccgctcccatcaagttatagccaaattgcaacgtatgcccaccgatagtttcagcggttatttgctcgagatcgttccactcacgggtcacttcccgtccattaatacgctcacaaacaggcaggccaaccgcgttgtattcatattcaaccaccgcatcatcattgactgcacgggtaagctgacgacgggcgttatattcataagtggaaaccgatttcagttcttccttctctcccgactgataccacgcttcctgtcgggtcaataaaccagccgaagagtaatgccagcgcagaaagtggttatctggataactaacctgaacacgacgccctaacgcatcatactgataatcaatcgtgcgaccggtaaagtcgatttcacgaataacctgcccggctgcatcccgttcatagcgataagtttctcctgtagaagccgtaactgaacaaaaacgggtaagtcggtcataaccaaagtgtaatgtcgttccatccgggcgggtaacgtgtgtcagcaggtcaaaagcaccataactataacgagtgatgcgaccttccccatcagttaccgcaataacacgccgttcactgtcatattcaaaatgccgggtaacaccatccggcaattcaatttctgtcaaactaccattactcacactggcatgagcagtgctgtagcggtaacgggtttcctgtttaagtgcatctgtcgtacgacgcagacgccccagttcatccagttccagacccgttgtctgaccatcaggtgtcataattgcagccagccgctgatgttcatcataggcataatgccattgccgaccatccggcagcaggcgttgccgcaattcgccgtgagtaccgaactgatatttttctctatatccttgtggattggtaacagcggtcagactgccttgctcatcatggtggaactgccaaatatctccggtaggtaaagtggcttcgataagttgaccatgttcatcgtagtcataataaaaagcttctcccgttggtagtacaatgttggtcagagcaccatcatggttgtattcaaaagtggtatatcctcccagcgggtcaatttcccaaactttctggttgtaacgccattgagtccgtgtttcacgccctaatggatcaacttcacggatcacctgattattctggttgtaataagaaagggtttttccgccttcggcatcaagataggtagtaacacgagcatcatcgtcatagataaagcaatctgcccaataaccttccgtagaatgggtggaaacaacacgcccgcgctcatcatagtgaatataaaaatctgttttatccgagtcatgccagcgagtcataaatccttgtgctgtgtattcatgccacaggtgattttgctgaaaagcatcacattctgccagataaccgtgctggtcataacgacaggtggcaagacgttgctgtatctgttgaaagtgataatccactgcccgtaattggtgatcctgataatgaagggttaaccgaaaaccgtcatttcgtatgacttcaattaactgatgctggtcgttatagataaactgtatatgattctgatggcgatcagtgatagcagataaccgacgccgattaccgtcaatatgattaaagtggaaagtttgctgactctgtttatttaccagacgtaattcaccatcaagctctcctgtcagtaaacaatgcagaatatgacggttgcgaactaaaatctgatttcccggtgttgagaaatcataaacctgcccgtcagcatcggtgaaatggactgttttgccatttatcactaactgacgtgaccagtcatcagcccattttcgccctaataatccgctcaggctggcggtggaacgataggttcggtttaaggtaatcggcaacaggccgggtatggcaataactgaaaaactctgtaaataatcgcctgaggtgatatcgacaggctcgccttttccgcaactaccgcctttacattcagaggggtgctcttgatcagattggttagcggaatcattttcttttttgtttttctctggctgattggttttagtagaactttcatctccttgattcttaatcttagtaccgtctttcggctttgccggttctttagtaactgtaggttctttatgaattgtaggttttgctacctcttctaatacccgtttcccagccgttttcagtcctccaaataatagaaagctaccaaccggggccgctaatggggctgttacaggaacgaaaacacttaatgctaatagtccccccccccaaagagcattttcaaaccacttacagccaattgaccatatcctgcattttcttcttgtccaggttccacaggaaaaggctcaaagccgggaggaggaggagcaatcaacacagtatttaagagctcttgtttagctccttgctcaaaaccttgcgaagtgagtacgtcacctacccctctcttactcctagaatggttctgagattgtgattcttgcattgtttccgatttaacaggaggatttgcctctgacggactttttttggcttgctttggttgaccaacaacagtccccaccgtatttcctgtacccgttggactatcattctttgctcctttcgccatagccctttccttatgatccattcatccagaatttatccgcatggcgcaacgtcagtttgccatccgcccgtactgtttgcgtatgctctttcggatggcattttcctcccaccgtgccacttttcacgcccgtcgccgttccagcttcgtcccccaatgtctgtgggacaaaactttgcccgaatactacgactggctgcccgtttgcccgaaccgatgagaccggcgcagaggagtcttccagtttggcaataaccggataagggatcggtggtgtggcaggccctatcggggttttacaaacatcgggaaccagactgataatcaaccattgggtatcttttcgggcaatatagttatccgccatgatgctgctcctgttcaggtgcaaatgtgatcaaaggtgctttcgggtttatttcaaagcgggctgcagccactctgataggcaggtcaatgctgaaatacaaccggaaagtcagctccagcgtcatggcatcggtatcaataatcagggtgtcgaagttcatcagaaccggaaaaagagcaccatcatccatacggaataagataaaaggacgatgccccggcagttgagtttgcaaagagccatccggtgtcaaattagttaattgcagtgaaatatcggtagaaggccagtcaatttgctgatcttgcggagcacaattccagtaaccgaaatcaaaatcctgtggcagataaggatggcgctgttccagccatgtctggtcataggtaccggctaacgtacggcgcggtaaccatgcccgaccgataatccccatcccttgtggctggctggccagttctgtcgctgaaagctggcttgccagcatttgggcaaagtgctgtgcagtgactggcgcatccggatgggtaatacgcggagctggatagcgaggttggtttttggcgcgggcataccaaggcagaacaaatcccattccgatggggttatattcccaaacggcatgagctaccggcgcttgatcgccatcggggtgttggctgagctgttcagatgtgagtttatcttcttctgccagcacatcgaccgctttgtcatcatcagcttcaatccggcattccccgccaaaggcgtaacggtaatcaagaggtatgcttgcaaacggcttaggatcagagagttgccattgtccgttatccgtgaggaaaaattcccgctctccggatatattcagtgtcttatcaagcagagtgttgccattagcctctgtcactgacagacggataggaaaagaggcacaaggcttaccttctggtgcataagctgtaccattaataattacatcacatttaggtttaaaaggagccagatcactttcctgcaatacctgcgagacatttaatcctctccgatattgatcctgtatacacagggtcattaccggaagcaattcagccagatattcgcctttacccgcaggcaatagctgatagcccactttcatggcaataacatcgtattcctgatcttcagtatccagcatccggtagttcatcaccgaaaaagaagtgagatttttgaattccatcgtccggtctccttagttcaaatcgatgtctttgccactgatttgcacagggccgctggcttcgaacctgaactctttacctttgatggtaattttgccatctttgtccattctcaatgtgctcttaccgcatttcagctcaatcaccttaccggcactaatagataaagtttgccccacagaaatccttttctgcatacccaccgtttctttctgactaacagaaactgaagtattcatactggcaccaacattaatcctatagcttgcccctactctcaatattttggtgagtccaaccatttcagtactacgaagctgtaccatttcctgtctattctttttcacgacaacagcttgttttccatcaactgcctcagtgtgattaccttgtacctgagtggtgcggttatttagtaccttggtgttcatatctttttgggcatgaataaacacctcttcgctacctttcgcgtcatcaaaacgcagttcattaaacccttctcctttgtgagtgtgggttttgaaggtggtgcgggttttctcagcaggcaaattaagtggggagcgattgcgaccgttgtagttacagcctgtcacgatggggcgatcaatatcaccattaaggtaagaaataatcacttcctgaccgatgcgggggatcgccataaaaccgaatccattaccattccagccctgtactacacgaacccaacaggaggaactatctcctgcttcatcgtggcggttccaatgaaaatgtactttaatagcaccgtgttcattaacaaaaatttcctcacccggtggccctactaccgttgccagttcatcaccatctgccagcggcttataacggtatggtggtcgccagtcgttttttcccggaataaaagtgacgttattggtcagggttgtgccttctcccgcaatacctgccgcttgtggctgagaaccgtaatggttaacagtaacgatttgccagcggttattcatggctgcaatcggatgggattccaaagtaaaaattttaccgggacgtaactgaacacagtttgtctgggccgaacccagtttactttcgctattaagttggctcaggcgtatttcacccagcggtttaccttctttactccacgggaaacgaccggaactttcaaatattgggtgacgcccgccttgcggtaaatcagcctgaatctgcaagggctgagaaggtcgcaaccaattgtaatctttatgaatatattcatccgggcagaggtattctccatattgccactgccaggctgtagtatctttattatcggtattgggctgattgttataagtcaggctcagatctgctgtcatacctaaatgggaatcgctgaaaaagagttgctcctcctcaaaccaaaacgcaataccttcttcagccgccaaccggcaccaaaaatcataggcagattcacgtttctgtgtggtgtattcccgtacagggtgaagattactgtcttcatagaatttgctatcagatttgacgcggtgttctttcaacaattttttgaggatatccggcactgactggcgctgaaaaaggcggctatcctgatgaagagtcatacgccacatttctggccggatagtaaaaatataataggtttgtcttccgtcagtattgccctgtatagcacctgccacaataccgttaactttacgctccactttaccatcgcgagtcactgttaaagaagcataagttcccagttggtcattaagaacaatattattaagggaactgactaccgtcagtgacaagtggtaaagctgtgacagcccttcctgtaagctgaaattcacaacctgaaaggtcgtccccgataacgcacctatctggcaagtaaaaactaacccatccatttgcatctccttacataattggacgatatccttgcagcgggcaaggcgatagcagccatcgaatattagagctctgccagataatcgtcatacgtatacgcatatcttcgctaaggcaaaatggtaagaactggtagagagcgttggaaaaccggaacagttctccctgactgatataagctgattcatccagtattagttcaacgtggacacaacgatgaggcacaccccggataagccagtcaccgggcgtagactggatctccacaatacctgccgtcattcgtcgaatattgcggtgcgtattgcgatccaaatcagcataaaaatcataatccaacagcagttgtttaagagcagataccgaattcagccagaacccgttggcagcatggtgtgacaatattccccagtaacgggaacaatctgtcacgggaggataggcgcaagaagccggcgtcagatttctggcctgcaacccgtcaggaatatcctcttctgttaaacaaatatcccctgccaccaacctcggcaaagcggtattaaacgtcgttaagcgacaggtgaattcctgctctggcggctgttccatcaggcgagcattgctgtcataaaacaccagtgcatattccagacgttcgaacgcatcacgggtaacatccaacgcataaaaccaggttttttcatctgcgccgcgaaagaaatgcgtgaactggcttataggtaaaaattgaactcgttttccccgctccttacctggctcatcttttaactgaagctcagtgatgcgtaaaatcccctgctctgatggcaaaggcaatgggtaacgagcggtatccggcgtaaaaggaagggtgattttcaattcacgttctagatttacgacaggtacacaatggagatgaaaagcatcggccagttgggcttcagtaagaaacaatgcttcattgagctttaatatgatgctgaattgtcggctttcggtcatggacaaccgattacgcatggctgtgggtagcgataacgtcagaaaatggtgaacatgtggcaggtaaagtgactctattaacatctgaggtgcccagttccctgctgttaacgcgggagctggtaaaatcaggcgtgaaattcccgacagaggttcaaaccaaaagggttcagccgaataattcaatccgttatggtttagtatcgcaccccgtaagttgcggcatagagcaagcatcaaagcatcggctactgtctcatcagggctgagaaacagattaatggggctgatgggccagtaatcatccccgcctgtatattggaaagtcagagtaatactactggtttcctcctgacaactcatctcacgagcgaccagcatcagaggctcaatattacactctctgcctgtaacaaaagttgcccctgtatttgatgaaatttctgatccacgccgtaatatatcggcgaatttaattccttccattacactaaactgaacaacactggttgctggaattcctttaacaggtaatgcttttaattgttgtagcagaggtaaagtaatttcaggaaaagcatcatctactttttgatgtaaacgagccattaacacagaaaaaccctgattcagccgctcaatatcaggatcacatccattaaaattttctgctaaatgtggtttttctttactggctaatttttcaatttgctgtaggtaatccaattcccactgataataaaattgaaaattatccatgcctgtctcttttttaatagtcagcaatttaaatactatatttattttaatagcgtaaatatcgccattaccctcttatacctattcaacttcaagatgcgtgttatatccccccacgccgcggggagatataaggactcacctcatattgcccgttgtaacttgaagtttatcgagcatatatacctaaagaaaaacaagttagttaaaaccagagaaaatagaaaaacaaacataaaaatcaaaaagataattaaatcaggaatgataaaaaggacttcggttctgatgaagaagaaaaaacacgttcgtttattatcagccatgaatttacacaacaacatattctagtcaaataacgtttataaatgtttaattaacaatatttaattaaatccaataaaatatttaaataaacaactatattcatcagatattaaatccagagctaacctctgagtgaatattcagcaccttatcttatattattattgttactgcatgatcatctgttagctgtataaatatcactctcactaggtactttttcgtgttttgataagatgttacttgcccgataccctcgattcgcgtaaaactattacctaaattatcgataataactccacaactctcctgattattatgtttcaaaacaatccgctgcttgctcagctaaaacagcaactacattctcaaaccttgcgtgtagaaggtttagtcaaaggaacagaaaagggcttcggctttctggaagtcgatggtcaaaaaagttactttattcctcctccttatatgaagaaagtgatgcacggcgatcgagtcagtgctgctattcataccgataaagaaaaagaagtcgctgaaccagaagaactgattgaacctttcctgacccgttttgttggtcgggttcagagaaaagaaaacgacaaccgactgtggattattcctgaccatccattgttaaaagactctattccatgccgaccgtccagtcaggtaactcataattttgaacaaggtgactgggcagttgctgaaatgcgccgtcatccactgaaaggtgatcgcggtttccatgctgaaataaccggctatattacccgtggtgatgatcacttcgctccgtggtgggttactcttactcgccacagtctggaacgtgaagccccatcaatggcagattgccagttggatgatggttctcttgagcgtatcgacctgacctcccttaatttcgtcacaatcgatagtgcaacaactgaagatatggatgacgcactgcatattgtcaaaaatgatgatggcagcctgaaactatccattgctattgccgatccgactgcctatatcaagactggcagcgatctggacacaatcgcttatcaacgcagctttaccaactatctgccgggcttcaatattccaatgctgccccgcgaactttctgatgatttgtgttctcttcgtccgaatgcccgccgccctgctctggtttgtcaggtttccattctggaagacgggcaattaggtgatgacattcaattctttgccgcttgggtcgaatcgaaattcaagctggtttatgacgaaatttctgattggctggaaggcaaggaaggctggaaaccgggttcagatgctgtcactgaacaaatcacactgctgaaagagatgtgtgaacgccgtaataactggcgccaacagcacgctctggtatttaaagatcgccctgattaccggtttattatggatgaaggcgggaatgtcactgatattgtcactgaacagcgtcgctctgcaaaccgcattgttaagaactta

SEQ ID NO: 1975 - DNA, 12559 bp, Xenorhabdus sp.; identical to SEQ ID NO: 1974
  CDS (469)..(1104)

SEQ ID NO: 1976 - DNA, 12559 bp, Xenorhabdus sp.; identical to SEQ ID NO: 1974
  CDS (2)..(454)

SEQ ID NO: 1977 - DNA, 6996 bp, Xenorhabdus sp.
  CDS (13)..(522)
ctctaaagtgccggtgggattggttttgatactgcggagtatctgagccagagtgggcaaagcagcagcctgagcagccacgcattctctcaggaatgggggatcgaccaaacgctttctcaccggggcggattacagccagaaggcgcacgagtggaactctcgccccggaagatttatctgttacaacgcaaagagactaaagtcggggaaggtctgggtaaaaccactggctggatccaccgggccagtctctcgatgcgtggcatcacgatgctgaataatgtccagtacctgaaaattgatgatcaaggattacatatcagccgtgagggtgagcagcaatgtcttgaagtcgataatgtggtgatctgcgcaggacaggagccgctgaaagcgctgtatcagccactacaggatatgggtaaaagtgtacatttaattggtggagccgatgtcgcagccgagctggatgcccgcagagcgattgatcagggaacccggctggcagtaaagatttagtgcagaaatgaaaaattaatacaaataaagagcggataaaagaagagtgacaataaacctaccgcttattgtcactcttgctgtttatcattagcgccgtgctaactcttcaggtacctgtttggcatcttcagcctgacagactgcggcagtaaacaatacatctgttgaggaattcagggcggtttcagccgaatcctgcaatacaccaataattaaacctacggcaacaacctgcatggaaatctcattagagataccgaacatactgcatgccagagggattaataataatgacccgcctgctatccccgatgctccacatgctgcaattgctgaaaccacactcagcaatattgctgttggaatatcaacagatatacccagtgtatttaccgccgccagcgtcaataccgtgatggtcaccgcggcacccgtcatattgatcgttgctcccaatggaattgagactgaataggtatcctcatccagattcatacggcggcacattgccatgttaaccgggatattggcggcagaactgcgggtaaagaaagcagtcacaccactttcgcgcaggcagtcaaaaaccagtgggtaagggttgcgacgtatcttccaatatacaattaatgggttaacaaccagtacaacaacaatcatacagctcagaagtacaaccaatagatgtccataaccgagcaatgtatcgaaacctgttgtggcaatagtggaagcaaccagaccaaaaatcccgagaggagccagacggataacaacacgaacaacctgagtcaccgcttcagccaaatcctgcaccactgatttggtcgattccttcgcgtggcgtaatgcgatacccaacccgattgaccatgccagaataccaacataattccctttcaatatcgcatcaatcgggttagcaaccacattgagcaatactcccttcaatacttcaacgatattatccggtggtgacatttgagcttcattcgtcaccagtattaatgttgacgggaataaaatactgccgatcacagcgacaacagcagcaaggaaggttcccataatatagagaacgacaatcggtcggatattagttttctggcctttcttatgattcgcaatagaagacataaccagaacccaaaccagaaccggtgcaaccgctttcaaagcaccgacaaaaagctcacctaataagctggttgattgagcagcagaaggcattacccatgccagtaatacccctgcaattaatccgataataatttgtgtgactaggcttccctgtacaatatattgcacaaagcctttttgttgtttttccatagcctatccatttgatattttggcttaatcagcctgttggttttgtgtttgcttttccagtagtaggaaagttcagaaaactgaaaataataattaataaaaatatacaaccaactcaacaagtgataacaaaatagtcacatttgtgtgatccattctacacatttcctatttcatcaggcatccctgaaatcccaaaaggaatgaggattaaaatttatattttataatcaaataattatatgaataacccgctttggcgatagtcaccatcatcggcattatctccaatattatttatggattatttttactatgtgatgataaaacaaagttattctggctggaaaaagcagaaatacagctatacaacagggaaaatcagaaaacagagttattttatgcaaacttcgtaactgaattaattaattgatatctctgggcgatgttacttttatattcatacaaatgttcaattgctcaccaaaattttctgtttcactactgatgattttgttagagtgtccctgtcatttattcatgccatttgaaaggagtttgaaggatcataattgtcaatccgtatataactttttgtatattatgattatttaatagtaaaaaatcataaatacaccataaaagtaagatgtaatccttaacccgcgttttaggaacatttgatggaaattgtaacagaccttatttatgcactttggcaccaagattacgcaacactagctaacccctcattagtttgggtcatttaccttctgctattcacaatcctgtttctggaaaatggggtgttacctgcggcatttttgcccggcgatagtttactgatattagttggcgttctggttgctcaggatacaatggatttttccattacattaattgttcttaccgcgggtgcaagtctcggttgctgggttggctatcttcagggacgctggctggggaacacaaaattagtgcagggatggctgtcccatcttcctccccattatcatcaacgtgcccataatctcttccatcgtcatggcttgtcagcactgctaatcggccgtttcatcgcttttgtcagaacattactgcctacactggcaggtcttgccggactgaataatacacgttttcagatattcaattggctcagtggtttcttatgggtcattatcctgatgactctgggctatgctctcggtaaaagccccctattccgcgagtatgaacactatctgatgaactttctggtgctgctgcctgtaggtctgttactgatcggtttaattggtagcctgacgtttatctggcgcaaaaaacgcacaaataattctacccaataattctccccctttatttcccctgtagcattgtggataaccatgttgcagggggtttgaacaccaattcctgctatatatttaggattaatctgtcgcatcatgtaataatttttcaccatattgcctttaaactccttacaaaaacgtctatggtagaaattcattcaccgtatatatacgaggagaattccatgccacagaaaaaaaactctgacgaattacgtgctgaattacagtcccttgcggatactctggaagaagttctcaacagctctggtgaacaatccaaagcagaactggagaaaattcgcaataaagcagagaaaatgttgaaagatgcccgcactgttatcagtgatgccggtgataaactcacaggccagaccaaagaaatagccggtcgtgcagataattatgtccgcgataatccctggaccggtgtgggtattggtgcagcagtaggtatcgtactgggtgtattactggcaagacgctaatatgacgcaattaccccattcacaaggcccggggagaggagtatttaataccttacggcgagtagcaactctgattgtcggcatggttgaaacccgagttcagcttgcagcggttgagctggaagagggagccgccacgctggtgaaattactgttgctggtagggttcacgctgttattcgcagcccttggcataacatgtttgttaatactggtctttctggccgttgatccggtctaccagatgaccattatcgctattgccgcaggaaccttgctgcttctcgccgtgcttggcacgatttggactatcagaaaatcccgccatctggcttttttcaatgctacccgagagcaactcagaatcgatcgcaatatgttggaaaatgaccatgaataagccgcgacgcctgcaacgggaagagcgcaagcaggcattactacaacaaatccagctacagcgtcagtctctttcagagcacggtcagcaatggctcgcccttacccgcacttacgatcatagctggcagacactgctctctttcaaaccttattttgctgtcggcagtggcatattactgctctatggcatccgccaccctaaaaagctttatcgttggtcgctccgtatgcttggcgtctggaaactcattgatactgcccgtaatatctttaacaaacgttaatattttctaccggattattctttttcaaatctctttacgtatattgaggtattccttcaaaaaaattgcattaaattgttaatattccttactatcaaccaatgacacctctccttagaatactctccatcaacaaataccatcaataaatgatgagcttaattgtgctttttagaacacacgcctggagacgttcatgaaaaaatttgaagatagtggtttattagtcgcacgtattttaatttcagtcctgttcattattgcaggctatgggaagttagggagtgcttatgcaggcacacaagaattcatggaagcaatgcacgtgccgggcattttactgccactcactatcttgcttgaactcggcggcggcctcgctgtactgttcggattgctaacccgtacgacagccgtattcacttttattttctgtatcctgaccgcactgctgttccactatgatttttcagacgatatgaaccagacgatgttcctgaaaaacttctctatcggtgcaggttatctgttgctggcaatgatgggaccgggcaaattcagtattgaccgcttgctgaaaaagaactggtaattacctgccataatacaaaataccctcacacagcaaagcccctatcactcaggggctttttgataatactacttgaataatttaggaatttcccgcaggcaccatgctttggcttctcccatccgatcacgccgccatgccataataatgttagtttcatggatatattccgaaccaacaacccgcagacgaccttctgcaatatctttttctaccatcggatagggcatggttgcgacccccagaccggccaacagcgccctccgtttattttccagcgaactgaccgttaaccggggttgcttatccagtagctggactgtcagcaccgggcgttctcttgccgtatcagctaccgctattcctcggtatttaacccgcgtagcatcggataaaggctccggttcattgtggatagggtgatccatactggcaacgtaaacattcttgatggagtaaagagggcgtgagttgatttctgctgatgccctgaaatgaagatctggcgcaatcacaatatctgcatagccagtttccagacgttcccaggctcctgccagaacttctgtgactaatgaaagctgagtattcgatttattcgccagcttgtccacaaggggaaagagtgactcaacaggaaataaggcttcacagacgataaataaatgggtttcccagccacgggcaagtgcctgtgcatctgtagtgagcttgtctgcggcttcaagcagtaccctgccccgatcaagcaacatgcggccaacattggtaaattttgtgcgatgtccggagcggtcaaacagcacaacatccagctcttcttccagtttctgcatggtataacttaatgcagaaggcactcttcccaactcatccgctgcggccgcaaaacttccccgacgttctattgcatccataacccgcagggattccagtgttaacgctcgttctttacccatatatgtccgttacccacaatttctcagtcagtaaatttgaatatagggagcagattaactggctaacatttcaacgtccagataattaagattgaggctaacagtgtgtggcaaggagaacatgctcatgataataaccagaacagcaaatcagtgtggaaaagccgactatggttggttaaaagcgcagtatactttttcattcggtcactattttgacccaaattttttgaactacggggcactacgagtacttaatcaggaaatacttgctccgcaaacagaactcaagccaaaggcttatcctcatgtcgatatcctgaatattattctacagggtgaagcggaatatcgtgatagtgcaggaaactacattcaggctcatcagggagactgtctgctattttccactcgtcaggatctacgctacagtgagcataacctcagtaagaaaaaatcgctgcatcgcctgcaaatctggcttgatgccaagccacatcaggctccgcaaccggtacagtgcaggaggctgtcagctcagccactaacattactggcttcacctgcctccggaaaaaacagcatgcacctgcgccaatcagcgtggataagctaccttatgctacaagctggtgaggctcataacgtaccgttacaggggaaacgcgcctacctacaatctgtcagcggtaatgctgaaatctatgctgatagcaagtctggaacagcaactcatgccaatatcaggtgtggggatggggtatttattcaggatgaaacgcaactgaacctgcgggcaacttctgcatttcaggggctgctgatcgatttgggaaatcaattaccctgatccgctttcctggactaggtgatgcgtttttttatggtagacaagccggttttgtagcatgaatacaaatagcttagcttctgccacacgggatctgataacatgggtcgtggcatgatagttcgggtaacgagttttttggcgaaaataagataccaaattattatgccgctcaattccctttgagtaagcgtcaacacgcg

SEQ ID NO: 1978 - DNA, 6996 bp, Xenorhabdus sp.; identical to SEQ ID NO: 1977
  CDS (2541)..(3209)

SEQ ID NO: 1979 - DNA, 6996 bp, Xenorhabdus sp.; identical to SEQ ID NO: 1977
  CDS (3401)..(3706)

SEQ ID NO: 1980 - DNA, 6996 bp, Xenorhabdus sp.; identical to SEQ ID NO: 1977
  CDS (3789)..(4106)

SEQ ID NO: 1981 - DNA, 6996 bp, Xenorhabdus sp.; identical to SEQ ID NO: 1977
  CDS (4093)..(4392)

SEQ ID NO: 1982 - DNA, 6996 bp, Xenorhabdus sp.; identical to SEQ ID NO: 1977
  CDS (4577)..(4984)

SEQ ID NO: 1983 - DNA, 6996 bp, Xenorhabdus sp.; identical to SEQ ID NO: 1977
  CDS (6071)..(6793)

SEQ ID NO: 1984 - DNA, 6996 bp, Xenorhabdus sp.; identical to SEQ ID NO: 466
  CDS (5140)..(6384)

SEQ ID NO: 1985 - DNA, 10561 bp, Xenorhabdus sp.
  CDS (307)..(426)
  unsure (1)..(10561): unsure at all n locations
tgctcgagccatgtgctctaaaggttgtctgatcatcacggcacaaaattttcatgaactgtgacactgcttaaaaagcctgaatgaaggcgaatgggatgatatcgccgtagcacactggctacggcaatttcccggaaaattaaataaaaagctgccgaaataaacgcataatactatgttttatcaactaaaacatagtattgaacgcgactgcgtaagctgtgctttgcacttaaaatggcaaaaattttcttttgcgaagccgctcgcattttattttatgaatcaacaaagaaggaatctatggagcttaaattttctactgaacacgctgaaaaaccggaatgtgtattacgtggtgatgatatgcagcagatgggatttacgcccaatacgctgtttcatatccagcaaatgggctgatgttgacattggcgaagcctgacgataatccagcaaccctattccacgccgtggaaaatgatccgaaacagggcattgattgggtgcgtaacagtggcgagctgtgtctggcgggcgactggttaacggaaaccggtttgttggataagtctgttcaaattgctttcggttacggcaaaattatgttgatgaccgaatctgacctgcctgagtcgtataaaacattttaattgctgataatggtgtgttaactgtggttgacatatcgtgttgtttatatacaataatattcactttagaggtgagcctgataaccattgaaaggactcaatattttgaaaaatggttaaaatatttaaaagaccgaatagccaaagcaaagatcttaatcagagttgaaagaatggaagagggcaacccatcgtttaatgtggtatataaaatatcaaaagcactgggcttgaaactgcattttagcgggggcttaattcccctctcgttaacgtgaataagtgctgttccgaaaggaaaatagcatattgcatattgattgtctctattgataagtcacatcattaatccagcctgcattttattataaaaaatgcaggctggattatttagatagtaccttcttgaagagatttgtttttttctccaccccacgggtcatctaacatatatttagcatcaaccttaatttcagatgggacaaaagttaatttataaaaaacttcatctccttcacatacttcatagtataagctataaagagtttctttaaggtctaaatcaatcttaaatttctcagtagctgacgctatctccagtttatttttatctgtgacataaaaaggaacaaccatacaccgctgaaccagagggtccatattaaaattttcttccaaaattaagtgtatattcgcgccaaaagcatcatctggtaaaggatcgaatacaacataatctttgtgaaggatagccccttgttttatgttttatgttttcacttccccactggcatggtttttcatcaaatggtcttgagcgaacctgaatttggctatgtgatatcaataaatcgactactttttcattacttttcatttgttacctattttttaattataataaaaaccatgttatcaatcattgagtattcatcaaggtaagaatgaataaagctggaaaatcacgggatttttctggcttaatctaagctaataaatcagttacctttccctaatgattcaaaccattgataatgaaattttgcttgctcttctggggggacatcaacatctttatcctcaaaatcaaatatatgaacctgattttcaggtaagccatactgacctaatttagtttcataagctgttatacctaaacccatatccctctgcattgccgatgggaatacatttatttttgctcctttgcaaagaaaaacgatatcttttaattggtttcttaaatctataaagcatgaaaaataatcaatgtcgtttgattctgccaactggttgttattatgaaatattcttaagcaacaatgcctatcaggagaatcaatcaaatgcaatttagcttcttccatttcaccatttattattatttttatttttctttcattgacgcatatcatttttcataccttttcagaactaaactattatagttacccatattctcactggcgctaactggtattgcacttaatctttttagatttactccccaagcataccagagtcaatctaaatattattagatccacttctattagaggtgttactcttcattcaattatcaaaaaaagtaccagtgcagtttgagtttaaataaaaattagccagttactatttattaacaagttcaaagaacttcaactacggcaacaaatttagggccttcatatacatttaaagtaaatccttgagtaagtaaaaaatcaggagcattatcagctagaaaataagcttttcctaaacctattctctcatttccttcttcatcataagagttgctttttatgtctaatactaagctccaatatgttgtttcaccaatcttactttttattggctcagtaatgacataatataatgtattgattggtaaattatttttcccaccttggttttcagaaatccaattaatttggacattaatgattaatctttccataaaagtattttaaaatttttacatgatgagagagatataaacttattccatttgggtttgattttggctttattcagtacaggatcttcaatatatcgagcattacctgtattatacaggttttcacgtgcataggcagaatttgctatgtggtctggtacatggatttgaacaacttggaatatcatggaatcttcccagttttatagtgttaatttcaattcatttcagaatatttaaaaatgcctaataaaattacctgatatcttgctggttgccgttcgccaactgcaagaatgcctaataattttacgtttttcatcttgcagtcatatatgtcatacatgactgataaattatcatagttgtgagtcatgattgttgataacggaaactctttgatacctttaattctatcttttattgctactcgcaaatgttcatctaatttatttaagttctttagatttgaaacgctgatagttattttttcatcacagcatggggacttaatggtatgatttagtttataaaattcgtcttcgaacccatcataaatcatctcttttttcttcaaatttttcatttttaagctcatgacaacctcttaagagcgccatctgttactaattgttcaattttaccagaaaatttatattgagtacccatactgggctgttcaaatcatggaatagctggctaagatcttccgggattttgaggtttttagccagctcaaattgatgtagttcaatgattttggtcaccatgataggctcttaaaagaacaaagccggaagatcacagtgatctttccggctaattcattatgttagatattattaatctaaatatggtgatctatatttttgtactgtaagtaaagtatttattttatctatacattcttttggatctatttttgatacaaaatacatataaaaatcatatccaaaatgaaattcgcatgtatctgatatgagtttacaccacatatcttctctcaaaattgatttaattccgttttttaattgattgatatctatagactcaccttcaatatatgaaatttcatcaacacttacttctagtgcttggattttaagagacttgatacctaaacagttacataaattaataatataatctatatattgattttcaatccgttcgtattcatctttttttactttttgaccaatatcaaaaaagctagtccattcatcaggatcagaataaatatcgccattttcattgaaattagtatattttgttattctatatgaatatttcattagtcacctatcctattcagatcagcatcatatgttcccgatcttgttttcctgctacctaaatttttcacactatcagcagccttccatacacctccattatgttgatcaacatcaggagtaatatatttcattttgttagatgctttcttattcatataaataggttgtccatgagaacgctcgttaatttttgtatatccgagctttttagccatttcggcaaagttacattttgctaatccaaatggatcaacaaaattaaccggattatcgacatacccatacggattcagcccacccaataacccaatggggtcaggcgatatgtactgcgcggtttccggtaagtaataccgatagcggttgtagtaaagcccgctttcgtcgtcctcaaattgccctaagaatcggaaattgcagttaacatgataatcggcatgaccggagctaaccacctgaaaactatctgcctgcccccacgtttttagccgctgtgcccagactagtactccttgttcgtctagcatctcgcgcggtgtgccctgatggtcgctcacgatatagtgtagcttgtatttctcaaaacgggccgacggcgttaatgagtagggttcatataaccaacggatacgttgaccttccgccggcgtgccgtcagcgtaaattggcgtttcctcgataagttgatcgccgctccacaggtaatcctgccccataattgcatcgcttctcggctctacatctggtctaccagccaaccacaactgtaaattagccgcggctagttttccatcgtgaattttcagtttttggagacgcctgccaaaagggtcatatttatactgccagcgagagccatctggagtttcgcaatgagtgagctggttttgggtatcccaacggtagcgccatatttgtgggcgaaaaccgtcacgttgttcggttttttctatcaaacgaccattgtcatcatagcgatagcggatatcaccttgctgtaccactcgcccggctttctggcactggttgatttgcgccactgccccccgagcatcagtcggcaggtgctggctcaggttaccgttggcatcataactgaatcgctcttcatgcggacgcacgccctcgaaaagggtatgctgtatttggtcgttactattgtaacggtagcgggtttgcccccagcggctgtcgtcaatcacacggacgttatgggctcggtcatattgccagctccggttaacggcggtggcctgtggcgggaagtgagggtcattttgtgccagcgtttccttgaaaaattgcgtggcctgccctgccgactgatgtgctagtaggccggttgcggtgtagcggctggcaaggataaagccttgggcactttcgcgcacggcttcccgccccagagcgtcgtgctggaaagtcagtggcgcatgctggttaagctgaaagtgattcagactccccgacaggttataaccgaaatgcagggtattgccatccacactttcgctgaccggacgcccggtcaggctatcccactcacgggtaatttcccgcccgttgatgcgttcgcaaattggcaggccagtggtcttatcatactcatactcgacgacagcatcggcattagtggctttcaccaattgataccgtttgttgtattcataagtcgtggtggctttaagcactaacttgccctcttccggttgccagttttcctgttttatcagtgcaccggcagcagagtagtgccaacgtaattgttgaccatccggatattgtgactgaatacggcggcccagcttatcgtactgataagtaatggtacgcccggtaaaatcagtttctcggataatttgcccggcggcatcccgctcatagcgataggtttcactcgtggaggcggtaaccgaattcaatcgggtcagacggtcataaccaaagcacaaaatagtaccgtcgggtcgtgtgacttgggttagcaagtcaaatgcgccgtaagtgtagcgtgtggtacggccttcgccgtcagttactgccaccacacgccgttcactgtcataggccagttgctgcgtagtgccatccggtagttcaacatcggtcaggctgccgttaaggctggcatggtcatcgctatagcgatagtaggtttgttgtttgagggcatcggtgagttggcgcaaacgacccagttcatccagttgcagcccagtggtctgaccgtccggtgtcatcactgcagccagccgttgctgctcgtcgtaggcgtaataccattggcgaccatctggcagcaggcgttggcgtaattcaccgtggagaccgtattggtattcttctttgtgccccaacggattagtcagtgcggtcaggttgccctgctcatcatagtgaaattgccagcgatcgcccgttggcaggacactttcaatcagttgcccgtgttcgtcataaccgtaataaaaggtgtcgccagtcggtagttttacttcggtcaatgcaccgtcaggattgtaatcgaatgaggttattccaccctctgcatcagcttcccagacaatttggctgtggtgccactggcggcgggtgatgcgccccagcgggtcaactccgcggatcaccagatagttgttatcgtagtgatactgggtttcaccgccttccgcatcaatatacgtggtgatacgagcattatcgtcatagtggaaactatcgaaccagtagccactggtggtggaggttgtgagtactcgtccacgatcatcgtaagtaagggtaacatcggtctgatcggtatcgtgccagcggatcatctgcccctgtgcatcatattcatgccacaggtggttatgctggaacgcttcgcattcgcttagatagtcttgtgagtcatagtgacaagtgactaatcgctgctgttttttctgttcaagataatctagtgtttggagttgctgttcctgataactcaggatcagccggaaaccgtcggtgcgagtgacttcgatcaattgtgagtgtttatcgtagataaaccgaatcgcgttctgacgtcgatcggtgatcgcggataatttacggatagatccaacggcatgattgaagtggtaggtaagctgggattgacgatcaatcagcttcaactcattgttcaattcgccggtcagcaggtaatggaggatatgctggttacgggcgagcaccgtgttacccggtgtgctgaaatcgtagatcacgccgtcggcatcggtgaaatttaccttnccnnngnnnngnnnnnnnnnnnggnnncagtcatccgcccatttagggccaaacaggccgttgaaattagcggtggagngataagtgcaagtcagggtaatcggcaataatccgggaatagcaataaccggccagatttgtagaaaatcaccagtcgcaacatcaacgggttctcctttttttatgcaggttccgttacaacttccctctttgttggttgatgaggtcgcgtcatcattatgttgctgagtttcctttttcggactagcacctttttgttgtgcttttttgagttttggccccaccttggctcctattttagcagctcctttgaggagtccaccaatgcctgtagcagaagaagctccagtgaagattaaggccccacctttctcggcatcacttttcatttccatcttaatcgcatcagcattgaccatatcaacggccttttgctgaaggtcagaaattccgacgggagcgacgcccatatatcctaatgcttgttcgactgcaacggcgggagtcgttgcgactataatcgcacctttcccgaacaattcgccaatttcaggaacggtattccagagcgcttttcctgccccgatagcggctgctcccggattatcccaggcggcattcaactcttctttggcttcctctccccacttttgcacgtcttccttggtctcatcccaccattctcccaccttgtcaaaaaatcctttttcttgctcagtttccggtgtgacggccgcattcgcttcatgtggcggatttgccccctgtggtgcctgctcgacgattttacctaccgtgttacccgtaccgctcgggctgtcatcgcggactttggttggcaaagattcgttaggttcaggaggaggtaacttccattcttccaacggaaattcaccacttttgaatttatcaacagcatcctgcacaacctgcttgaatccatcaggggtccatactgaattttcccctccgacttcgctgtgagggaacaggtcttccgcatatttgagagccatttcggctctttcttgcgtgtggatggtaaagttttcacaaaattgtttggcaccatatcctgtaatttcaattctgactgtcattgcgttttccttatgctccattcatccagaattcatctccatggcgcagtaccagcttgttacctgctcggacagtttgggtatgtgcttttggatggcatttaccccccacagtcccgcttttgacaccatttgccacacccggttggtcacccagtgtcgtgggcacaaaactgcgggcaaacaccaccacgggttgaccattagcccgcacggttttttccggtgccgaactgtccgccagtttcgccaccaccggataagggatgggaggtgtggcaggtcctatcggggttttgcacacgtccggcaacataccgataatcatccaggtgcccgcagtgcgggcgaggtagttatcagccatccgttttctcctcttccagtggtgccagtttgagtaacggcgcatccgggttgatttcaaaccgggcttcggcgacccgtacaggcagggaggctttgaagttcagtcggcaggtcatgtgcagtgttctggcctcgctgtcgataatgagcgtatcgagacgcattggcacaggtaacagaatcccgttttgcatgcgcaacaaaatgaatgggcgatgtcccggcagtttgacatgcaggtcactgtggggcgttaggccgctcagggtgatggcaatatcggtgtccggccagtctatttgttggtcagttggtgcgccgttccaatagccgaagtcaaaatcttttggcagataagggtggcggtgttccagccagtcggcgtcgtaagtaccggccagctggcgacggggtagccacggacgaccgataaagcccatgccctgcggttggcaggctggggtatctgtaggtaatgtgccggttagttgcgctgtaaaatgctcagcagtaaaaggggcatctgactggatgatgcgcggtgccggatagcgaatgaggtgtttggcattggcgtaccacggagtaataaatcctgttcctagtggattggtttcacaaaccgcatgagccaccggggcattttctccgtcaggatgtcgttggcgctgttccggagtcaggcggtcacgctctttgaggtgtttgtttgctttatcgtctgcctgaattttgcactcacccccgaaagcgtagcgataatccagcggcagtgtggtaaaggtttttggctccgttagttgccaatggccgctggcatcacggataaactcccgctcaccggtgatggtcagggttttgtcgagcaggggctgaccctgccgggttttgacctgcaaccgcacgggaaattcgctacaggggcggttatccggcgcgtaggctgtgccgttaacaatcacgtcacagcgcggtttaaacggcgcaaggtcactctcctgcaacacctgcgagacattcatctgcccgcgatattcatcctgtaagcataacggcggggcgggcagcagttcggcgacgtattccccctgtccggcgggcatcagctggtagccgattttcatcaccgccacatgatgctcagtatcatcgacatccaacatcgaatagttcatcaccgcaaaaggggtaaggttacgaaattccatctctgtctgtccttgttagttcaggtcgatgtctttaccggtgatttgtaccgggccactggcctcaaatttgaattcactgccctgtatggtgattttgcctgagctgtccattcgcaggacgctggcaccgcatttcagctcaatcacatcaccggcattaatggacagggtattaccaactgcaatggatttatggctgccgacctgctcagtctggctggcgccgacggtggtattcatgctggtgccgacagtcaatgcgtagaccatgccgatggtttccgtgctggtcattttcaccatttcatttttgtgctcattcactttgatggtctggtttttctccacggtttcgatgtggttggccagtacatgggtatcgcggttattgagcactttggtgttcatgtctttttgtgcgtgcaaatccagccgttcactgcccttggcatcctcaaacaacagttcgttatagccttgtcccttgtgggttttggagcggaacgccatctgagttttgctgcccggtaagctccccggcgggatattgctggcatggtaggtacgcccggtgactatcggttggtcggggtcgccgtgcaggaaatccaccaccacttcctgtccgatacgcggaatagccagcatgccccagccctgaccgggccacggctgactg

SEQ ID NO: 1986 - DNA, 10561 bp, Xenorhabdus sp.; identical to SEQ ID NO: 1985
  CDS (477)..(656)
  unsure (1)..(10561): unsure at all n locations

SEQ ID NO: 1987 - DNA, 10561 bp, Xenorhabdus sp.
  CDS (8743)..(8907)
  unsure (1)..(10561): unsure at all n locations
cagtcagccgtggcccggtcagggctggggcatgctggctattccgcgtatcggacaggaagtggtggtggatttcctgcacggcgaccccgaccaaccgatagtcaccgggcgtacctaccatgccagcaatatcccgccggggagcttaccgggcagcaaaactcagatggcgttccgctccaaaacccacaagggacaaggctataacgaactgttgtttgaggatgccaagggcagtgaacggctggatttgcacgcacaaaaagacatgaacaccaaagtgctcaataaccgcgatacccatgtactggccaaccacatcgaaaccgtggagaaaaaccagaccatcaaagtgaatgagcacaaaaatgaaatggtgaaaatgaccagcacggaaaccatcggcatggtctacgcattgactgtcggcaccagcatgaataccaccgtcggcgccagccagactgagcaggtcggcagccataaatccattgcagttggtaataccctgtccattaatgccggtgatgtgattgagctgaaatgcggtgccagcgtcctgcgaatggacagctcaggcaaaatcaccatacagggcagtgaattcaaatttgaggccagtggcccggtacaaatcaccggtaaagacatcgacctgaactaacaaggacagacagagatggaatttcgtaaccttaccccttttgcggtgatgaactattcgatgttggatgtcgatgatactgagcatcatgtggcggtgatgaaaatcggctaccagctgatgcccgccggacagggggaatacgtcgccgaactgctgcccgccccgccgttatgcttacaggatgaatatcgcgggcagatgaatgtctcgcaggtgttgcaggagagtgaccttgcgccgtttaaaccgcgctgtgacgtgattgttaacggcacagcctacgcgccggataaccgcccctgtagcgaatttcccgtgcggttgcaggtcaaaacccggcagggtcagcccctgctcgacaaaaccctgaccatcaccggtgagcgggagtttatccgtgatgccagcggccattggcaactaacggagccaaaaacctttaccacactgccgctggattatcgctacgctttcgggggtgagtgcaaaattcaggcagacgataaagcaaacaaacacctcaaagagcgtgaccgcctgactccggaacagcgccaacgacatcctgacggagaaaatgccccggtggctcatgcggtttgtgaaaccaatccactaggaacaggatttattactccgtggtacgccaatgccaaacacctcattcgctatccggcaccgcgcatcatccagtcagatgccccttttactgctgagcattttacagcgcaactaaccggcacattacctacagataccccagcctgccaaccgcagggcatgggctttatcggtcgtccgtggctaccccgtcgccagctggccggtacttacgacgccgactggctggaacaccgccacccttatctgccaaaagattttgacttcggctattggaacggcgcaccaactgaccaacaaatagactggccggacaccgatattgccatcaccctgagcggcctaacgccccacagtgacctgcatgtcaaactgccgggacatcgcccattcattttgttgcgcatgcaaaacgggattctgttacctgtgccaatgcgtctcgatacgctcattatcgacagcgaggccagaacactgcacatgacctgccgactgaacttcaaagcctccctgcctgtacgggtcgccgaagcccggtttgaaatcaacccggatgcgccgttactcaaactggcaccactggaagaggagaaaacggatggctgataactacctcgcccgcactgcgggcacctggatgattatcggtatgttgccggacgtgtgcaaaaccccgataggacctgccacacctcccatcccttatccggtggtggcgaaactggcggacagttcggcaccggaaaaaaccgtgcgggctaatggtcaacccgtggtggtgtttgcccgcagttttgtgcccacgacactgggtgaccaaccgggtgtggcaaatggtgtcaaaagcgggactgtggggggtaaatgccatccaaaagcacatacccaaactgtccgagcaggtaacaagctggtactgcgccatggagatgaattctggatgaatggagcataaggaaaacgcaatgacagtcagaattgaaattacaggatatggtgccaaacaattttgtgaaaactttaccatccacacgcaagaaagagccgaaatggctctcaaatatgcggaagacctgttccctcacagcgaagtcggaggggaaaattcagtatggacccctgatggattcaagcaggttgtgcaggatgctgttgataaattcaaaagtggtgaatttccgttggaagaatggaagttacctcctcctgaacctaacgaatctttgccaaccaaagtccgcgatgacagcccgagcggtacgggtaacacggtaggtaaaatcgtcgagcaggcaccacagggggcaaatccgccacatgaagcgaatgcggccgtcacaccggaaactgagcaagaaaaaggattttttgacaaggtgggagaatggtgggatgagaccaaggaagacgtgcaaaagtggggagaggaagccaaagaagagttgaatgccgcctgggataatccgggagcagccgctatcggggcaggaaaagcgctctggaataccgttcctgaaattggcgaattgttcgggaaaggtgcgattatagtcgcaacgactcccgccgttgcagtcgaacaagcattaggatatatgggcgtcgctcccgtcggaatttctgaccttcagcaaaaggccgttgatatggtcaatgctgatgcgattaagatggaaatgaaaagtgatgccgagaaaggtggggccttaatcttcactggagcttcttctgctacaggcattggtggactcctcaaaggagctgctaaaataggagccaaggtggggccaaaactcaaaaaagcacaacaaaaaggtgctagtccgaaaaaggaaactcagcaacataatgatgacgcgacctcatcaaccaacaaagagggaagttgtaacggaacctgcataaaaaaaggagaacccgttgatgttgcgactggtgattttctacaaatctggccggttattgctattcccggattattgccgattaccctgacttgcacttatcnctccaccgctaatttcaacggcctgtttggccctaaatgggcggatgactgnnnccnnnnnnnnnnncnnnncnnnggnaaggtaaatttcaccgatgccgacggcgtgatctacgatttcagcacaccgggtaacacggtgctcgcccgtaaccagcatatcctccattacctgctgaccggcgaattgaacaatgagttgaagctgattgatcgtcaatcccagcttacctaccacttcaatcatgccgttggatctatccgtaaattatccgcgatcaccgatcgacgtcagaacgcgattcggtttatctacgataaacactcacaattgatcgaagtcactcgcaccgacggtttccggctgatcctgagttatcaggaacagcaactccaaacactagattatcttgaacagaaaaaacagcagcgattagtcacttgtcactatgactcacaagactatctaagcgaatgcgaagcgttccagcataaccacctgtggcatgaatatgatgcacaggggcagatgatccgctggcacgataccgatcagaccgatgttacccttacttacgatgatcgtggacgagtactcacaacctccaccaccagtggctactggttcgatagtttccactatgacgataatgctcgtatcaccacgtatattgatgcggaaggcggtgaaacccagtatcactacgataacaactatctggtgatccgcggagttgacccgctggggcgcatcacccgccgccagtggcaccacagccaaattgtctgggaagctgatgcagagggtggaataacctcattcgattacaatcctgacggtgcattgaccgaagtaaaactaccgactggcgacaccttttattacggttatgacgaacacgggcaactgattgaaagtgtcctgccaacgggcgatcgctggcaatttcactatgatgagcagggcaacctgaccgcactgactaatccgttggggcacaaagaagaataccaatacggtctccacggtgaattacgccaacgcctgctgccagatggtcgccaatggtattacgcctacgacgagcagcaacggctggctgcagtgatgacaccggacggtcagaccactgggctgcaactggatgaactgggtcgtttgcgccaactcaccgatgccctcaaacaacaaacctactatcgctatagcgatgaccatgccagccttaacggcagcctgaccgatgttgaactaccggatggcactacgcagcaactggcctatgacagtgaacggcgtgtggtggcagtaactgacggcgaaggccgtaccacacgctacacttacggcgcatttgacttgctaacccaagtcacacgacccgacggtactattttgtgctttggttatgaccgtctgacccgattgaattcggttaccgcctccacgagtgaaacctatcgctatgagcgggatgccgccgggcaaattatccgagaaactgattttaccgggcgtaccattacttatcagtacgataagctgggccgccgtattcagtcacaatatccggatggtcaacaattacgttggcactactctgctgccggtgcactgataaaacaggaaaactggcaaccggaagagggcaagttagtgcttaaagccaccacgacttatgaatacaacaaacggtatcaattggtgaaagccactaatgccgatgctgtcgtcgagtatgagtatgataagaccactggcctgccaatttgcgaacgcatcaacgggcgggaaattacccgtgagtgggatagcctgaccgggcgtccggtcagcgaaagtgtggatggcaataccctgcatttcggttataacctgtcggggagtctgaatcactttcagcttaaccagcatgcgccactgactttccagcacgacgctctggggcgggaagccgtgcgcgaaagtgcccaaggctttatccttgccagccgctacaccgcaaccggcctactagcacatcagtcggcagggcaggccacgcaatttttcaaggaaacgctggcacaaaatgaccctcacttcccgccacaggccaccgccgttaaccggagctggcaatatgaccgagcccataacgtccgtgtgattgacgacagccgctgggggcaaacccgctaccgttacaatagtaacgaccaaatacagcatacccttttcgagggcgtgcgtccgcatgaagagcgattcagttatgatgccaacggtaacctgagccagcacctgccgactgatgctcggggggcagtggcgcaaatcaaccagtgccagaaagccgggcgagtggtacagcaaggtgatatccgctatcgctatgatgacaatggtcgtttgatagaaaaaaccgaacaacgtgacggttttcgcccacaaatatggcgctaccgttgggatacccaaaaccagctcactcattgcgaaactccagatggctctcgctggcagtataaatatgacccttttggcaggcgtctccaaaaactgaaaattcacgatggaaaactagccgcggctaatttacagttgtggttggctggtagaccagatgtagagccgagaagcgatgcaattatggggcaggattacctgtggagcggcgatcaacttatcgaggaaacgccaatttacgctgacggcacgccggcggaaggtcaacgtatccgttggttatatgaaccctactcattaacgccgtcggcccgttttgagaaatacaagctacactatatcgtgagcgaccatcagggcacaccgcgcgagatgctagacgaacaaggagtactagtctgggcacagcggctaaaaacgtgggggcaggcagatagttttcaggtggttagctccggtcatgccgattatcatgttaactgcaatttccgattcttagggcaatttgaggacgacgaaagcgggctttactacaaccgctatcggtattacttaccggaaaccgcgcagtacatatcgcctgaccccattgggttattgggtgggctgaatccgtatgggtatgtcgataatccggttaattttgttgatccatttggattagcaaaatgtaactttgccgaaatggctaaaaagctcggatatacaaaaattaacgagcgttctcatggacaacctatttatatgaataagaaagcatctaacaaaatgaaatatattactcctgatgttgatcaacataatggaggtgtatggaaggctgctgatagtgtgaaaaatttaggtagcaggaaaacaagatcgggaacatatgatgctgatctgaataggataggtgactaatgaaatattcatatagaataacaaaatatactaatttcaatgaaaatggcgatatttattctgatcctgatgaatggactagcttttttgatattggtcaaaaagtaaaaaaagatgaatacgaacggattgaaaatcaatatatagattatattattaatttatgtaactgtttaggtatcaagtctcttaaaatccaagcactagaagtaagtgttgatgaaatttcatatattgaaggtgagtctatagatatcaatcaattaaaaaacggaattaaatcaattttgagagaagatatgtggtgtaaactcatatcagatacatgcgaatttcattttggatatgatttttatatgtattttgtatcaaaaatagatccaaaagaatgtatagataaaataaatactttacttacagtacaaaaatatagatcaccatatttagattaataatatctaacataatgaattagccggaaagatcactgtgatcttccggctttgttcttttaagagcctatcatggtgaccaaaatcattgaactacatcaatttgagctggctaaaaacctcaaaatcccggaagatcttagccagctattccatgatttgaacagcccagtatgggtactcaatataaattttctggtaaaattgaacaattagtaacagatggcgctcttaagaggttgtcatgagcttaaaaatgaaaaatttgaagaaaaaagagatgatttatgatgggttcgaagacgaattttataaactaaatcataccattaagtccccatgctgtgatgaaaaaataactatcagcgtttcaaatctaaagaacttaaataaattagatgaacatttgcgagtagcaataaaagatagaattaaaggtatcaaagagtttccgttatcaacaatcatgactcacaactatgataatttatcagtcatgtatgacatatatgactgcaagatgaaaaacgtaaaattattaggcattcttgcagttggcgaacggcaaccagcaagatatcaggtaattttattaggcatttttaaatattctgaaatgaattgaaattaacactataaaactgggaagattccatgatattccaagttgttcaaatccatgtaccagaccacatagcaaattctgcctatgcacgtgaaaacctgtataatacaggtaatgctcgatatattgaagatcctgtactgaataaagccaaaatcaaacccaaatggaataagtttatatctctctcatcatgtaaaaattttaaaatacttttatggaaagattaatcattaatgtccaaattaattggatttctgaaaaccaaggtgggaaaaataatttaccaatcaatacattatattatgtcattactgagccaataaaaagtaagattggtgaaacaacatattggagcttagtattagacataaaaagcaactcttatgatgaagaaggaaatgagagaataggtttaggaaaagcttattttctagctgataatgctcctgattttttacttactcaaggatttactttaaatgtatatgaaggccctaaatttgttgccgtagttgaagttctttgaacttgttaataaatagtaactggctaatttttatttaaactcaaactgcactggtactttttttgataattgaatgaagagtaacacctctaatagaagtggatctaataatatttagattgactctggtatgcttggggagtaaatctaaaaagattaagtgcaataccagttagcgccagtgagaatatgggtaactataatagtttagttctgaaaaggtatgaaaaatgatatgcgtcaatgaaagaaaaataaaaataataataaatggtgaaatggaagaagctaaattgcatttgattgattctcctgataggcattgttgcttaagaatatttcataataacaaccagttggcagaatcaaacgacattgattatttttcatgctttatagatttaagaaaccaattaaaagatatcgtttttctttgcaaaggagcaaaaataaatgtattcccatcggcaatgcagagggatatgggtttaggtataacagcttatgaaactaaattaggtcagtatggcttacctgaaaatcaggttcatatatttgattttgaggataaagatgttgatgtccccccagaagagcaagcaaaatttcattatcaatggtttgaatcattagggaaaggtaactgatttattagcttagattaagccagaaaaatcccgtgattttccagctttattcattcttaccttgatgaatactcaatgattgataacatggtttttattataattaaaaaataggtaacaaatgaaaagtaatgaaaaagtagtcgatttattgatatcacatagccaaattcaggttcgctcaagaccatttgatgaaaaaccatgccagtggggaagtgaaaacataaaacataaaacaaggggctatccttcacaaagattatgttgtattcgatcctttaccagatgatgcttttggcgcgaatatacacttaattttggaagaaaattttaatatggaccctctggttcagcggtgtatggttgttcctttttatgtcacagataaaaataaactggagatagcgtcagctactgagaaatttaagattgatttagaccttaaagaaactctttatagcttatactatgaagtatgtgaaggagatgaagttttttataaattaacttttgtcccatctgaaattaaggttgatgctaaatatatgttagatgacccgtggggtggagaaaaaaacaaatctcttcaagaaggtactatctaaataatccagcctgcattttttataataaaatgcaggctggattaatgatgtgacttatcaatagagacaatcaatatgcaatatgctattttcctttcggaacagcacttattcacgttaacgagaggggaattaagcccccgctaaaatgcagtttcaagcccagtgcttttgatattttatataccacattaaacgatgggttgccctcttccattctttcaactctgattaagatctttgctttggctattcggtcttttaaatattttaaccatttttcaaaatattgagtcctttcaatggttatcaggctcacctctaaagtgaatattattgtatataaacaacacgatatgtcaaccacagttaacacaccattatcagcaattaaaatgttttatacgactcaggcaggtcagattcggtcatcaacataattttgccgtaaccgaaagcaatttgaacagacttatccaacaaaccggtttccgttaaccagtcgcccgccagacacagctcgccactgttacgcacccaatcaatgccctgtttcggatcattttccacggcgtggaatagggttgctggattatcgtcaggcttcgccaatgtcaacatcagcccatttgctggatatgaaacagcgtattgggcgtaaatcccatctgctgcatatcatcaccacgtaatacacattccggtttttcagcgtgttcagtagaaaatttaagctccatagattccttctttgttgattcataaaataaaatgcgagcggcttcgcaaaagaaaatttttgccattttaagtgcaaagcacagcttacgcagtcgcgttcaatactatgttttagttgataaaacatagtattatgcgtttatttcggcagctttttatttaattttccgggaaattgccgtagccagtgtgctacggcgatatcatcccattcgccttcattcaggctttttaagcagtgtcacagttcatgaaaattttgtgccgtgatgatcagacaacctttagagcacatggctcgagca

SEQ ID NO: 1988 - DNA, 10561 bp, Xenorhabdus sp.; identical to SEQ ID NO: 1987
  CDS (2344)..(6654)
  unsure (1)..(10561): unsure at all n locations

SEQ ID NO: 1989 - DNA, 10561 bp, Xenorhabdus sp.; identical to SEQ ID NO: 1987
  CDS (1893)..(2249)
  unsure (1)..(10561): unsure at all n locations

SEQ ID NO: 1990 - DNA, 10561 bp, Xenorhabdus sp.; identical to SEQ ID NO: 1987
  CDS (713)..(1900)
  unsure (1)..(10561): unsure at all n locations

SEQ ID NO: 1991 - DNA, 10561 bp, Xenorhabdus sp.; identical to SEQ ID NO: 1987
  CDS (2)..(667)
  unsure (1)..(10561): unsure at all n locations

SEQ ID NO: 1992 - DNA, 6032 bp, Xenorhabdus sp.; identical to SEQ ID NO: 398
  CDS (471)..(641)
